United States Patent Application Publication US 2026/0240958 A1 - sequence listing, part 2

SEQ ID NO: 2830 - RNA, 5419 nt, synthetic construct
  source 1..5419: mol_type = other RNA
aggaaataagagagaaaagaagagtaagaagaaatataagagccaccatggcccctaagaagaagcgtaaagtgagccgggtgaacggcagcggcagcggcggcggcatgaaccacgaccaggagttcgacccccctaaggtgtaccctcccgtccccgccgagaagagaaagcccatccgggtcctgagcctgttcgatggcatcgccaccggtctgctggtgctgaaggacctgggcatccaggtggataggtacattgcctccgaggtgtgcgaggactccatcaccgtgggaatggtgcgtcatcagggcaagatcatgtacgtgggcgacgtgcggagcgtgacacagaagcatatccaggagtggggccctttcgacctggtgatcggcggcagcccttgcaatgacctgagcatcgtgaacccagcccggaagggcctgtacgagggaaccggcagactgttcttcgagttttacagactgctgcacgacgcccggcctaaggaaggcgacgaccggcccttcttttggctgttcgagaatgtggtggccatgggagtcagcgacaagcgggatattagccggttcctggagagcaaccccgtgatgatcgatgccaaggaagtgagcgccgcccaccgggccagatacttctggggcaatctgcctggcatgaacagacccctggccagcaccgtgaacgacaagctggagctgcaggagtgcctggagcacggccggatcgccaagttcagcaaggtgagaaccatcaccacccgaagcaacagcatcaaacaaggcaaggaccagcactttcctgtgttcatgaacgagaaggaggacatcctgtggtgtaccgagatggagagagtgttcgggttcccagtccactacacagatgtcagcaacatgtctagactggccagacagagactgctgggaagaagctggtccgtccctgtgatcagacacctgttcgcccctctgaaggagtacttcgcctgcgtgagcagcggcaacagcaacgccaacagccggggccccagcttctctagcggcctggtgccactgtccctgagagggagccacatgggccccatggagatctacaaaaccgtgagcgcctggaagcggcagcctgtgcgcgtgctgagcctgtttcggaatatcgataaagtcctgaaaagcctgggattcctggagagcggctctggctccggcggtggcaccctgaagtacgtggaggatgtgacaaacgtggtcagacgggatgtggagaagtggggccccttcgatctggtgtacggcagcacccaacccctgggcagctcttgtgaccggtgccctggctggtacatgtttcagttccaccggatcctgcagtacgccctgccgagacaggagtcccagcggccattcttttggattttcatggacaacttgctgctgaccgaggatgaccaggaaactaccactcggttcctgcagaccgaagccgtgaccctgcaggacgtgagaggccgggactaccagaacgccatgcgggtgtggtccaacatccctggactgaaaagcaagcacgcacctctgacccctaaagaagaggagtacctgcaggcccaggtgcggagcagaagcaagctggacgcccctaaggtggatctgctggtgaagaattgcctcctgcccctgagagagtacttcaagtatttcagccagaatagtctgcccctgggcggcccaagcagcggcgcccctcctcccagcggcggcagcccagccggctccccaacctctaccgaggagggcacctctgagtccgccacccccgagagcggccctggcacctccaccgagcccagcgagggcagcgcacccggcagccctgccggcagccccacctccacagaggagggaaccagcaccgagcccagcgaaggcagcgccccaggcaccagcaccgagcctagtgagggcggctctggcggcggcagcgcccaggagattaaacggatcaacaagatcagaagaagacttgtgaaagacagcaacaccaagaaggccggcaagacaggccccatgaaaaccctgctggttagagtgatgacacccgatctgagagagcggctggaaaacctgagaaagaagcctgaaaatatcccccagcccatcagcaatacatctagagccaacctgaataagctgctgaccgattacaccgaaatgaagaaggcgatcctgcatgtgtactgggaagagttccagaaggaccctgtgggcctgatgagccgggtggcccagcctgccagcaagaagatcgatcagaacaagctgaaacctgagatggacgagaagggcaacctgaccaccgccggctttgcctgctctcagtgtggccagcccctgttcgtgtacaagctggagcaggtgtctgagaagggcaaggcttacaccaactacttcggacggtgcaatgtggccgagcacgaaaagctgatcctgctggcccagctgaagcccgagaaggatagcgacgaagccgtgacatatagcctgggaaagtttgggcagagggccctggatttctacagcattcatgtgaccaaggagtccacccaccccgtgaagcccctggcccagatcgccggaaacagatacgcctccggacctgtgggaaaggccctgagcgacgcatgtatgggcacaatcgcctccttcctgtctaagtaccaggacatcatcatcgaacaccagaaggtggtgaagggcaaccagaagagactggagagcctgcgggagctggccggcaaggaaaacctggaataccctagcgtgaccctgccacctcagcctcacaccaaggagggcgttgatgcctacaacgaagtgatcgcccgggtgcgaatgtgggtgaacctgaacctgtggcagaagctgaagctaagcagagatgatgccaagcctctgctgagactgaagggattcccttcctttcctctggtcgagagacaggccaacgaagtggactggtgggacatggtgtgtaacgtgaagaagctgatcaacgagaaaaaggaggatggcaaggtgttttggcagaatctggctggctacaagagacaggaagccctgagaccatacctgagcagcgaggaagatcggaagaagggaaagaaattcgctcggtaccagctgggcgacctgctgctgcacctggaaaagaagcacggcgaggactggggaaaggtgtacgacgaggcctgggagcggattgacaagaaagtggaaggcctgagcaagcacatcaagctggaagaggaacggagaagcgaggacgcccagagcaaggccgccctgaccgactggctgcgggctaaggccagcttcgtgatcgagggcctgaaggaggccgacaaggacgagttctgcagatgcgagctgaagctgcagaagtggtacggggacctgcggggaaagcccttcgccatcgaagccgagaacagcatcctggacatcagcggcttcagcaagcagtacaactgtgccttcatctggcagaaggacggcgtgaagaagctgaacctgtacctgatcatcaactacttcaagggcggcaagctgcggttcaagaagatcaaacctgaagccttcgaagccaacagattctacaccgtgatcaacaaaaagagcggcgagatcgtgcccatggaggtgaacttcaacttcgacgaccccaacctgatcatcctgcctctggcctttggcaagagacagggcagagaattcatctggaacgacctgctgtccctggaaaccggcagcctgaagctggccaacggaagagtgatcgagaagacactgtacaacagaagaacccggcaggatgagcctgccctgttcgtggccctgaccttcgagcggcgggaggtcctggactcctccaatatcaaaccaatgaacctgatcggcgtggcaagaggcgaaaacatccccgccgtgatcgccctgaccgaccccgagggctgcccactgagccggtttaaggatagcctgggaaacccaacccacatcctgagaatcggcgagagctataaggagaagcagcggaccatccaggccaagaaggaggtggagcagcggagagccggcggctacagccggaagtacgccagcaaagccaagaatctggcagacgatatggtgagaaacaccgctagagatctgctgtactacgccgtgacccaggatgccatgctgatcttcgccaacctgagccggggcttcggccggcagggcaagcggaccttcatggccgagagacagtacacacggatggaggactggctgaccgccaagctggcctacgagggcctgagcaagacctacctgtccaagacactggcccagtacacctccaagacatgcagcaactgtgggtttaccatcaccagcgccgactacgacagggtgctggagaagctgaagaagacagcaacaggctggatgaccacaattaacggcaaggagctgaaggtggagggccagattacctactacaacagatacaagagacagaacgtagtcaaggacctgtccgtcgagctggatagactgagcgaagaatctgtgaacaacgacatctcctcctggacaaagggcagaagcggagaagctctgagcctcctgaagaaaagattctcccatagacccgtgcaggagaagttcgtgtgcctgaactgcggcttcgagacacacgcagccgagcaagccgccctgaacatcgccagatcctggctgttcctgcggagccaggagtacaagaaataccagacaaacaagacaaccggcaacaccgataagagagccttcgtcgagacctggcagtccttttaccggaagaagcttaaggaggtgtggaaacctgccgtgcggtctggcggatctggcggaggctccacaagcgtgaacgacctggtgaccttcaaggacgtggccatcgacttcagccaggaggagtggcagtggatgaaccccgcccagaagaggctgtacaggagcatgatgctggagaactaccagagcctggtgagcctgggcctgtgcgtgagcaagccctacgtgatcagcctgctggagcagggcagggagccctgggagatgaccagcgagatgaggaggagccccttcagcgactgggagagcatcaccagccccaagaaaaagagaaaagtctaagctgccttctgcggggcttgccttctggccatgcccttcttctctcccttgcacctgtacctcttggtctttgaataaagcctgagtaggaaggctagcaaaaaaaaaaaaaaaaaaaaaaaaaaaaaaaaaaaaaaaaaaaaaaaaaaaaaaaaaaaaaaaaaaaaaaaaaaaaaaaa

SEQ ID NO: 2831 - RNA, 5428 nt, synthetic construct
  source 1..5428: mol_type = other RNA
aggaaataagagagaaaagaagagtaagaagaaatataagagccaccatggcccctaagaagaagcgtaaagtgagccgggtgaacggcagcggcagcggcggcggcatgaaccacgaccaggagttcgacccccctaaggtgtaccctcccgtccccgccgagaagagaaagcccatccgggtcctgagcctgttcgatggcatcgccaccggtctgctggtgctgaaggacctgggcatccaggtggataggtacattgcctccgaggtgtgcgaggactccatcaccgtgggaatggtgcgtcatcagggcaagatcatgtacgtgggcgacgtgcggagcgtgacacagaagcatatccaggagtggggccctttcgacctggtgatcggcggcagcccttgcaatgacctgagcatcgtgaacccagcccggaagggcctgtacgagggaaccggcagactgttcttcgagttttacagactgctgcacgacgcccggcctaaggaaggcgacgaccggcccttcttttggctgttcgagaatgtggtggccatgggagtcagcgacaagcgggatattagccggttcctggagagcaaccccgtgatgatcgatgccaaggaagtgagcgccgcccaccgggccagatacttctggggcaatctgcctggcatgaacagacccctggccagcaccgtgaacgacaagctggagctgcaggagtgcctggagcacggccggatcgccaagttcagcaaggtgagaaccatcaccacccgaagcaacagcatcaaacaaggcaaggaccagcactttcctgtgttcatgaacgagaaggaggacatcctgtggtgtaccgagatggagagagtgttcgggttcccagtccactacacagatgtcagcaacatgtctagactggccagacagagactgctgggaagaagctggtccgtccctgtgatcagacacctgttcgcccctctgaaggagtacttcgcctgcgtgagcagcggcaacagcaacgccaacagccggggccccagcttctctagcggcctggtgccactgtccctgagagggagccacatgggccccatggagatctacaaaaccgtgagcgcctggaagcggcagcctgtgcgcgtgctgagcctgtttcggaatatcgataaagtcctgaaaagcctgggattcctggagagcggctctggctccggcggtggcaccctgaagtacgtggaggatgtgacaaacgtggtcagacgggatgtggagaagtggggccccttcgatctggtgtacggcagcacccaacccctgggcagctcttgtgaccggtgccctggctggtacatgtttcagttccaccggatcctgcagtacgccctgccgagacaggagtcccagcggccattcttttggattttcatggacaacttgctgctgaccgaggatgaccaggaaactaccactcggttcctgcagaccgaagccgtgaccctgcaggacgtgagaggccgggactaccagaacgccatgcgggtgtggtccaacatccctggactgaaaagcaagcacgcacctctgacccctaaagaagaggagtacctgcaggcccaggtgcggagcagaagcaagctggacgcccctaaggtggatctgctggtgaagaattgcctcctgcccctgagagagtacttcaagtatttcagccagaatagtctgcccctgggcggcccaagcagcggcgcccctcctcccagcggcggcagcccagccggctccccaacctctaccgaggagggcacctctgagtccgccacccccgagagcggccctggcacctccaccgagcccagcgagggcagcgcacccggcagccctgccggcagccccacctccacagaggagggaaccagcaccgagcccagcgaaggcagcgccccaggcaccagcaccgagcctagtgagggcggctctggcggcggcagcgcccaggagattaaacggatcaacaagatcagaagaagacttgtgaaagacagcaacaccaagaaggccggcaagacaggccccatgaaaaccctgctggttagagtgatgacacccgatctgagagagcggctggaaaacctgagaaagaagcctgaaaatatcccccagcccatcagcaatacatctagagccaacctgaataagctgctgaccgattacaccgaaatgaagaaggcgatcctgcatgtgtactgggaagagttccagaaggaccctgtgggcctgatgagccgggtggcccagcctgccagcaagaagatcgatcagaacaagctgaaacctgagatggacgagaagggcaacctgaccaccgccggctttgcctgctctcagtgtggccagcccctgttcgtgtacaagctggagcaggtgtctgagaagggcaaggcttacaccaactacttcggacggtgcaatgtggccgagcacgaaaagctgatcctgctggcccagctgaagcccgagaaggatagcgacgaagccgtgacatatagcctgggaaagtttgggcagagggccctggatttctacagcattcatgtgaccaaggagtccacccaccccgtgaagcccctggcccagatcgccggaaacagatacgcctccggacctgtgggaaaggccctgagcgacgcatgtatgggcacaatcgcctccttcctgtctaagtaccaggacatcatcatcgaacaccagaaggtggtgaagggcaaccagaagagactggagagcctgcgggagctggccggcaaggaaaacctggaataccctagcgtgaccctgccacctcagcctcacaccaaggagggcgttgatgcctacaacgaagtgatcgcccgggtgcgaatgtgggtgaacctgaacctgtggcagaagctgaagctaagcagagatgatgccaagcctctgctgagactgaagggattcccttcctttcctctggtcgagagacaggccaacgaagtggactggtgggacatggtgtgtaacgtgaagaagctgatcaacgagaaaaaggaggatggcaaggtgttttggcagaatctggctggctacaagagacaggaagccctgagaccatacctgagcagcgaggaagatcggaagaagggaaagaaattcgctcggtaccagctgggcgacctgctgctgcacctggaaaagaagcacggcgaggactggggaaaggtgtacgacgaggcctgggagcggattgacaagaaagtggaaggcctgagcaagcacatcaagctggaagaggaacggagaagcgaggacgcccagagcaaggccgccctgaccgactggctgcgggctaaggccagcttcgtgatcgagggcctgaaggaggccgacaaggacgagttctgcagatgcgagctgaagctgcagaagtggtacggggacctgcggggaaagcccttcgccatcgaagccgagaacagcatcctggacatcagcggcttcagcaagcagtacaactgtgccttcatctggcagaaggacggcgtgaagaagctgaacctgtacctgatcatcaactacttcaagggcggcaagctgcggttcaagaagatcaaacctgaagccttcgaagccaacagattctacaccgtgatcaacaaaaagagcggcgagatcgtgcccatggaggtgaacttcaacttcgacgaccccaacctgatcatcctgcctctggcctttggcaagagacagggcagagaattcatctggaacgacctgctgtccctggaaaccggcagcctgaagctggccaacggaagagtgatcgagaagacactgtacaacagaagaacccggcaggatgagcctgccctgttcgtggccctgaccttcgagcggcgggaggtcctggactcctccaatatcaaaccaatgaacctgatcggcgtggcaagaggcgaaaacatccccgccgtgatcgccctgaccgaccccgagggctgcccactgagccggtttaaggatagcctgggaaacccaacccacatcctgagaatcggcgagagctataaggagaagcagcggaccatccaggccaagaaggaggtggagcagcggagagccggcggctacagccggaagtacgccagcaaagccaagaatctggcagacgatatggtgagaaacaccgctagagatctgctgtactacgccgtgacccaggatgccatgctgatcttcgccaacctgagccggggcttcggccggcagggcaagcggaccttcatggccgagagacagtacacacggatggaggactggctgaccgccaagctggcctacgagggcctgagcaagacctacctgtccaagacactggcccagtacacctccaagacatgcagcaactgtgggtttaccatcaccagcgccgactacgacagggtgctggagaagctgaagaagacagcaacaggctggatgaccacaattaacggcaaggagctgaaggtggagggccagattacctactacaacagatacaagagacagaacgtagtcaaggacctgtccgtcgagctggatagactgagcgaagaatctgtgaacaacgacatctcctcctggacaaagggcagaagcggagaagctctgagcctcctgaagaaaagattctcccatagacccgtgcaggagaagttcgtgtgcctgaactgcggcttcgagacacacgcagccgagcaagccgccctgaacatcgccagatcctggctgttcctgcggagccaggagtacaagaaataccagacaaacaagacaaccggcaacaccgataagagagccttcgtcgagacctggcagtccttttaccggaagaagcttaaggaggtgtggaaacctgccgtgcggtctggcggatctggcggaggctccacaagcatcacctacgacgacgtgcacgtgaacttcacctgggaggagtggaccctgctggaccccttccagaagaacctgtacaaggacgtgatgctggagacctacaggaacctgaccaccatcggctacagctgggaggacagcaacatcgaggtgcactgccagagcagcggcaggcacgagaggcacgagaggagccacaccggcgagaagcccagcgtgtacacccagtgcgtggagaccttcgcccaccacaccagccccaagaaaaagagaaaagtctaagctgccttctgcggggcttgccttctggccatgcccttcttctctcccttgcacctgtacctcttggtctttgaataaagcctgagtaggaaggctagcaaaaaaaaaaaaaaaaaaaaaaaaaaaaaaaaaaaaaaaaaaaaaaaaaaaaaaaaaaaaaaaaaaaaaaaaaaaaaaaa

SEQ ID NO: 2832 - RNA, 5419 nt, synthetic construct
  source 1..5419: mol_type = other RNA
aggaaataagagagaaaagaagagtaagaagaaatataagagccaccatggcccctaagaagaagcgtaaagtgagccgggtgaacggcagcggcagcggcggcggcatgaaccacgaccaggagttcgacccccctaaggtgtaccctcccgtccccgccgagaagagaaagcccatccgggtcctgagcctgttcgatggcatcgccaccggtctgctggtgctgaaggacctgggcatccaggtggataggtacattgcctccgaggtgtgcgaggactccatcaccgtgggaatggtgcgtcatcagggcaagatcatgtacgtgggcgacgtgcggagcgtgacacagaagcatatccaggagtggggccctttcgacctggtgatcggcggcagcccttgcaatgacctgagcatcgtgaacccagcccggaagggcctgtacgagggaaccggcagactgttcttcgagttttacagactgctgcacgacgcccggcctaaggaaggcgacgaccggcccttcttttggctgttcgagaatgtggtggccatgggagtcagcgacaagcgggatattagccggttcctggagagcaaccccgtgatgatcgatgccaaggaagtgagcgccgcccaccgggccagatacttctggggcaatctgcctggcatgaacagacccctggccagcaccgtgaacgacaagctggagctgcaggagtgcctggagcacggccggatcgccaagttcagcaaggtgagaaccatcaccacccgaagcaacagcatcaaacaaggcaaggaccagcactttcctgtgttcatgaacgagaaggaggacatcctgtggtgtaccgagatggagagagtgttcgggttcccagtccactacacagatgtcagcaacatgtctagactggccagacagagactgctgggaagaagctggtccgtccctgtgatcagacacctgttcgcccctctgaaggagtacttcgcctgcgtgagcagcggcaacagcaacgccaacagccggggccccagcttctctagcggcctggtgccactgtccctgagagggagccacatgggccccatggagatctacaaaaccgtgagcgcctggaagcggcagcctgtgcgcgtgctgagcctgtttcggaatatcgataaagtcctgaaaagcctgggattcctggagagcggctctggctccggcggtggcaccctgaagtacgtggaggatgtgacaaacgtggtcagacgggatgtggagaagtggggccccttcgatctggtgtacggcagcacccaacccctgggcagctcttgtgaccggtgccctggctggtacatgtttcagttccaccggatcctgcagtacgccctgccgagacaggagtcccagcggccattcttttggattttcatggacaacttgctgctgaccgaggatgaccaggaaactaccactcggttcctgcagaccgaagccgtgaccctgcaggacgtgagaggccgggactaccagaacgccatgcgggtgtggtccaacatccctggactgaaaagcaagcacgcacctctgacccctaaagaagaggagtacctgcaggcccaggtgcggagcagaagcaagctggacgcccctaaggtggatctgctggtgaagaattgcctcctgcccctgagagagtacttcaagtatttcagccagaatagtctgcccctgggcggcccaagcagcggcgcccctcctcccagcggcggcagcccagccggctccccaacctctaccgaggagggcacctctgagtccgccacccccgagagcggccctggcacctccaccgagcccagcgagggcagcgcacccggcagccctgccggcagccccacctccacagaggagggaaccagcaccgagcccagcgaaggcagcgccccaggcaccagcaccgagcctagtgagggcggctctggcggcggcagcgcccaggagattaaacggatcaacaagatcagaagaagacttgtgaaagacagcaacaccaagaaggccggcaagacaggccccatgaaaaccctgctggttagagtgatgacacccgatctgagagagcggctggaaaacctgagaaagaagcctgaaaatatcccccagcccatcagcaatacatctagagccaacctgaataagctgctgaccgattacaccgaaatgaagaaggcgatcctgcatgtgtactgggaagagttccagaaggaccctgtgggcctgatgagccgggtggcccagcctgccagcaagaagatcgatcagaacaagctgaaacctgagatggacgagaagggcaacctgaccaccgccggctttgcctgctctcagtgtggccagcccctgttcgtgtacaagctggagcaggtgtctgagaagggcaaggcttacaccaactacttcggacggtgcaatgtggccgagcacgaaaagctgatcctgctggcccagctgaagcccgagaaggatagcgacgaagccgtgacatatagcctgggaaagtttgggcagagggccctggatttctacagcattcatgtgaccaaggagtccacccaccccgtgaagcccctggcccagatcgccggaaacagatacgcctccggacctgtgggaaaggccctgagcgacgcatgtatgggcacaatcgcctccttcctgtctaagtaccaggacatcatcatcgaacaccagaaggtggtgaagggcaaccagaagagactggagagcctgcgggagctggccggcaaggaaaacctggaataccctagcgtgaccctgccacctcagcctcacaccaaggagggcgttgatgcctacaacgaagtgatcgcccgggtgcgaatgtgggtgaacctgaacctgtggcagaagctgaagctaagcagagatgatgccaagcctctgctgagactgaagggattcccttcctttcctctggtcgagagacaggccaacgaagtggactggtgggacatggtgtgtaacgtgaagaagctgatcaacgagaaaaaggaggatggcaaggtgttttggcagaatctggctggctacaagagacaggaagccctgagaccatacctgagcagcgaggaagatcggaagaagggaaagaaattcgctcggtaccagctgggcgacctgctgctgcacctggaaaagaagcacggcgaggactggggaaaggtgtacgacgaggcctgggagcggattgacaagaaagtggaaggcctgagcaagcacatcaagctggaagaggaacggagaagcgaggacgcccagagcaaggccgccctgaccgactggctgcgggctaaggccagcttcgtgatcgagggcctgaaggaggccgacaaggacgagttctgcagatgcgagctgaagctgcagaagtggtacggggacctgcggggaaagcccttcgccatcgaagccgagaacagcatcctggacatcagcggcttcagcaagcagtacaactgtgccttcatctggcagaaggacggcgtgaagaagctgaacctgtacctgatcatcaactacttcaagggcggcaagctgcggttcaagaagatcaaacctgaagccttcgaagccaacagattctacaccgtgatcaacaaaaagagcggcgagatcgtgcccatggaggtgaacttcaacttcgacgaccccaacctgatcatcctgcctctggcctttggcaagagacagggcagagaattcatctggaacgacctgctgtccctggaaaccggcagcctgaagctggccaacggaagagtgatcgagaagacactgtacaacagaagaacccggcaggatgagcctgccctgttcgtggccctgaccttcgagcggcgggaggtcctggactcctccaatatcaaaccaatgaacctgatcggcgtggcaagaggcgaaaacatccccgccgtgatcgccctgaccgaccccgagggctgcccactgagccggtttaaggatagcctgggaaacccaacccacatcctgagaatcggcgagagctataaggagaagcagcggaccatccaggccaagaaggaggtggagcagcggagagccggcggctacagccggaagtacgccagcaaagccaagaatctggcagacgatatggtgagaaacaccgctagagatctgctgtactacgccgtgacccaggatgccatgctgatcttcgccaacctgagccggggcttcggccggcagggcaagcggaccttcatggccgagagacagtacacacggatggaggactggctgaccgccaagctggcctacgagggcctgagcaagacctacctgtccaagacactggcccagtacacctccaagacatgcagcaactgtgggtttaccatcaccagcgccgactacgacagggtgctggagaagctgaagaagacagcaacaggctggatgaccacaattaacggcaaggagctgaaggtggagggccagattacctactacaacagatacaagagacagaacgtagtcaaggacctgtccgtcgagctggatagactgagcgaagaatctgtgaacaacgacatctcctcctggacaaagggcagaagcggagaagctctgagcctcctgaagaaaagattctcccatagacccgtgcaggagaagttcgtgtgcctgaactgcggcttcgagacacacgcagccgagcaagccgccctgaacatcgccagatcctggctgttcctgcggagccaggagtacaagaaataccagacaaacaagacaaccggcaacaccgataagagagccttcgtcgagacctggcagtccttttaccggaagaagcttaaggaggtgtggaaacctgccgtgcggtctggcggatctggcggaggctccacaagcgacgccgtgacctaccaggacctgcacatcaccttcacccaggaggagtgggccctgctggacagcagccagaggaacctgtacaaggacgtgatgctggagacctacatgaacctgaacgccatcggctacaagtgggaggacaacgacatcgagcagcactgcaggagcccccagaggcacggcaggcacgagaggagccccaccagggagaagcccagcgcctacatgcagtgcgacaagaccagccccaagaaaaagagaaaagtctaagctgccttctgcggggcttgccttctggccatgcccttcttctctcccttgcacctgtacctcttggtctttgaataaagcctgagtaggaaggctagcaaaaaaaaaaaaaaaaaaaaaaaaaaaaaaaaaaaaaaaaaaaaaaaaaaaaaaaaaaaaaaaaaaaaaaaaaaaaaaaa

SEQ ID NO: 2833 - RNA, 5419 nt, synthetic construct
  source 1..5419: mol_type = other RNA
aggaaataagagagaaaagaagagtaagaagaaatataagagccaccatggcccctaagaagaagcgtaaagtgagccgggtgaacggcagcggcagcggcggcggcatgaaccacgaccaggagttcgacccccctaaggtgtaccctcccgtccccgccgagaagagaaagcccatccgggtcctgagcctgttcgatggcatcgccaccggtctgctggtgctgaaggacctgggcatccaggtggataggtacattgcctccgaggtgtgcgaggactccatcaccgtgggaatggtgcgtcatcagggcaagatcatgtacgtgggcgacgtgcggagcgtgacacagaagcatatccaggagtggggccctttcgacctggtgatcggcggcagcccttgcaatgacctgagcatcgtgaacccagcccggaagggcctgtacgagggaaccggcagactgttcttcgagttttacagactgctgcacgacgcccggcctaaggaaggcgacgaccggcccttcttttggctgttcgagaatgtggtggccatgggagtcagcgacaagcgggatattagccggttcctggagagcaaccccgtgatgatcgatgccaaggaagtgagcgccgcccaccgggccagatacttctggggcaatctgcctggcatgaacagacccctggccagcaccgtgaacgacaagctggagctgcaggagtgcctggagcacggccggatcgccaagttcagcaaggtgagaaccatcaccacccgaagcaacagcatcaaacaaggcaaggaccagcactttcctgtgttcatgaacgagaaggaggacatcctgtggtgtaccgagatggagagagtgttcgggttcccagtccactacacagatgtcagcaacatgtctagactggccagacagagactgctgggaagaagctggtccgtccctgtgatcagacacctgttcgcccctctgaaggagtacttcgcctgcgtgagcagcggcaacagcaacgccaacagccggggccccagcttctctagcggcctggtgccactgtccctgagagggagccacatgggccccatggagatctacaaaaccgtgagcgcctggaagcggcagcctgtgcgcgtgctgagcctgtttcggaatatcgataaagtcctgaaaagcctgggattcctggagagcggctctggctccggcggtggcaccctgaagtacgtggaggatgtgacaaacgtggtcagacgggatgtggagaagtggggccccttcgatctggtgtacggcagcacccaacccctgggcagctcttgtgaccggtgccctggctggtacatgtttcagttccaccggatcctgcagtacgccctgccgagacaggagtcccagcggccattcttttggattttcatggacaacttgctgctgaccgaggatgaccaggaaactaccactcggttcctgcagaccgaagccgtgaccctgcaggacgtgagaggccgggactaccagaacgccatgcgggtgtggtccaacatccctggactgaaaagcaagcacgcacctctgacccctaaagaagaggagtacctgcaggcccaggtgcggagcagaagcaagctggacgcccctaaggtggatctgctggtgaagaattgcctcctgcccctgagagagtacttcaagtatttcagccagaatagtctgcccctgggcggcccaagcagcggcgcccctcctcccagcggcggcagcccagccggctccccaacctctaccgaggagggcacctctgagtccgccacccccgagagcggccctggcacctccaccgagcccagcgagggcagcgcacccggcagccctgccggcagccccacctccacagaggagggaaccagcaccgagcccagcgaaggcagcgccccaggcaccagcaccgagcctagtgagggcggctctggcggcggcagcgcccaggagattaaacggatcaacaagatcagaagaagacttgtgaaagacagcaacaccaagaaggccggcaagacaggccccatgaaaaccctgctggttagagtgatgacacccgatctgagagagcggctggaaaacctgagaaagaagcctgaaaatatcccccagcccatcagcaatacatctagagccaacctgaataagctgctgaccgattacaccgaaatgaagaaggcgatcctgcatgtgtactgggaagagttccagaaggaccctgtgggcctgatgagccgggtggcccagcctgccagcaagaagatcgatcagaacaagctgaaacctgagatggacgagaagggcaacctgaccaccgccggctttgcctgctctcagtgtggccagcccctgttcgtgtacaagctggagcaggtgtctgagaagggcaaggcttacaccaactacttcggacggtgcaatgtggccgagcacgaaaagctgatcctgctggcccagctgaagcccgagaaggatagcgacgaagccgtgacatatagcctgggaaagtttgggcagagggccctggatttctacagcattcatgtgaccaaggagtccacccaccccgtgaagcccctggcccagatcgccggaaacagatacgcctccggacctgtgggaaaggccctgagcgacgcatgtatgggcacaatcgcctccttcctgtctaagtaccaggacatcatcatcgaacaccagaaggtggtgaagggcaaccagaagagactggagagcctgcgggagctggccggcaaggaaaacctggaataccctagcgtgaccctgccacctcagcctcacaccaaggagggcgttgatgcctacaacgaagtgatcgcccgggtgcgaatgtgggtgaacctgaacctgtggcagaagctgaagctaagcagagatgatgccaagcctctgctgagactgaagggattcccttcctttcctctggtcgagagacaggccaacgaagtggactggtgggacatggtgtgtaacgtgaagaagctgatcaacgagaaaaaggaggatggcaaggtgttttggcagaatctggctggctacaagagacaggaagccctgagaccatacctgagcagcgaggaagatcggaagaagggaaagaaattcgctcggtaccagctgggcgacctgctgctgcacctggaaaagaagcacggcgaggactggggaaaggtgtacgacgaggcctgggagcggattgacaagaaagtggaaggcctgagcaagcacatcaagctggaagaggaacggagaagcgaggacgcccagagcaaggccgccctgaccgactggctgcgggctaaggccagcttcgtgatcgagggcctgaaggaggccgacaaggacgagttctgcagatgcgagctgaagctgcagaagtggtacggggacctgcggggaaagcccttcgccatcgaagccgagaacagcatcctggacatcagcggcttcagcaagcagtacaactgtgccttcatctggcagaaggacggcgtgaagaagctgaacctgtacctgatcatcaactacttcaagggcggcaagctgcggttcaagaagatcaaacctgaagccttcgaagccaacagattctacaccgtgatcaacaaaaagagcggcgagatcgtgcccatggaggtgaacttcaacttcgacgaccccaacctgatcatcctgcctctggcctttggcaagagacagggcagagaattcatctggaacgacctgctgtccctggaaaccggcagcctgaagctggccaacggaagagtgatcgagaagacactgtacaacagaagaacccggcaggatgagcctgccctgttcgtggccctgaccttcgagcggcgggaggtcctggactcctccaatatcaaaccaatgaacctgatcggcgtggcaagaggcgaaaacatccccgccgtgatcgccctgaccgaccccgagggctgcccactgagccggtttaaggatagcctgggaaacccaacccacatcctgagaatcggcgagagctataaggagaagcagcggaccatccaggccaagaaggaggtggagcagcggagagccggcggctacagccggaagtacgccagcaaagccaagaatctggcagacgatatggtgagaaacaccgctagagatctgctgtactacgccgtgacccaggatgccatgctgatcttcgccaacctgagccggggcttcggccggcagggcaagcggaccttcatggccgagagacagtacacacggatggaggactggctgaccgccaagctggcctacgagggcctgagcaagacctacctgtccaagacactggcccagtacacctccaagacatgcagcaactgtgggtttaccatcaccagcgccgactacgacagggtgctggagaagctgaagaagacagcaacaggctggatgaccacaattaacggcaaggagctgaaggtggagggccagattacctactacaacagatacaagagacagaacgtagtcaaggacctgtccgtcgagctggatagactgagcgaagaatctgtgaacaacgacatctcctcctggacaaagggcagaagcggagaagctctgagcctcctgaagaaaagattctcccatagacccgtgcaggagaagttcgtgtgcctgaactgcggcttcgagacacacgcagccgagcaagccgccctgaacatcgccagatcctggctgttcctgcggagccaggagtacaagaaataccagacaaacaagacaaccggcaacaccgataagagagccttcgtcgagacctggcagtccttttaccggaagaagcttaaggaggtgtggaaacctgccgtgcggtctggcggatctggcggaggctccacaagcagccagagcctggtgaccttcggcgacgtggccgtggacttcagcagggaggagtgggagtggctgagcagcgcccagaggaacctgtacaggaccgtgatgctggagaactacaggaacctggtgagcctgggcctgtgcatcagcaagcccgagatgatcagcagcctggagcagaggaaggagccctggatggccaagaggaggctgaccaggggcaggtgccccgacctgaagatcgtgaccagccccaagaaaaagagaaaagtctaagctgccttctgcggggcttgccttctggccatgcccttcttctctcccttgcacctgtacctcttggtctttgaataaagcctgagtaggaaggctagcaaaaaaaaaaaaaaaaaaaaaaaaaaaaaaaaaaaaaaaaaaaaaaaaaaaaaaaaaaaaaaaaaaaaaaaaaaaaaaaa

SEQ ID NO: 2834 - RNA, 5419 nt, synthetic construct
  source 1..5419: mol_type = other RNA
aggaaataagagagaaaagaagagtaagaagaaatataagagccaccatggcccctaagaagaagcgtaaagtgagccgggtgaacggcagcggcagcggcggcggcatgaaccacgaccaggagttcgacccccctaaggtgtaccctcccgtccccgccgagaagagaaagcccatccgggtcctgagcctgttcgatggcatcgccaccggtctgctggtgctgaaggacctgggcatccaggtggataggtacattgcctccgaggtgtgcgaggactccatcaccgtgggaatggtgcgtcatcagggcaagatcatgtacgtgggcgacgtgcggagcgtgacacagaagcatatccaggagtggggccctttcgacctggtgatcggcggcagcccttgcaatgacctgagcatcgtgaacccagcccggaagggcctgtacgagggaaccggcagactgttcttcgagttttacagactgctgcacgacgcccggcctaaggaaggcgacgaccggcccttcttttggctgttcgagaatgtggtggccatgggagtcagcgacaagcgggatattagccggttcctggagagcaaccccgtgatgatcgatgccaaggaagtgagcgccgcccaccgggccagatacttctggggcaatctgcctggcatgaacagacccctggccagcaccgtgaacgacaagctggagctgcaggagtgcctggagcacggccggatcgccaagttcagcaaggtgagaaccatcaccacccgaagcaacagcatcaaacaaggcaaggaccagcactttcctgtgttcatgaacgagaaggaggacatcctgtggtgtaccgagatggagagagtgttcgggttcccagtccactacacagatgtcagcaacatgtctagactggccagacagagactgctgggaagaagctggtccgtccctgtgatcagacacctgttcgcccctctgaaggagtacttcgcctgcgtgagcagcggcaacagcaacgccaacagccggggccccagcttctctagcggcctggtgccactgtccctgagagggagccacatgggccccatggagatctacaaaaccgtgagcgcctggaagcggcagcctgtgcgcgtgctgagcctgtttcggaatatcgataaagtcctgaaaagcctgggattcctggagagcggctctggctccggcggtggcaccctgaagtacgtggaggatgtgacaaacgtggtcagacgggatgtggagaagtggggccccttcgatctggtgtacggcagcacccaacccctgggcagctcttgtgaccggtgccctggctggtacatgtttcagttccaccggatcctgcagtacgccctgccgagacaggagtcccagcggccattcttttggattttcatggacaacttgctgctgaccgaggatgaccaggaaactaccactcggttcctgcagaccgaagccgtgaccctgcaggacgtgagaggccgggactaccagaacgccatgcgggtgtggtccaacatccctggactgaaaagcaagcacgcacctctgacccctaaagaagaggagtacctgcaggcccaggtgcggagcagaagcaagctggacgcccctaaggtggatctgctggtgaagaattgcctcctgcccctgagagagtacttcaagtatttcagccagaatagtctgcccctgggcggcccaagcagcggcgcccctcctcccagcggcggcagcccagccggctccccaacctctaccgaggagggcacctctgagtccgccacccccgagagcggccctggcacctccaccgagcccagcgagggcagcgcacccggcagccctgccggcagccccacctccacagaggagggaaccagcaccgagcccagcgaaggcagcgccccaggcaccagcaccgagcctagtgagggcggctctggcggcggcagcgcccaggagattaaacggatcaacaagatcagaagaagacttgtgaaagacagcaacaccaagaaggccggcaagacaggccccatgaaaaccctgctggttagagtgatgacacccgatctgagagagcggctggaaaacctgagaaagaagcctgaaaatatcccccagcccatcagcaatacatctagagccaacctgaataagctgctgaccgattacaccgaaatgaagaaggcgatcctgcatgtgtactgggaagagttccagaaggaccctgtgggcctgatgagccgggtggcccagcctgccagcaagaagatcgatcagaacaagctgaaacctgagatggacgagaagggcaacctgaccaccgccggctttgcctgctctcagtgtggccagcccctgttcgtgtacaagctggagcaggtgtctgagaagggcaaggcttacaccaactacttcggacggtgcaatgtggccgagcacgaaaagctgatcctgctggcccagctgaagcccgagaaggatagcgacgaagccgtgacatatagcctgggaaagtttgggcagagggccctggatttctacagcattcatgtgaccaaggagtccacccaccccgtgaagcccctggcccagatcgccggaaacagatacgcctccggacctgtgggaaaggccctgagcgacgcatgtatgggcacaatcgcctccttcctgtctaagtaccaggacatcatcatcgaacaccagaaggtggtgaagggcaaccagaagagactggagagcctgcgggagctggccggcaaggaaaacctggaataccctagcgtgaccctgccacctcagcctcacaccaaggagggcgttgatgcctacaacgaagtgatcgcccgggtgcgaatgtgggtgaacctgaacctgtggcagaagctgaagctaagcagagatgatgccaagcctctgctgagactgaagggattcccttcctttcctctggtcgagagacaggccaacgaagtggactggtgggacatggtgtgtaacgtgaagaagctgatcaacgagaaaaaggaggatggcaaggtgttttggcagaatctggctggctacaagagacaggaagccctgagaccatacctgagcagcgaggaagatcggaagaagggaaagaaattcgctcggtaccagctgggcgacctgctgctgcacctggaaaagaagcacggcgaggactggggaaaggtgtacgacgaggcctgggagcggattgacaagaaagtggaaggcctgagcaagcacatcaagctggaagaggaacggagaagcgaggacgcccagagcaaggccgccctgaccgactggctgcgggctaaggccagcttcgtgatcgagggcctgaaggaggccgacaaggacgagttctgcagatgcgagctgaagctgcagaagtggtacggggacctgcggggaaagcccttcgccatcgaagccgagaacagcatcctggacatcagcggcttcagcaagcagtacaactgtgccttcatctggcagaaggacggcgtgaagaagctgaacctgtacctgatcatcaactacttcaagggcggcaagctgcggttcaagaagatcaaacctgaagccttcgaagccaacagattctacaccgtgatcaacaaaaagagcggcgagatcgtgcccatggaggtgaacttcaacttcgacgaccccaacctgatcatcctgcctctggcctttggcaagagacagggcagagaattcatctggaacgacctgctgtccctggaaaccggcagcctgaagctggccaacggaagagtgatcgagaagacactgtacaacagaagaacccggcaggatgagcctgccctgttcgtggccctgaccttcgagcggcgggaggtcctggactcctccaatatcaaaccaatgaacctgatcggcgtggcaagaggcgaaaacatccccgccgtgatcgccctgaccgaccccgagggctgcccactgagccggtttaaggatagcctgggaaacccaacccacatcctgagaatcggcgagagctataaggagaagcagcggaccatccaggccaagaaggaggtggagcagcggagagccggcggctacagccggaagtacgccagcaaagccaagaatctggcagacgatatggtgagaaacaccgctagagatctgctgtactacgccgtgacccaggatgccatgctgatcttcgccaacctgagccggggcttcggccggcagggcaagcggaccttcatggccgagagacagtacacacggatggaggactggctgaccgccaagctggcctacgagggcctgagcaagacctacctgtccaagacactggcccagtacacctccaagacatgcagcaactgtgggtttaccatcaccagcgccgactacgacagggtgctggagaagctgaagaagacagcaacaggctggatgaccacaattaacggcaaggagctgaaggtggagggccagattacctactacaacagatacaagagacagaacgtagtcaaggacctgtccgtcgagctggatagactgagcgaagaatctgtgaacaacgacatctcctcctggacaaagggcagaagcggagaagctctgagcctcctgaagaaaagattctcccatagacccgtgcaggagaagttcgtgtgcctgaactgcggcttcgagacacacgcagccgagcaagccgccctgaacatcgccagatcctggctgttcctgcggagccaggagtacaagaaataccagacaaacaagacaaccggcaacaccgataagagagccttcgtcgagacctggcagtccttttaccggaagaagcttaaggaggtgtggaaacctgccgtgcggtctggcggatctggcggaggctccacaagcagccagggcctggtgagcttcaaggacgtggccgtggacttcacccaggacgagtggcagcagctggaccccgcccagaggaccctgtacagggacgtgatgctggagaactacagccacctggtgagcatgggctaccccgtgagcaagcccgacgtgatcagcaagctggagcagggcgaggacccctggatcatcaagagggacatcagcaactggatctaccccgacgagaaccaggccaccagccccaagaaaaagagaaaagtctaagctgccttctgcggggcttgccttctggccatgcccttcttctctcccttgcacctgtacctcttggtctttgaataaagcctgagtaggaaggctagcaaaaaaaaaaaaaaaaaaaaaaaaaaaaaaaaaaaaaaaaaaaaaaaaaaaaaaaaaaaaaaaaaaaaaaaaaaaaaaaa

SEQ ID NO: 2835 - RNA, 5419 nt, synthetic construct
  source 1..5419: mol_type = other RNA
aggaaataagagagaaaagaagagtaagaagaaatataagagccaccatggcccctaagaagaagcgtaaagtgagccgggtgaacggcagcggcagcggcggcggcatgaaccacgaccaggagttcgacccccctaaggtgtaccctcccgtccccgccgagaagagaaagcccatccgggtcctgagcctgttcgatggcatcgccaccggtctgctggtgctgaaggacctgggcatccaggtggataggtacattgcctccgaggtgtgcgaggactccatcaccgtgggaatggtgcgtcatcagggcaagatcatgtacgtgggcgacgtgcggagcgtgacacagaagcatatccaggagtggggccctttcgacctggtgatcggcggcagcccttgcaatgacctgagcatcgtgaacccagcccggaagggcctgtacgagggaaccggcagactgttcttcgagttttacagactgctgcacgacgcccggcctaaggaaggcgacgaccggcccttcttttggctgttcgagaatgtggtggccatgggagtcagcgacaagcgggatattagccggttcctggagagcaaccccgtgatgatcgatgccaaggaagtgagcgccgcccaccgggccagatacttctggggcaatctgcctggcatgaacagacccctggccagcaccgtgaacgacaagctggagctgcaggagtgcctggagcacggccggatcgccaagttcagcaaggtgagaaccatcaccacccgaagcaacagcatcaaacaaggcaaggaccagcactttcctgtgttcatgaacgagaaggaggacatcctgtggtgtaccgagatggagagagtgttcgggttcccagtccactacacagatgtcagcaacatgtctagactggccagacagagactgctgggaagaagctggtccgtccctgtgatcagacacctgttcgcccctctgaaggagtacttcgcctgcgtgagcagcggcaacagcaacgccaacagccggggccccagcttctctagcggcctggtgccactgtccctgagagggagccacatgggccccatggagatctacaaaaccgtgagcgcctggaagcggcagcctgtgcgcgtgctgagcctgtttcggaatatcgataaagtcctgaaaagcctgggattcctggagagcggctctggctccggcggtggcaccctgaagtacgtggaggatgtgacaaacgtggtcagacgggatgtggagaagtggggccccttcgatctggtgtacggcagcacccaacccctgggcagctcttgtgaccggtgccctggctggtacatgtttcagttccaccggatcctgcagtacgccctgccgagacaggagtcccagcggccattcttttggattttcatggacaacttgctgctgaccgaggatgaccaggaaactaccactcggttcctgcagaccgaagccgtgaccctgcaggacgtgagaggccgggactaccagaacgccatgcgggtgtggtccaacatccctggactgaaaagcaagcacgcacctctgacccctaaagaagaggagtacctgcaggcccaggtgcggagcagaagcaagctggacgcccctaaggtggatctgctggtgaagaattgcctcctgcccctgagagagtacttcaagtatttcagccagaatagtctgcccctgggcggcccaagcagcggcgcccctcctcccagcggcggcagcccagccggctccccaacctctaccgaggagggcacctctgagtccgccacccccgagagcggccctggcacctccaccgagcccagcgagggcagcgcacccggcagccctgccggcagccccacctccacagaggagggaaccagcaccgagcccagcgaaggcagcgccccaggcaccagcaccgagcctagtgagggcggctctggcggcggcagcgcccaggagattaaacggatcaacaagatcagaagaagacttgtgaaagacagcaacaccaagaaggccggcaagacaggccccatgaaaaccctgctggttagagtgatgacacccgatctgagagagcggctggaaaacctgagaaagaagcctgaaaatatcccccagcccatcagcaatacatctagagccaacctgaataagctgctgaccgattacaccgaaatgaagaaggcgatcctgcatgtgtactgggaagagttccagaaggaccctgtgggcctgatgagccgggtggcccagcctgccagcaagaagatcgatcagaacaagctgaaacctgagatggacgagaagggcaacctgaccaccgccggctttgcctgctctcagtgtggccagcccctgttcgtgtacaagctggagcaggtgtctgagaagggcaaggcttacaccaactacttcggacggtgcaatgtggccgagcacgaaaagctgatcctgctggcccagctgaagcccgagaaggatagcgacgaagccgtgacatatagcctgggaaagtttgggcagagggccctggatttctacagcattcatgtgaccaaggagtccacccaccccgtgaagcccctggcccagatcgccggaaacagatacgcctccggacctgtgggaaaggccctgagcgacgcatgtatgggcacaatcgcctccttcctgtctaagtaccaggacatcatcatcgaacaccagaaggtggtgaagggcaaccagaagagactggagagcctgcgggagctggccggcaaggaaaacctggaataccctagcgtgaccctgccacctcagcctcacaccaaggagggcgttgatgcctacaacgaagtgatcgcccgggtgcgaatgtgggtgaacctgaacctgtggcagaagctgaagctaagcagagatgatgccaagcctctgctgagactgaagggattcccttcctttcctctggtcgagagacaggccaacgaagtggactggtgggacatggtgtgtaacgtgaagaagctgatcaacgagaaaaaggaggatggcaaggtgttttggcagaatctggctggctacaagagacaggaagccctgagaccatacctgagcagcgaggaagatcggaagaagggaaagaaattcgctcggtaccagctgggcgacctgctgctgcacctggaaaagaagcacggcgaggactggggaaaggtgtacgacgaggcctgggagcggattgacaagaaagtggaaggcctgagcaagcacatcaagctggaagaggaacggagaagcgaggacgcccagagcaaggccgccctgaccgactggctgcgggctaaggccagcttcgtgatcgagggcctgaaggaggccgacaaggacgagttctgcagatgcgagctgaagctgcagaagtggtacggggacctgcggggaaagcccttcgccatcgaagccgagaacagcatcctggacatcagcggcttcagcaagcagtacaactgtgccttcatctggcagaaggacggcgtgaagaagctgaacctgtacctgatcatcaactacttcaagggcggcaagctgcggttcaagaagatcaaacctgaagccttcgaagccaacagattctacaccgtgatcaacaaaaagagcggcgagatcgtgcccatggaggtgaacttcaacttcgacgaccccaacctgatcatcctgcctctggcctttggcaagagacagggcagagaattcatctggaacgacctgctgtccctggaaaccggcagcctgaagctggccaacggaagagtgatcgagaagacactgtacaacagaagaacccggcaggatgagcctgccctgttcgtggccctgaccttcgagcggcgggaggtcctggactcctccaatatcaaaccaatgaacctgatcggcgtggcaagaggcgaaaacatccccgccgtgatcgccctgaccgaccccgagggctgcccactgagccggtttaaggatagcctgggaaacccaacccacatcctgagaatcggcgagagctataaggagaagcagcggaccatccaggccaagaaggaggtggagcagcggagagccggcggctacagccggaagtacgccagcaaagccaagaatctggcagacgatatggtgagaaacaccgctagagatctgctgtactacgccgtgacccaggatgccatgctgatcttcgccaacctgagccggggcttcggccggcagggcaagcggaccttcatggccgagagacagtacacacggatggaggactggctgaccgccaagctggcctacgagggcctgagcaagacctacctgtccaagacactggcccagtacacctccaagacatgcagcaactgtgggtttaccatcaccagcgccgactacgacagggtgctggagaagctgaagaagacagcaacaggctggatgaccacaattaacggcaaggagctgaaggtggagggccagattacctactacaacagatacaagagacagaacgtagtcaaggacctgtccgtcgagctggatagactgagcgaagaatctgtgaacaacgacatctcctcctggacaaagggcagaagcggagaagctctgagcctcctgaagaaaagattctcccatagacccgtgcaggagaagttcgtgtgcctgaactgcggcttcgagacacacgcagccgagcaagccgccctgaacatcgccagatcctggctgttcctgcggagccaggagtacaagaaataccagacaaacaagacaaccggcaacaccgataagagagccttcgtcgagacctggcagtccttttaccggaagaagcttaaggaggtgtggaaacctgccgtgcggtctggcggatctggcggaggctccacaagcgtgcacggcagcgtgaccttcagggacgtggccatcgacttcagccaggaggagtgggagtgcctgcagcccgagcagaggaccctgtacagggacgtgatgctggagaactacagccacctgatcagcctgggcagcagcatcagcaagcccgacgtgatcaccctgctggagcaggagaaggagccctggatggtggtgaggaaggagaccagcaggtggtaccccgacctggagagcaagaccagccccaagaaaaagagaaaagtctaagctgccttctgcggggcttgccttctggccatgcccttcttctctcccttgcacctgtacctcttggtctttgaataaagcctgagtaggaaggctagcaaaaaaaaaaaaaaaaaaaaaaaaaaaaaaaaaaaaaaaaaaaaaaaaaaaaaaaaaaaaaaaaaaaaaaaaaaaaaaaa

SEQ ID NO: 2836 - RNA, 5419 nt, synthetic construct
  source 1..5419: mol_type = other RNA
aggaaataagagagaaaagaagagtaagaagaaatataagagccaccatggcccctaagaagaagcgtaaagtgagccgggtgaacggcagcggcagcggcggcggcatgaaccacgaccaggagttcgacccccctaaggtgtaccctcccgtccccgccgagaagagaaagcccatccgggtcctgagcctgttcgatggcatcgccaccggtctgctggtgctgaaggacctgggcatccaggtggataggtacattgcctccgaggtgtgcgaggactccatcaccgtgggaatggtgcgtcatcagggcaagatcatgtacgtgggcgacgtgcggagcgtgacacagaagcatatccaggagtggggccctttcgacctggtgatcggcggcagcccttgcaatgacctgagcatcgtgaacccagcccggaagggcctgtacgagggaaccggcagactgttcttcgagttttacagactgctgcacgacgcccggcctaaggaaggcgacgaccggcccttcttttggctgttcgagaatgtggtggccatgggagtcagcgacaagcgggatattagccggttcctggagagcaaccccgtgatgatcgatgccaaggaagtgagcgccgcccaccgggccagatacttctggggcaatctgcctggcatgaacagacccctggccagcaccgtgaacgacaagctggagctgcaggagtgcctggagcacggccggatcgccaagttcagcaaggtgagaaccatcaccacccgaagcaacagcatcaaacaaggcaaggaccagcactttcctgtgttcatgaacgagaaggaggacatcctgtggtgtaccgagatggagagagtgttcgggttcccagtccactacacagatgtcagcaacatgtctagactggccagacagagactgctgggaagaagctggtccgtccctgtgatcagacacctgttcgcccctctgaaggagtacttcgcctgcgtgagcagcggcaacagcaacgccaacagccggggccccagcttctctagcggcctggtgccactgtccctgagagggagccacatgggccccatggagatctacaaaaccgtgagcgcctggaagcggcagcctgtgcgcgtgctgagcctgtttcggaatatcgataaagtcctgaaaagcctgggattcctggagagcggctctggctccggcggtggcaccctgaagtacgtggaggatgtgacaaacgtggtcagacgggatgtggagaagtggggccccttcgatctggtgtacggcagcacccaacccctgggcagctcttgtgaccggtgccctggctggtacatgtttcagttccaccggatcctgcagtacgccctgccgagacaggagtcccagcggccattcttttggattttcatggacaacttgctgctgaccgaggatgaccaggaaactaccactcggttcctgcagaccgaagccgtgaccctgcaggacgtgagaggccgggactaccagaacgccatgcgggtgtggtccaacatccctggactgaaaagcaagcacgcacctctgacccctaaagaagaggagtacctgcaggcccaggtgcggagcagaagcaagctggacgcccctaaggtggatctgctggtgaagaattgcctcctgcccctgagagagtacttcaagtatttcagccagaatagtctgcccctgggcggcccaagcagcggcgcccctcctcccagcggcggcagcccagccggctccccaacctctaccgaggagggcacctctgagtccgccacccccgagagcggccctggcacctccaccgagcccagcgagggcagcgcacccggcagccctgccggcagccccacctccacagaggagggaaccagcaccgagcccagcgaaggcagcgccccaggcaccagcaccgagcctagtgagggcggctctggcggcggcagcgcccaggagattaaacggatcaacaagatcagaagaagacttgtgaaagacagcaacaccaagaaggccggcaagacaggccccatgaaaaccctgctggttagagtgatgacacccgatctgagagagcggctggaaaacctgagaaagaagcctgaaaatatcccccagcccatcagcaatacatctagagccaacctgaataagctgctgaccgattacaccgaaatgaagaaggcgatcctgcatgtgtactgggaagagttccagaaggaccctgtgggcctgatgagccgggtggcccagcctgccagcaagaagatcgatcagaacaagctgaaacctgagatggacgagaagggcaacctgaccaccgccggctttgcctgctctcagtgtggccagcccctgttcgtgtacaagctggagcaggtgtctgagaagggcaaggcttacaccaactacttcggacggtgcaatgtggccgagcacgaaaagctgatcctgctggcccagctgaagcccgagaaggatagcgacgaagccgtgacatatagcctgggaaagtttgggcagagggccctggatttctacagcattcatgtgaccaaggagtccacccaccccgtgaagcccctggcccagatcgccggaaacagatacgcctccggacctgtgggaaaggccctgagcgacgcatgtatgggcacaatcgcctccttcctgtctaagtaccaggacatcatcatcgaacaccagaaggtggtgaagggcaaccagaagagactggagagcctgcgggagctggccggcaaggaaaacctggaataccctagcgtgaccctgccacctcagcctcacaccaaggagggcgttgatgcctacaacgaagtgatcgcccgggtgcgaatgtgggtgaacctgaacctgtggcagaagctgaagctaagcagagatgatgccaagcctctgctgagactgaagggattcccttcctttcctctggtcgagagacaggccaacgaagtggactggtgggacatggtgtgtaacgtgaagaagctgatcaacgagaaaaaggaggatggcaaggtgttttggcagaatctggctggctacaagagacaggaagccctgagaccatacctgagcagcgaggaagatcggaagaagggaaagaaattcgctcggtaccagctgggcgacctgctgctgcacctggaaaagaagcacggcgaggactggggaaaggtgtacgacgaggcctgggagcggattgacaagaaagtggaaggcctgagcaagcacatcaagctggaagaggaacggagaagcgaggacgcccagagcaaggccgccctgaccgactggctgcgggctaaggccagcttcgtgatcgagggcctgaaggaggccgacaaggacgagttctgcagatgcgagctgaagctgcagaagtggtacggggacctgcggggaaagcccttcgccatcgaagccgagaacagcatcctggacatcagcggcttcagcaagcagtacaactgtgccttcatctggcagaaggacggcgtgaagaagctgaacctgtacctgatcatcaactacttcaagggcggcaagctgcggttcaagaagatcaaacctgaagccttcgaagccaacagattctacaccgtgatcaacaaaaagagcggcgagatcgtgcccatggaggtgaacttcaacttcgacgaccccaacctgatcatcctgcctctggcctttggcaagagacagggcagagaattcatctggaacgacctgctgtccctggaaaccggcagcctgaagctggccaacggaagagtgatcgagaagacactgtacaacagaagaacccggcaggatgagcctgccctgttcgtggccctgaccttcgagcggcgggaggtcctggactcctccaatatcaaaccaatgaacctgatcggcgtggcaagaggcgaaaacatccccgccgtgatcgccctgaccgaccccgagggctgcccactgagccggtttaaggatagcctgggaaacccaacccacatcctgagaatcggcgagagctataaggagaagcagcggaccatccaggccaagaaggaggtggagcagcggagagccggcggctacagccggaagtacgccagcaaagccaagaatctggcagacgatatggtgagaaacaccgctagagatctgctgtactacgccgtgacccaggatgccatgctgatcttcgccaacctgagccggggcttcggccggcagggcaagcggaccttcatggccgagagacagtacacacggatggaggactggctgaccgccaagctggcctacgagggcctgagcaagacctacctgtccaagacactggcccagtacacctccaagacatgcagcaactgtgggtttaccatcaccagcgccgactacgacagggtgctggagaagctgaagaagacagcaacaggctggatgaccacaattaacggcaaggagctgaaggtggagggccagattacctactacaacagatacaagagacagaacgtagtcaaggacctgtccgtcgagctggatagactgagcgaagaatctgtgaacaacgacatctcctcctggacaaagggcagaagcggagaagctctgagcctcctgaagaaaagattctcccatagacccgtgcaggagaagttcgtgtgcctgaactgcggcttcgagacacacgcagccgagcaagccgccctgaacatcgccagatcctggctgttcctgcggagccaggagtacaagaaataccagacaaacaagacaaccggcaacaccgataagagagccttcgtcgagacctggcagtccttttaccggaagaagcttaaggaggtgtggaaacctgccgtgcggtctggcggatctggcggaggctccacaagcgccctgaggagcgtgatgttcagcgacgtgagcatcgacttcagccccgaggagtgggagtacctggacctggagcagaaggacctgtacagggacgtgatgctggagaactacagcaacctggtgagcctggccggctgcttcatcagcaagcccgacgtgatcagcagcctggagcagggcaaggagccctggaaggtggtgaggaagggcaggaggcagtaccccgacctggagaccaagaccagccccaagaaaaagagaaaagtctaagctgccttctgcggggcttgccttctggccatgcccttcttctctcccttgcacctgtacctcttggtctttgaataaagcctgagtaggaaggctagcaaaaaaaaaaaaaaaaaaaaaaaaaaaaaaaaaaaaaaaaaaaaaaaaaaaaaaaaaaaaaaaaaaaaaaaaaaaaaaaa

SEQ ID NO: 2837 - RNA, 5419 nt, synthetic construct
  source 1..5419: mol_type = other RNA
aggaaataagagagaaaagaagagtaagaagaaatataagagccaccatggcccctaagaagaagcgtaaagtgagccgggtgaacggcagcggcagcggcggcggcatgaaccacgaccaggagttcgacccccctaaggtgtaccctcccgtccccgccgagaagagaaagcccatccgggtcctgagcctgttcgatggcatcgccaccggtctgctggtgctgaaggacctgggcatccaggtggataggtacattgcctccgaggtgtgcgaggactccatcaccgtgggaatggtgcgtcatcagggcaagatcatgtacgtgggcgacgtgcggagcgtgacacagaagcatatccaggagtggggccctttcgacctggtgatcggcggcagcccttgcaatgacctgagcatcgtgaacccagcccggaagggcctgtacgagggaaccggcagactgttcttcgagttttacagactgctgcacgacgcccggcctaaggaaggcgacgaccggcccttcttttggctgttcgagaatgtggtggccatgggagtcagcgacaagcgggatattagccggttcctggagagcaaccccgtgatgatcgatgccaaggaagtgagcgccgcccaccgggccagatacttctggggcaatctgcctggcatgaacagacccctggccagcaccgtgaacgacaagctggagctgcaggagtgcctggagcacggccggatcgccaagttcagcaaggtgagaaccatcaccacccgaagcaacagcatcaaacaaggcaaggaccagcactttcctgtgttcatgaacgagaaggaggacatcctgtggtgtaccgagatggagagagtgttcgggttcccagtccactacacagatgtcagcaacatgtctagactggccagacagagactgctgggaagaagctggtccgtccctgtgatcagacacctgttcgcccctctgaaggagtacttcgcctgcgtgagcagcggcaacagcaacgccaacagccggggccccagcttctctagcggcctggtgccactgtccctgagagggagccacatgggccccatggagatctacaaaaccgtgagcgcctggaagcggcagcctgtgcgcgtgctgagcctgtttcggaatatcgataaagtcctgaaaagcctgggattcctggagagcggctctggctccggcggtggcaccctgaagtacgtggaggatgtgacaaacgtggtcagacgggatgtggagaagtggggccccttcgatctggtgtacggcagcacccaacccctgggcagctcttgtgaccggtgccctggctggtacatgtttcagttccaccggatcctgcagtacgccctgccgagacaggagtcccagcggccattcttttggattttcatggacaacttgctgctgaccgaggatgaccaggaaactaccactcggttcctgcagaccgaagccgtgaccctgcaggacgtgagaggccgggactaccagaacgccatgcgggtgtggtccaacatccctggactgaaaagcaagcacgcacctctgacccctaaagaagaggagtacctgcaggcccaggtgcggagcagaagcaagctggacgcccctaaggtggatctgctggtgaagaattgcctcctgcccctgagagagtacttcaagtatttcagccagaatagtctgcccctgggcggcccaagcagcggcgcccctcctcccagcggcggcagcccagccggctccccaacctctaccgaggagggcacctctgagtccgccacccccgagagcggccctggcacctccaccgagcccagcgagggcagcgcacccggcagccctgccggcagccccacctccacagaggagggaaccagcaccgagcccagcgaaggcagcgccccaggcaccagcaccgagcctagtgagggcggctctggcggcggcagcgcccaggagattaaacggatcaacaagatcagaagaagacttgtgaaagacagcaacaccaagaaggccggcaagacaggccccatgaaaaccctgctggttagagtgatgacacccgatctgagagagcggctggaaaacctgagaaagaagcctgaaaatatcccccagcccatcagcaatacatctagagccaacctgaataagctgctgaccgattacaccgaaatgaagaaggcgatcctgcatgtgtactgggaagagttccagaaggaccctgtgggcctgatgagccgggtggcccagcctgccagcaagaagatcgatcagaacaagctgaaacctgagatggacgagaagggcaacctgaccaccgccggctttgcctgctctcagtgtggccagcccctgttcgtgtacaagctggagcaggtgtctgagaagggcaaggcttacaccaactacttcggacggtgcaatgtggccgagcacgaaaagctgatcctgctggcccagctgaagcccgagaaggatagcgacgaagccgtgacatatagcctgggaaagtttgggcagagggccctggatttctacagcattcatgtgaccaaggagtccacccaccccgtgaagcccctggcccagatcgccggaaacagatacgcctccggacctgtgggaaaggccctgagcgacgcatgtatgggcacaatcgcctccttcctgtctaagtaccaggacatcatcatcgaacaccagaaggtggtgaagggcaaccagaagagactggagagcctgcgggagctggccggcaaggaaaacctggaataccctagcgtgaccctgccacctcagcctcacaccaaggagggcgttgatgcctacaacgaagtgatcgcccgggtgcgaatgtgggtgaacctgaacctgtggcagaagctgaagctaagcagagatgatgccaagcctctgctgagactgaagggattcccttcctttcctctggtcgagagacaggccaacgaagtggactggtgggacatggtgtgtaacgtgaagaagctgatcaacgagaaaaaggaggatggcaaggtgttttggcagaatctggctggctacaagagacaggaagccctgagaccatacctgagcagcgaggaagatcggaagaagggaaagaaattcgctcggtaccagctgggcgacctgctgctgcacctggaaaagaagcacggcgaggactggggaaaggtgtacgacgaggcctgggagcggattgacaagaaagtggaaggcctgagcaagcacatcaagctggaagaggaacggagaagcgaggacgcccagagcaaggccgccctgaccgactggctgcgggctaaggccagcttcgtgatcgagggcctgaaggaggccgacaaggacgagttctgcagatgcgagctgaagctgcagaagtggtacggggacctgcggggaaagcccttcgccatcgaagccgagaacagcatcctggacatcagcggcttcagcaagcagtacaactgtgccttcatctggcagaaggacggcgtgaagaagctgaacctgtacctgatcatcaactacttcaagggcggcaagctgcggttcaagaagatcaaacctgaagccttcgaagccaacagattctacaccgtgatcaacaaaaagagcggcgagatcgtgcccatggaggtgaacttcaacttcgacgaccccaacctgatcatcctgcctctggcctttggcaagagacagggcagagaattcatctggaacgacctgctgtccctggaaaccggcagcctgaagctggccaacggaagagtgatcgagaagacactgtacaacagaagaacccggcaggatgagcctgccctgttcgtggccctgaccttcgagcggcgggaggtcctggactcctccaatatcaaaccaatgaacctgatcggcgtggcaagaggcgaaaacatccccgccgtgatcgccctgaccgaccccgagggctgcccactgagccggtttaaggatagcctgggaaacccaacccacatcctgagaatcggcgagagctataaggagaagcagcggaccatccaggccaagaaggaggtggagcagcggagagccggcggctacagccggaagtacgccagcaaagccaagaatctggcagacgatatggtgagaaacaccgctagagatctgctgtactacgccgtgacccaggatgccatgctgatcttcgccaacctgagccggggcttcggccggcagggcaagcggaccttcatggccgagagacagtacacacggatggaggactggctgaccgccaagctggcctacgagggcctgagcaagacctacctgtccaagacactggcccagtacacctccaagacatgcagcaactgtgggtttaccatcaccagcgccgactacgacagggtgctggagaagctgaagaagacagcaacaggctggatgaccacaattaacggcaaggagctgaaggtggagggccagattacctactacaacagatacaagagacagaacgtagtcaaggacctgtccgtcgagctggatagactgagcgaagaatctgtgaacaacgacatctcctcctggacaaagggcagaagcggagaagctctgagcctcctgaagaaaagattctcccatagacccgtgcaggagaagttcgtgtgcctgaactgcggcttcgagacacacgcagccgagcaagccgccctgaacatcgccagatcctggctgttcctgcggagccaggagtacaagaaataccagacaaacaagacaaccggcaacaccgataagagagccttcgtcgagacctggcagtccttttaccggaagaagcttaaggaggtgtggaaacctgccgtgcggtctggcggatctggcggaggctccacaagcgagatggacagcgtgaccttcgaggacgtggccgtgaacttcaccagcgaggagtgggccctgctggaccccagccagaagaagctgtacagggccgtgatgagggagaccttcaggaacctggccagcatcggcctgaacctgggcaagaagtgggaggaccacaacatcgaggacaggtacaagacccacggcaagaagctgaggagccacatggtggagaagctgcacgagagcaaggagaccagccccaagaaaaagagaaaagtctaagctgccttctgcggggcttgccttctggccatgcccttcttctctcccttgcacctgtacctcttggtctttgaataaagcctgagtaggaaggctagcaaaaaaaaaaaaaaaaaaaaaaaaaaaaaaaaaaaaaaaaaaaaaaaaaaaaaaaaaaaaaaaaaaaaaaaaaaaaaaaa

SEQ ID NO: 2838 - RNA, 5419 nt, synthetic construct
  source 1..5419: mol_type = other RNA
aggaaataagagagaaaagaagagtaagaagaaatataagagccaccatggcccctaagaagaagcgtaaagtgagccgggtgaacggcagcggcagcggcggcggcatgaaccacgaccaggagttcgacccccctaaggtgtaccctcccgtccccgccgagaagagaaagcccatccgggtcctgagcctgttcgatggcatcgccaccggtctgctggtgctgaaggacctgggcatccaggtggataggtacattgcctccgaggtgtgcgaggactccatcaccgtgggaatggtgcgtcatcagggcaagatcatgtacgtgggcgacgtgcggagcgtgacacagaagcatatccaggagtggggccctttcgacctggtgatcggcggcagcccttgcaatgacctgagcatcgtgaacccagcccggaagggcctgtacgagggaaccggcagactgttcttcgagttttacagactgctgcacgacgcccggcctaaggaaggcgacgaccggcccttcttttggctgttcgagaatgtggtggccatgggagtcagcgacaagcgggatattagccggttcctggagagcaaccccgtgatgatcgatgccaaggaagtgagcgccgcccaccgggccagatacttctggggcaatctgcctggcatgaacagacccctggccagcaccgtgaacgacaagctggagctgcaggagtgcctggagcacggccggatcgccaagttcagcaaggtgagaaccatcaccacccgaagcaacagcatcaaacaaggcaaggaccagcactttcctgtgttcatgaacgagaaggaggacatcctgtggtgtaccgagatggagagagtgttcgggttcccagtccactacacagatgtcagcaacatgtctagactggccagacagagactgctgggaagaagctggtccgtccctgtgatcagacacctgttcgcccctctgaaggagtacttcgcctgcgtgagcagcggcaacagcaacgccaacagccggggccccagcttctctagcggcctggtgccactgtccctgagagggagccacatgggccccatggagatctacaaaaccgtgagcgcctggaagcggcagcctgtgcgcgtgctgagcctgtttcggaatatcgataaagtcctgaaaagcctgggattcctggagagcggctctggctccggcggtggcaccctgaagtacgtggaggatgtgacaaacgtggtcagacgggatgtggagaagtggggccccttcgatctggtgtacggcagcacccaacccctgggcagctcttgtgaccggtgccctggctggtacatgtttcagttccaccggatcctgcagtacgccctgccgagacaggagtcccagcggccattcttttggattttcatggacaacttgctgctgaccgaggatgaccaggaaactaccactcggttcctgcagaccgaagccgtgaccctgcaggacgtgagaggccgggactaccagaacgccatgcgggtgtggtccaacatccctggactgaaaagcaagcacgcacctctgacccctaaagaagaggagtacctgcaggcccaggtgcggagcagaagcaagctggacgcccctaaggtggatctgctggtgaagaattgcctcctgcccctgagagagtacttcaagtatttcagccagaatagtctgcccctgggcggcccaagcagcggcgcccctcctcccagcggcggcagcccagccggctccccaacctctaccgaggagggcacctctgagtccgccacccccgagagcggccctggcacctccaccgagcccagcgagggcagcgcacccggcagccctgccggcagccccacctccacagaggagggaaccagcaccgagcccagcgaaggcagcgccccaggcaccagcaccgagcctagtgagggcggctctggcggcggcagcgcccaggagattaaacggatcaacaagatcagaagaagacttgtgaaagacagcaacaccaagaaggccggcaagacaggccccatgaaaaccctgctggttagagtgatgacacccgatctgagagagcggctggaaaacctgagaaagaagcctgaaaatatcccccagcccatcagcaatacatctagagccaacctgaataagctgctgaccgattacaccgaaatgaagaaggcgatcctgcatgtgtactgggaagagttccagaaggaccctgtgggcctgatgagccgggtggcccagcctgccagcaagaagatcgatcagaacaagctgaaacctgagatggacgagaagggcaacctgaccaccgccggctttgcctgctctcagtgtggccagcccctgttcgtgtacaagctggagcaggtgtctgagaagggcaaggcttacaccaactacttcggacggtgcaatgtggccgagcacgaaaagctgatcctgctggcccagctgaagcccgagaaggatagcgacgaagccgtgacatatagcctgggaaagtttgggcagagggccctggatttctacagcattcatgtgaccaaggagtccacccaccccgtgaagcccctggcccagatcgccggaaacagatacgcctccggacctgtgggaaaggccctgagcgacgcatgtatgggcacaatcgcctccttcctgtctaagtaccaggacatcatcatcgaacaccagaaggtggtgaagggcaaccagaagagactggagagcctgcgggagctggccggcaaggaaaacctggaataccctagcgtgaccctgccacctcagcctcacaccaaggagggcgttgatgcctacaacgaagtgatcgcccgggtgcgaatgtgggtgaacctgaacctgtggcagaagctgaagctaagcagagatgatgccaagcctctgctgagactgaagggattcccttcctttcctctggtcgagagacaggccaacgaagtggactggtgggacatggtgtgtaacgtgaagaagctgatcaacgagaaaaaggaggatggcaaggtgttttggcagaatctggctggctacaagagacaggaagccctgagaccatacctgagcagcgaggaagatcggaagaagggaaagaaattcgctcggtaccagctgggcgacctgctgctgcacctggaaaagaagcacggcgaggactggggaaaggtgtacgacgaggcctgggagcggattgacaagaaagtggaaggcctgagcaagcacatcaagctggaagaggaacggagaagcgaggacgcccagagcaaggccgccctgaccgactggctgcgggctaaggccagcttcgtgatcgagggcctgaaggaggccgacaaggacgagttctgcagatgcgagctgaagctgcagaagtggtacggggacctgcggggaaagcccttcgccatcgaagccgagaacagcatcctggacatcagcggcttcagcaagcagtacaactgtgccttcatctggcagaaggacggcgtgaagaagctgaacctgtacctgatcatcaactacttcaagggcggcaagctgcggttcaagaagatcaaacctgaagccttcgaagccaacagattctacaccgtgatcaacaaaaagagcggcgagatcgtgcccatggaggtgaacttcaacttcgacgaccccaacctgatcatcctgcctctggcctttggcaagagacagggcagagaattcatctggaacgacctgctgtccctggaaaccggcagcctgaagctggccaacggaagagtgatcgagaagacactgtacaacagaagaacccggcaggatgagcctgccctgttcgtggccctgaccttcgagcggcgggaggtcctggactcctccaatatcaaaccaatgaacctgatcggcgtggcaagaggcgaaaacatccccgccgtgatcgccctgaccgaccccgagggctgcccactgagccggtttaaggatagcctgggaaacccaacccacatcctgagaatcggcgagagctataaggagaagcagcggaccatccaggccaagaaggaggtggagcagcggagagccggcggctacagccggaagtacgccagcaaagccaagaatctggcagacgatatggtgagaaacaccgctagagatctgctgtactacgccgtgacccaggatgccatgctgatcttcgccaacctgagccggggcttcggccggcagggcaagcggaccttcatggccgagagacagtacacacggatggaggactggctgaccgccaagctggcctacgagggcctgagcaagacctacctgtccaagacactggcccagtacacctccaagacatgcagcaactgtgggtttaccatcaccagcgccgactacgacagggtgctggagaagctgaagaagacagcaacaggctggatgaccacaattaacggcaaggagctgaaggtggagggccagattacctactacaacagatacaagagacagaacgtagtcaaggacctgtccgtcgagctggatagactgagcgaagaatctgtgaacaacgacatctcctcctggacaaagggcagaagcggagaagctctgagcctcctgaagaaaagattctcccatagacccgtgcaggagaagttcgtgtgcctgaactgcggcttcgagacacacgcagccgagcaagccgccctgaacatcgccagatcctggctgttcctgcggagccaggagtacaagaaataccagacaaacaagacaaccggcaacaccgataagagagccttcgtcgagacctggcagtccttttaccggaagaagcttaaggaggtgtggaaacctgccgtgcggtctggcggatctggcggaggctccacaagcagccaggagagcgtgaccttccaggacgtggccgtggacttcaccagggaggagtggaagaggctggacagcgcccagagggacctgtacagggacgtgatgctggagaactaccagaacctggtgagcctgggcctgctggtgttccagagcgacgtgatcagccagctggagaacggcgaggtgcccctggtgcccggcggcgaggtgcccaggggcaccaggcccggcagcgtgaaccagaccagccccaagaaaaagagaaaagtctaagctgccttctgcggggcttgccttctggccatgcccttcttctctcccttgcacctgtacctcttggtctttgaataaagcctgagtaggaaggctagcaaaaaaaaaaaaaaaaaaaaaaaaaaaaaaaaaaaaaaaaaaaaaaaaaaaaaaaaaaaaaaaaaaaaaaaaaaaaaaaa

SEQ ID NO: 2839 - RNA, 5416 nt, synthetic construct
  source 1..5416: mol_type = other RNA
aggaaataagagagaaaagaagagtaagaagaaatataagagccaccatggcccctaagaagaagcgtaaagtgagccgggtgaacggcagcggcagcggcggcggcatgaaccacgaccaggagttcgacccccctaaggtgtaccctcccgtccccgccgagaagagaaagcccatccgggtcctgagcctgttcgatggcatcgccaccggtctgctggtgctgaaggacctgggcatccaggtggataggtacattgcctccgaggtgtgcgaggactccatcaccgtgggaatggtgcgtcatcagggcaagatcatgtacgtgggcgacgtgcggagcgtgacacagaagcatatccaggagtggggccctttcgacctggtgatcggcggcagcccttgcaatgacctgagcatcgtgaacccagcccggaagggcctgtacgagggaaccggcagactgttcttcgagttttacagactgctgcacgacgcccggcctaaggaaggcgacgaccggcccttcttttggctgttcgagaatgtggtggccatgggagtcagcgacaagcgggatattagccggttcctggagagcaaccccgtgatgatcgatgccaaggaagtgagcgccgcccaccgggccagatacttctggggcaatctgcctggcatgaacagacccctggccagcaccgtgaacgacaagctggagctgcaggagtgcctggagcacggccggatcgccaagttcagcaaggtgagaaccatcaccacccgaagcaacagcatcaaacaaggcaaggaccagcactttcctgtgttcatgaacgagaaggaggacatcctgtggtgtaccgagatggagagagtgttcgggttcccagtccactacacagatgtcagcaacatgtctagactggccagacagagactgctgggaagaagctggtccgtccctgtgatcagacacctgttcgcccctctgaaggagtacttcgcctgcgtgagcagcggcaacagcaacgccaacagccggggccccagcttctctagcggcctggtgccactgtccctgagagggagccacatgggccccatggagatctacaaaaccgtgagcgcctggaagcggcagcctgtgcgcgtgctgagcctgtttcggaatatcgataaagtcctgaaaagcctgggattcctggagagcggctctggctccggcggtggcaccctgaagtacgtggaggatgtgacaaacgtggtcagacgggatgtggagaagtggggccccttcgatctggtgtacggcagcacccaacccctgggcagctcttgtgaccggtgccctggctggtacatgtttcagttccaccggatcctgcagtacgccctgccgagacaggagtcccagcggccattcttttggattttcatggacaacttgctgctgaccgaggatgaccaggaaactaccactcggttcctgcagaccgaagccgtgaccctgcaggacgtgagaggccgggactaccagaacgccatgcgggtgtggtccaacatccctggactgaaaagcaagcacgcacctctgacccctaaagaagaggagtacctgcaggcccaggtgcggagcagaagcaagctggacgcccctaaggtggatctgctggtgaagaattgcctcctgcccctgagagagtacttcaagtatttcagccagaatagtctgcccctgggcggcccaagcagcggcgcccctcctcccagcggcggcagcccagccggctccccaacctctaccgaggagggcacctctgagtccgccacccccgagagcggccctggcacctccaccgagcccagcgagggcagcgcacccggcagccctgccggcagccccacctccacagaggagggaaccagcaccgagcccagcgaaggcagcgccccaggcaccagcaccgagcctagtgagggcggctctggcggcggcagcgcccaggagattaaacggatcaacaagatcagaagaagacttgtgaaagacagcaacaccaagaaggccggcaagacaggccccatgaaaaccctgctggttagagtgatgacacccgatctgagagagcggctggaaaacctgagaaagaagcctgaaaatatcccccagcccatcagcaatacatctagagccaacctgaataagctgctgaccgattacaccgaaatgaagaaggcgatcctgcatgtgtactgggaagagttccagaaggaccctgtgggcctgatgagccgggtggcccagcctgccagcaagaagatcgatcagaacaagctgaaacctgagatggacgagaagggcaacctgaccaccgccggctttgcctgctctcagtgtggccagcccctgttcgtgtacaagctggagcaggtgtctgagaagggcaaggcttacaccaactacttcggacggtgcaatgtggccgagcacgaaaagctgatcctgctggcccagctgaagcccgagaaggatagcgacgaagccgtgacatatagcctgggaaagtttgggcagagggccctggatttctacagcattcatgtgaccaaggagtccacccaccccgtgaagcccctggcccagatcgccggaaacagatacgcctccggacctgtgggaaaggccctgagcgacgcatgtatgggcacaatcgcctccttcctgtctaagtaccaggacatcatcatcgaacaccagaaggtggtgaagggcaaccagaagagactggagagcctgcgggagctggccggcaaggaaaacctggaataccctagcgtgaccctgccacctcagcctcacaccaaggagggcgttgatgcctacaacgaagtgatcgcccgggtgcgaatgtgggtgaacctgaacctgtggcagaagctgaagctaagcagagatgatgccaagcctctgctgagactgaagggattcccttcctttcctctggtcgagagacaggccaacgaagtggactggtgggacatggtgtgtaacgtgaagaagctgatcaacgagaaaaaggaggatggcaaggtgttttggcagaatctggctggctacaagagacaggaagccctgagaccatacctgagcagcgaggaagatcggaagaagggaaagaaattcgctcggtaccagctgggcgacctgctgctgcacctggaaaagaagcacggcgaggactggggaaaggtgtacgacgaggcctgggagcggattgacaagaaagtggaaggcctgagcaagcacatcaagctggaagaggaacggagaagcgaggacgcccagagcaaggccgccctgaccgactggctgcgggctaaggccagcttcgtgatcgagggcctgaaggaggccgacaaggacgagttctgcagatgcgagctgaagctgcagaagtggtacggggacctgcggggaaagcccttcgccatcgaagccgagaacagcatcctggacatcagcggcttcagcaagcagtacaactgtgccttcatctggcagaaggacggcgtgaagaagctgaacctgtacctgatcatcaactacttcaagggcggcaagctgcggttcaagaagatcaaacctgaagccttcgaagccaacagattctacaccgtgatcaacaaaaagagcggcgagatcgtgcccatggaggtgaacttcaacttcgacgaccccaacctgatcatcctgcctctggcctttggcaagagacagggcagagaattcatctggaacgacctgctgtccctggaaaccggcagcctgaagctggccaacggaagagtgatcgagaagacactgtacaacagaagaacccggcaggatgagcctgccctgttcgtggccctgaccttcgagcggcgggaggtcctggactcctccaatatcaaaccaatgaacctgatcggcgtggcaagaggcgaaaacatccccgccgtgatcgccctgaccgaccccgagggctgcccactgagccggtttaaggatagcctgggaaacccaacccacatcctgagaatcggcgagagctataaggagaagcagcggaccatccaggccaagaaggaggtggagcagcggagagccggcggctacagccggaagtacgccagcaaagccaagaatctggcagacgatatggtgagaaacaccgctagagatctgctgtactacgccgtgacccaggatgccatgctgatcttcgccaacctgagccggggcttcggccggcagggcaagcggaccttcatggccgagagacagtacacacggatggaggactggctgaccgccaagctggcctacgagggcctgagcaagacctacctgtccaagacactggcccagtacacctccaagacatgcagcaactgtgggtttaccatcaccagcgccgactacgacagggtgctggagaagctgaagaagacagcaacaggctggatgaccacaattaacggcaaggagctgaaggtggagggccagattacctactacaacagatacaagagacagaacgtagtcaaggacctgtccgtcgagctggatagactgagcgaagaatctgtgaacaacgacatctcctcctggacaaagggcagaagcggagaagctctgagcctcctgaagaaaagattctcccatagacccgtgcaggagaagttcgtgtgcctgaactgcggcttcgagacacacgcagccgagcaagccgccctgaacatcgccagatcctggctgttcctgcggagccaggagtacaagaaataccagacaaacaagacaaccggcaacaccgataagagagccttcgtcgagacctggcagtccttttaccggaagaagcttaaggaggtgtggaaacctgccgtgcggtctggcggatctggcggaggctccacaagcctgcagaggctgctgaccttcggcgacgtggccatcgagttcagccaggaggagtggaggtgcctgagccacacccagagggagctgtacagggacgtgatgctggagaactacaggcacctgctgttcctgggcctgatcgtgagcaagcccgacctggtgagcctgctggagcagaggaaggagccctgggacgtgaagaggaagaagaccgtggtgttcgaccccggcaggtgggagaccagccccaagaaaaagagaaaagtctaagctgccttctgcggggcttgccttctggccatgcccttcttctctcccttgcacctgtacctcttggtctttgaataaagcctgagtaggaaggctagcaaaaaaaaaaaaaaaaaaaaaaaaaaaaaaaaaaaaaaaaaaaaaaaaaaaaaaaaaaaaaaaaaaaaaaaaaaaaaaaa

SEQ ID NO: 2840 - RNA, 5419 nt, synthetic construct
  source 1..5419: mol_type = other RNA
aggaaataagagagaaaagaagagtaagaagaaatataagagccaccatggcccctaagaagaagcgtaaagtgagccgggtgaacggcagcggcagcggcggcggcatgaaccacgaccaggagttcgacccccctaaggtgtaccctcccgtccccgccgagaagagaaagcccatccgggtcctgagcctgttcgatggcatcgccaccggtctgctggtgctgaaggacctgggcatccaggtggataggtacattgcctccgaggtgtgcgaggactccatcaccgtgggaatggtgcgtcatcagggcaagatcatgtacgtgggcgacgtgcggagcgtgacacagaagcatatccaggagtggggccctttcgacctggtgatcggcggcagcccttgcaatgacctgagcatcgtgaacccagcccggaagggcctgtacgagggaaccggcagactgttcttcgagttttacagactgctgcacgacgcccggcctaaggaaggcgacgaccggcccttcttttggctgttcgagaatgtggtggccatgggagtcagcgacaagcgggatattagccggttcctggagagcaaccccgtgatgatcgatgccaaggaagtgagcgccgcccaccgggccagatacttctggggcaatctgcctggcatgaacagacccctggccagcaccgtgaacgacaagctggagctgcaggagtgcctggagcacggccggatcgccaagttcagcaaggtgagaaccatcaccacccgaagcaacagcatcaaacaaggcaaggaccagcactttcctgtgttcatgaacgagaaggaggacatcctgtggtgtaccgagatggagagagtgttcgggttcccagtccactacacagatgtcagcaacatgtctagactggccagacagagactgctgggaagaagctggtccgtccctgtgatcagacacctgttcgcccctctgaaggagtacttcgcctgcgtgagcagcggcaacagcaacgccaacagccggggccccagcttctctagcggcctggtgccactgtccctgagagggagccacatgggccccatggagatctacaaaaccgtgagcgcctggaagcggcagcctgtgcgcgtgctgagcctgtttcggaatatcgataaagtcctgaaaagcctgggattcctggagagcggctctggctccggcggtggcaccctgaagtacgtggaggatgtgacaaacgtggtcagacgggatgtggagaagtggggccccttcgatctggtgtacggcagcacccaacccctgggcagctcttgtgaccggtgccctggctggtacatgtttcagttccaccggatcctgcagtacgccctgccgagacaggagtcccagcggccattcttttggattttcatggacaacttgctgctgaccgaggatgaccaggaaactaccactcggttcctgcagaccgaagccgtgaccctgcaggacgtgagaggccgggactaccagaacgccatgcgggtgtggtccaacatccctggactgaaaagcaagcacgcacctctgacccctaaagaagaggagtacctgcaggcccaggtgcggagcagaagcaagctggacgcccctaaggtggatctgctggtgaagaattgcctcctgcccctgagagagtacttcaagtatttcagccagaatagtctgcccctgggcggcccaagcagcggcgcccctcctcccagcggcggcagcccagccggctccccaacctctaccgaggagggcacctctgagtccgccacccccgagagcggccctggcacctccaccgagcccagcgagggcagcgcacccggcagccctgccggcagccccacctccacagaggagggaaccagcaccgagcccagcgaaggcagcgccccaggcaccagcaccgagcctagtgagggcggctctggcggcggcagcgcccaggagattaaacggatcaacaagatcagaagaagacttgtgaaagacagcaacaccaagaaggccggcaagacaggccccatgaaaaccctgctggttagagtgatgacacccgatctgagagagcggctggaaaacctgagaaagaagcctgaaaatatcccccagcccatcagcaatacatctagagccaacctgaataagctgctgaccgattacaccgaaatgaagaaggcgatcctgcatgtgtactgggaagagttccagaaggaccctgtgggcctgatgagccgggtggcccagcctgccagcaagaagatcgatcagaacaagctgaaacctgagatggacgagaagggcaacctgaccaccgccggctttgcctgctctcagtgtggccagcccctgttcgtgtacaagctggagcaggtgtctgagaagggcaaggcttacaccaactacttcggacggtgcaatgtggccgagcacgaaaagctgatcctgctggcccagctgaagcccgagaaggatagcgacgaagccgtgacatatagcctgggaaagtttgggcagagggccctggatttctacagcattcatgtgaccaaggagtccacccaccccgtgaagcccctggcccagatcgccggaaacagatacgcctccggacctgtgggaaaggccctgagcgacgcatgtatgggcacaatcgcctccttcctgtctaagtaccaggacatcatcatcgaacaccagaaggtggtgaagggcaaccagaagagactggagagcctgcgggagctggccggcaaggaaaacctggaataccctagcgtgaccctgccacctcagcctcacaccaaggagggcgttgatgcctacaacgaagtgatcgcccgggtgcgaatgtgggtgaacctgaacctgtggcagaagctgaagctaagcagagatgatgccaagcctctgctgagactgaagggattcccttcctttcctctggtcgagagacaggccaacgaagtggactggtgggacatggtgtgtaacgtgaagaagctgatcaacgagaaaaaggaggatggcaaggtgttttggcagaatctggctggctacaagagacaggaagccctgagaccatacctgagcagcgaggaagatcggaagaagggaaagaaattcgctcggtaccagctgggcgacctgctgctgcacctggaaaagaagcacggcgaggactggggaaaggtgtacgacgaggcctgggagcggattgacaagaaagtggaaggcctgagcaagcacatcaagctggaagaggaacggagaagcgaggacgcccagagcaaggccgccctgaccgactggctgcgggctaaggccagcttcgtgatcgagggcctgaaggaggccgacaaggacgagttctgcagatgcgagctgaagctgcagaagtggtacggggacctgcggggaaagcccttcgccatcgaagccgagaacagcatcctggacatcagcggcttcagcaagcagtacaactgtgccttcatctggcagaaggacggcgtgaagaagctgaacctgtacctgatcatcaactacttcaagggcggcaagctgcggttcaagaagatcaaacctgaagccttcgaagccaacagattctacaccgtgatcaacaaaaagagcggcgagatcgtgcccatggaggtgaacttcaacttcgacgaccccaacctgatcatcctgcctctggcctttggcaagagacagggcagagaattcatctggaacgacctgctgtccctggaaaccggcagcctgaagctggccaacggaagagtgatcgagaagacactgtacaacagaagaacccggcaggatgagcctgccctgttcgtggccctgaccttcgagcggcgggaggtcctggactcctccaatatcaaaccaatgaacctgatcggcgtggcaagaggcgaaaacatccccgccgtgatcgccctgaccgaccccgagggctgcccactgagccggtttaaggatagcctgggaaacccaacccacatcctgagaatcggcgagagctataaggagaagcagcggaccatccaggccaagaaggaggtggagcagcggagagccggcggctacagccggaagtacgccagcaaagccaagaatctggcagacgatatggtgagaaacaccgctagagatctgctgtactacgccgtgacccaggatgccatgctgatcttcgccaacctgagccggggcttcggccggcagggcaagcggaccttcatggccgagagacagtacacacggatggaggactggctgaccgccaagctggcctacgagggcctgagcaagacctacctgtccaagacactggcccagtacacctccaagacatgcagcaactgtgggtttaccatcaccagcgccgactacgacagggtgctggagaagctgaagaagacagcaacaggctggatgaccacaattaacggcaaggagctgaaggtggagggccagattacctactacaacagatacaagagacagaacgtagtcaaggacctgtccgtcgagctggatagactgagcgaagaatctgtgaacaacgacatctcctcctggacaaagggcagaagcggagaagctctgagcctcctgaagaaaagattctcccatagacccgtgcaggagaagttcgtgtgcctgaactgcggcttcgagacacacgcagccgagcaagccgccctgaacatcgccagatcctggctgttcctgcggagccaggagtacaagaaataccagacaaacaagacaaccggcaacaccgataagagagccttcgtcgagacctggcagtccttttaccggaagaagcttaaggaggtgtggaaacctgccgtgcggtctggcggatctggcggaggctccacaagcgaccacgagctggtgaccttcagggacgtgatcatcaacttcagccaggacgagtgggagtacctgaacagcgcccagagggacctgtactgggacgtgatgatggagaactacagcaacctggtgagcctgggctgcttcatcagcaagcccgacgtgatcagcctgctggagcagggcaaggagccctggaaggtggtgaggaaggagaggaggaggtaccccgacctggagaccaggcacaccagccccaagaaaaagagaaaagtctaagctgccttctgcggggcttgccttctggccatgcccttcttctctcccttgcacctgtacctcttggtctttgaataaagcctgagtaggaaggctagcaaaaaaaaaaaaaaaaaaaaaaaaaaaaaaaaaaaaaaaaaaaaaaaaaaaaaaaaaaaaaaaaaaaaaaaaaaaaaaaa

SEQ ID NO: 2841 - RNA, 5419 nt, synthetic construct
  source 1..5419: mol_type = other RNA
aggaaataagagagaaaagaagagtaagaagaaatataagagccaccatggcccctaagaagaagcgtaaagtgagccgggtgaacggcagcggcagcggcggcggcatgaaccacgaccaggagttcgacccccctaaggtgtaccctcccgtccccgccgagaagagaaagcccatccgggtcctgagcctgttcgatggcatcgccaccggtctgctggtgctgaaggacctgggcatccaggtggataggtacattgcctccgaggtgtgcgaggactccatcaccgtgggaatggtgcgtcatcagggcaagatcatgtacgtgggcgacgtgcggagcgtgacacagaagcatatccaggagtggggccctttcgacctggtgatcggcggcagcccttgcaatgacctgagcatcgtgaacccagcccggaagggcctgtacgagggaaccggcagactgttcttcgagttttacagactgctgcacgacgcccggcctaaggaaggcgacgaccggcccttcttttggctgttcgagaatgtggtggccatgggagtcagcgacaagcgggatattagccggttcctggagagcaaccccgtgatgatcgatgccaaggaagtgagcgccgcccaccgggccagatacttctggggcaatctgcctggcatgaacagacccctggccagcaccgtgaacgacaagctggagctgcaggagtgcctggagcacggccggatcgccaagttcagcaaggtgagaaccatcaccacccgaagcaacagcatcaaacaaggcaaggaccagcactttcctgtgttcatgaacgagaaggaggacatcctgtggtgtaccgagatggagagagtgttcgggttcccagtccactacacagatgtcagcaacatgtctagactggccagacagagactgctgggaagaagctggtccgtccctgtgatcagacacctgttcgcccctctgaaggagtacttcgcctgcgtgagcagcggcaacagcaacgccaacagccggggccccagcttctctagcggcctggtgccactgtccctgagagggagccacatgggccccatggagatctacaaaaccgtgagcgcctggaagcggcagcctgtgcgcgtgctgagcctgtttcggaatatcgataaagtcctgaaaagcctgggattcctggagagcggctctggctccggcggtggcaccctgaagtacgtggaggatgtgacaaacgtggtcagacgggatgtggagaagtggggccccttcgatctggtgtacggcagcacccaacccctgggcagctcttgtgaccggtgccctggctggtacatgtttcagttccaccggatcctgcagtacgccctgccgagacaggagtcccagcggccattcttttggattttcatggacaacttgctgctgaccgaggatgaccaggaaactaccactcggttcctgcagaccgaagccgtgaccctgcaggacgtgagaggccgggactaccagaacgccatgcgggtgtggtccaacatccctggactgaaaagcaagcacgcacctctgacccctaaagaagaggagtacctgcaggcccaggtgcggagcagaagcaagctggacgcccctaaggtggatctgctggtgaagaattgcctcctgcccctgagagagtacttcaagtatttcagccagaatagtctgcccctgggcggcccaagcagcggcgcccctcctcccagcggcggcagcccagccggctccccaacctctaccgaggagggcacctctgagtccgccacccccgagagcggccctggcacctccaccgagcccagcgagggcagcgcacccggcagccctgccggcagccccacctccacagaggagggaaccagcaccgagcccagcgaaggcagcgccccaggcaccagcaccgagcctagtgagggcggctctggcggcggcagcgcccaggagattaaacggatcaacaagatcagaagaagacttgtgaaagacagcaacaccaagaaggccggcaagacaggccccatgaaaaccctgctggttagagtgatgacacccgatctgagagagcggctggaaaacctgagaaagaagcctgaaaatatcccccagcccatcagcaatacatctagagccaacctgaataagctgctgaccgattacaccgaaatgaagaaggcgatcctgcatgtgtactgggaagagttccagaaggaccctgtgggcctgatgagccgggtggcccagcctgccagcaagaagatcgatcagaacaagctgaaacctgagatggacgagaagggcaacctgaccaccgccggctttgcctgctctcagtgtggccagcccctgttcgtgtacaagctggagcaggtgtctgagaagggcaaggcttacaccaactacttcggacggtgcaatgtggccgagcacgaaaagctgatcctgctggcccagctgaagcccgagaaggatagcgacgaagccgtgacatatagcctgggaaagtttgggcagagggccctggatttctacagcattcatgtgaccaaggagtccacccaccccgtgaagcccctggcccagatcgccggaaacagatacgcctccggacctgtgggaaaggccctgagcgacgcatgtatgggcacaatcgcctccttcctgtctaagtaccaggacatcatcatcgaacaccagaaggtggtgaagggcaaccagaagagactggagagcctgcgggagctggccggcaaggaaaacctggaataccctagcgtgaccctgccacctcagcctcacaccaaggagggcgttgatgcctacaacgaagtgatcgcccgggtgcgaatgtgggtgaacctgaacctgtggcagaagctgaagctaagcagagatgatgccaagcctctgctgagactgaagggattcccttcctttcctctggtcgagagacaggccaacgaagtggactggtgggacatggtgtgtaacgtgaagaagctgatcaacgagaaaaaggaggatggcaaggtgttttggcagaatctggctggctacaagagacaggaagccctgagaccatacctgagcagcgaggaagatcggaagaagggaaagaaattcgctcggtaccagctgggcgacctgctgctgcacctggaaaagaagcacggcgaggactggggaaaggtgtacgacgaggcctgggagcggattgacaagaaagtggaaggcctgagcaagcacatcaagctggaagaggaacggagaagcgaggacgcccagagcaaggccgccctgaccgactggctgcgggctaaggccagcttcgtgatcgagggcctgaaggaggccgacaaggacgagttctgcagatgcgagctgaagctgcagaagtggtacggggacctgcggggaaagcccttcgccatcgaagccgagaacagcatcctggacatcagcggcttcagcaagcagtacaactgtgccttcatctggcagaaggacggcgtgaagaagctgaacctgtacctgatcatcaactacttcaagggcggcaagctgcggttcaagaagatcaaacctgaagccttcgaagccaacagattctacaccgtgatcaacaaaaagagcggcgagatcgtgcccatggaggtgaacttcaacttcgacgaccccaacctgatcatcctgcctctggcctttggcaagagacagggcagagaattcatctggaacgacctgctgtccctggaaaccggcagcctgaagctggccaacggaagagtgatcgagaagacactgtacaacagaagaacccggcaggatgagcctgccctgttcgtggccctgaccttcgagcggcgggaggtcctggactcctccaatatcaaaccaatgaacctgatcggcgtggcaagaggcgaaaacatccccgccgtgatcgccctgaccgaccccgagggctgcccactgagccggtttaaggatagcctgggaaacccaacccacatcctgagaatcggcgagagctataaggagaagcagcggaccatccaggccaagaaggaggtggagcagcggagagccggcggctacagccggaagtacgccagcaaagccaagaatctggcagacgatatggtgagaaacaccgctagagatctgctgtactacgccgtgacccaggatgccatgctgatcttcgccaacctgagccggggcttcggccggcagggcaagcggaccttcatggccgagagacagtacacacggatggaggactggctgaccgccaagctggcctacgagggcctgagcaagacctacctgtccaagacactggcccagtacacctccaagacatgcagcaactgtgggtttaccatcaccagcgccgactacgacagggtgctggagaagctgaagaagacagcaacaggctggatgaccacaattaacggcaaggagctgaaggtggagggccagattacctactacaacagatacaagagacagaacgtagtcaaggacctgtccgtcgagctggatagactgagcgaagaatctgtgaacaacgacatctcctcctggacaaagggcagaagcggagaagctctgagcctcctgaagaaaagattctcccatagacccgtgcaggagaagttcgtgtgcctgaactgcggcttcgagacacacgcagccgagcaagccgccctgaacatcgccagatcctggctgttcctgcggagccaggagtacaagaaataccagacaaacaagacaaccggcaacaccgataagagagccttcgtcgagacctggcagtccttttaccggaagaagcttaaggaggtgtggaaacctgccgtgcggtctggcggatctggcggaggctccacaagccagctgggcagcgtggccttcgaggacgtggccgtggacttcacccaggaggagtggggctacctggcccccgcccagagggacctgcacagggaggtgatgctggagaactacaggaacctggtgttcctgggcctggtggccagcaagcccgacgtgatctgccacctggagcagaggaaggagccctggagcctgaggggcatcgagaagaggaaggccctgaggggcacctgccccgacaccagccccaagaaaaagagaaaagtctaagctgccttctgcggggcttgccttctggccatgcccttcttctctcccttgcacctgtacctcttggtctttgaataaagcctgagtaggaaggctagcaaaaaaaaaaaaaaaaaaaaaaaaaaaaaaaaaaaaaaaaaaaaaaaaaaaaaaaaaaaaaaaaaaaaaaaaaaaaaaaa

SEQ ID NO: 2842 - RNA, 5419 nt, synthetic construct
  source 1..5419: mol_type = other RNA
aggaaataagagagaaaagaagagtaagaagaaatataagagccaccatggcccctaagaagaagcgtaaagtgagccgggtgaacggcagcggcagcggcggcggcatgaaccacgaccaggagttcgacccccctaaggtgtaccctcccgtccccgccgagaagagaaagcccatccgggtcctgagcctgttcgatggcatcgccaccggtctgctggtgctgaaggacctgggcatccaggtggataggtacattgcctccgaggtgtgcgaggactccatcaccgtgggaatggtgcgtcatcagggcaagatcatgtacgtgggcgacgtgcggagcgtgacacagaagcatatccaggagtggggccctttcgacctggtgatcggcggcagcccttgcaatgacctgagcatcgtgaacccagcccggaagggcctgtacgagggaaccggcagactgttcttcgagttttacagactgctgcacgacgcccggcctaaggaaggcgacgaccggcccttcttttggctgttcgagaatgtggtggccatgggagtcagcgacaagcgggatattagccggttcctggagagcaaccccgtgatgatcgatgccaaggaagtgagcgccgcccaccgggccagatacttctggggcaatctgcctggcatgaacagacccctggccagcaccgtgaacgacaagctggagctgcaggagtgcctggagcacggccggatcgccaagttcagcaaggtgagaaccatcaccacccgaagcaacagcatcaaacaaggcaaggaccagcactttcctgtgttcatgaacgagaaggaggacatcctgtggtgtaccgagatggagagagtgttcgggttcccagtccactacacagatgtcagcaacatgtctagactggccagacagagactgctgggaagaagctggtccgtccctgtgatcagacacctgttcgcccctctgaaggagtacttcgcctgcgtgagcagcggcaacagcaacgccaacagccggggccccagcttctctagcggcctggtgccactgtccctgagagggagccacatgggccccatggagatctacaaaaccgtgagcgcctggaagcggcagcctgtgcgcgtgctgagcctgtttcggaatatcgataaagtcctgaaaagcctgggattcctggagagcggctctggctccggcggtggcaccctgaagtacgtggaggatgtgacaaacgtggtcagacgggatgtggagaagtggggccccttcgatctggtgtacggcagcacccaacccctgggcagctcttgtgaccggtgccctggctggtacatgtttcagttccaccggatcctgcagtacgccctgccgagacaggagtcccagcggccattcttttggattttcatggacaacttgctgctgaccgaggatgaccaggaaactaccactcggttcctgcagaccgaagccgtgaccctgcaggacgtgagaggccgggactaccagaacgccatgcgggtgtggtccaacatccctggactgaaaagcaagcacgcacctctgacccctaaagaagaggagtacctgcaggcccaggtgcggagcagaagcaagctggacgcccctaaggtggatctgctggtgaagaattgcctcctgcccctgagagagtacttcaagtatttcagccagaatagtctgcccctgggcggcccaagcagcggcgcccctcctcccagcggcggcagcccagccggctccccaacctctaccgaggagggcacctctgagtccgccacccccgagagcggccctggcacctccaccgagcccagcgagggcagcgcacccggcagccctgccggcagccccacctccacagaggagggaaccagcaccgagcccagcgaaggcagcgccccaggcaccagcaccgagcctagtgagggcggctctggcggcggcagcgcccaggagattaaacggatcaacaagatcagaagaagacttgtgaaagacagcaacaccaagaaggccggcaagacaggccccatgaaaaccctgctggttagagtgatgacacccgatctgagagagcggctggaaaacctgagaaagaagcctgaaaatatcccccagcccatcagcaatacatctagagccaacctgaataagctgctgaccgattacaccgaaatgaagaaggcgatcctgcatgtgtactgggaagagttccagaaggaccctgtgggcctgatgagccgggtggcccagcctgccagcaagaagatcgatcagaacaagctgaaacctgagatggacgagaagggcaacctgaccaccgccggctttgcctgctctcagtgtggccagcccctgttcgtgtacaagctggagcaggtgtctgagaagggcaaggcttacaccaactacttcggacggtgcaatgtggccgagcacgaaaagctgatcctgctggcccagctgaagcccgagaaggatagcgacgaagccgtgacatatagcctgggaaagtttgggcagagggccctggatttctacagcattcatgtgaccaaggagtccacccaccccgtgaagcccctggcccagatcgccggaaacagatacgcctccggacctgtgggaaaggccctgagcgacgcatgtatgggcacaatcgcctccttcctgtctaagtaccaggacatcatcatcgaacaccagaaggtggtgaagggcaaccagaagagactggagagcctgcgggagctggccggcaaggaaaacctggaataccctagcgtgaccctgccacctcagcctcacaccaaggagggcgttgatgcctacaacgaagtgatcgcccgggtgcgaatgtgggtgaacctgaacctgtggcagaagctgaagctaagcagagatgatgccaagcctctgctgagactgaagggattcccttcctttcctctggtcgagagacaggccaacgaagtggactggtgggacatggtgtgtaacgtgaagaagctgatcaacgagaaaaaggaggatggcaaggtgttttggcagaatctggctggctacaagagacaggaagccctgagaccatacctgagcagcgaggaagatcggaagaagggaaagaaattcgctcggtaccagctgggcgacctgctgctgcacctggaaaagaagcacggcgaggactggggaaaggtgtacgacgaggcctgggagcggattgacaagaaagtggaaggcctgagcaagcacatcaagctggaagaggaacggagaagcgaggacgcccagagcaaggccgccctgaccgactggctgcgggctaaggccagcttcgtgatcgagggcctgaaggaggccgacaaggacgagttctgcagatgcgagctgaagctgcagaagtggtacggggacctgcggggaaagcccttcgccatcgaagccgagaacagcatcctggacatcagcggcttcagcaagcagtacaactgtgccttcatctggcagaaggacggcgtgaagaagctgaacctgtacctgatcatcaactacttcaagggcggcaagctgcggttcaagaagatcaaacctgaagccttcgaagccaacagattctacaccgtgatcaacaaaaagagcggcgagatcgtgcccatggaggtgaacttcaacttcgacgaccccaacctgatcatcctgcctctggcctttggcaagagacagggcagagaattcatctggaacgacctgctgtccctggaaaccggcagcctgaagctggccaacggaagagtgatcgagaagacactgtacaacagaagaacccggcaggatgagcctgccctgttcgtggccctgaccttcgagcggcgggaggtcctggactcctccaatatcaaaccaatgaacctgatcggcgtggcaagaggcgaaaacatccccgccgtgatcgccctgaccgaccccgagggctgcccactgagccggtttaaggatagcctgggaaacccaacccacatcctgagaatcggcgagagctataaggagaagcagcggaccatccaggccaagaaggaggtggagcagcggagagccggcggctacagccggaagtacgccagcaaagccaagaatctggcagacgatatggtgagaaacaccgctagagatctgctgtactacgccgtgacccaggatgccatgctgatcttcgccaacctgagccggggcttcggccggcagggcaagcggaccttcatggccgagagacagtacacacggatggaggactggctgaccgccaagctggcctacgagggcctgagcaagacctacctgtccaagacactggcccagtacacctccaagacatgcagcaactgtgggtttaccatcaccagcgccgactacgacagggtgctggagaagctgaagaagacagcaacaggctggatgaccacaattaacggcaaggagctgaaggtggagggccagattacctactacaacagatacaagagacagaacgtagtcaaggacctgtccgtcgagctggatagactgagcgaagaatctgtgaacaacgacatctcctcctggacaaagggcagaagcggagaagctctgagcctcctgaagaaaagattctcccatagacccgtgcaggagaagttcgtgtgcctgaactgcggcttcgagacacacgcagccgagcaagccgccctgaacatcgccagatcctggctgttcctgcggagccaggagtacaagaaataccagacaaacaagacaaccggcaacaccgataagagagccttcgtcgagacctggcagtccttttaccggaagaagcttaaggaggtgtggaaacctgccgtgcggtctggcggatctggcggaggctccacaagccccaccgcccccgtggccttcagcgacctgaccatctgcttcagccaggaggagtggggctggctgagccccacccagaagctgctgtacgaggaggtgatgctggagaactaccagaacctggtgagcgtgggcctgtgcaccaggaagccccacatcatcaccctgctggagaagggcaaggacccctggatcgccgagcccctgaggaagaggggcggccccgaccccgccagcaggtacaccagccccaagaaaaagagaaaagtctaagctgccttctgcggggcttgccttctggccatgcccttcttctctcccttgcacctgtacctcttggtctttgaataaagcctgagtaggaaggctagcaaaaaaaaaaaaaaaaaaaaaaaaaaaaaaaaaaaaaaaaaaaaaaaaaaaaaaaaaaaaaaaaaaaaaaaaaaaaaaaa

SEQ ID NO: 2843 - RNA, 5419 nt, synthetic construct
  source 1..5419: mol_type = other RNA
aggaaataagagagaaaagaagagtaagaagaaatataagagccaccatggcccctaagaagaagcgtaaagtgagccgggtgaacggcagcggcagcggcggcggcatgaaccacgaccaggagttcgacccccctaaggtgtaccctcccgtccccgccgagaagagaaagcccatccgggtcctgagcctgttcgatggcatcgccaccggtctgctggtgctgaaggacctgggcatccaggtggataggtacattgcctccgaggtgtgcgaggactccatcaccgtgggaatggtgcgtcatcagggcaagatcatgtacgtgggcgacgtgcggagcgtgacacagaagcatatccaggagtggggccctttcgacctggtgatcggcggcagcccttgcaatgacctgagcatcgtgaacccagcccggaagggcctgtacgagggaaccggcagactgttcttcgagttttacagactgctgcacgacgcccggcctaaggaaggcgacgaccggcccttcttttggctgttcgagaatgtggtggccatgggagtcagcgacaagcgggatattagccggttcctggagagcaaccccgtgatgatcgatgccaaggaagtgagcgccgcccaccgggccagatacttctggggcaatctgcctggcatgaacagacccctggccagcaccgtgaacgacaagctggagctgcaggagtgcctggagcacggccggatcgccaagttcagcaaggtgagaaccatcaccacccgaagcaacagcatcaaacaaggcaaggaccagcactttcctgtgttcatgaacgagaaggaggacatcctgtggtgtaccgagatggagagagtgttcgggttcccagtccactacacagatgtcagcaacatgtctagactggccagacagagactgctgggaagaagctggtccgtccctgtgatcagacacctgttcgcccctctgaaggagtacttcgcctgcgtgagcagcggcaacagcaacgccaacagccggggccccagcttctctagcggcctggtgccactgtccctgagagggagccacatgggccccatggagatctacaaaaccgtgagcgcctggaagcggcagcctgtgcgcgtgctgagcctgtttcggaatatcgataaagtcctgaaaagcctgggattcctggagagcggctctggctccggcggtggcaccctgaagtacgtggaggatgtgacaaacgtggtcagacgggatgtggagaagtggggccccttcgatctggtgtacggcagcacccaacccctgggcagctcttgtgaccggtgccctggctggtacatgtttcagttccaccggatcctgcagtacgccctgccgagacaggagtcccagcggccattcttttggattttcatggacaacttgctgctgaccgaggatgaccaggaaactaccactcggttcctgcagaccgaagccgtgaccctgcaggacgtgagaggccgggactaccagaacgccatgcgggtgtggtccaacatccctggactgaaaagcaagcacgcacctctgacccctaaagaagaggagtacctgcaggcccaggtgcggagcagaagcaagctggacgcccctaaggtggatctgctggtgaagaattgcctcctgcccctgagagagtacttcaagtatttcagccagaatagtctgcccctgggcggcccaagcagcggcgcccctcctcccagcggcggcagcccagccggctccccaacctctaccgaggagggcacctctgagtccgccacccccgagagcggccctggcacctccaccgagcccagcgagggcagcgcacccggcagccctgccggcagccccacctccacagaggagggaaccagcaccgagcccagcgaaggcagcgccccaggcaccagcaccgagcctagtgagggcggctctggcggcggcagcgcccaggagattaaacggatcaacaagatcagaagaagacttgtgaaagacagcaacaccaagaaggccggcaagacaggccccatgaaaaccctgctggttagagtgatgacacccgatctgagagagcggctggaaaacctgagaaagaagcctgaaaatatcccccagcccatcagcaatacatctagagccaacctgaataagctgctgaccgattacaccgaaatgaagaaggcgatcctgcatgtgtactgggaagagttccagaaggaccctgtgggcctgatgagccgggtggcccagcctgccagcaagaagatcgatcagaacaagctgaaacctgagatggacgagaagggcaacctgaccaccgccggctttgcctgctctcagtgtggccagcccctgttcgtgtacaagctggagcaggtgtctgagaagggcaaggcttacaccaactacttcggacggtgcaatgtggccgagcacgaaaagctgatcctgctggcccagctgaagcccgagaaggatagcgacgaagccgtgacatatagcctgggaaagtttgggcagagggccctggatttctacagcattcatgtgaccaaggagtccacccaccccgtgaagcccctggcccagatcgccggaaacagatacgcctccggacctgtgggaaaggccctgagcgacgcatgtatgggcacaatcgcctccttcctgtctaagtaccaggacatcatcatcgaacaccagaaggtggtgaagggcaaccagaagagactggagagcctgcgggagctggccggcaaggaaaacctggaataccctagcgtgaccctgccacctcagcctcacaccaaggagggcgttgatgcctacaacgaagtgatcgcccgggtgcgaatgtgggtgaacctgaacctgtggcagaagctgaagctaagcagagatgatgccaagcctctgctgagactgaagggattcccttcctttcctctggtcgagagacaggccaacgaagtggactggtgggacatggtgtgtaacgtgaagaagctgatcaacgagaaaaaggaggatggcaaggtgttttggcagaatctggctggctacaagagacaggaagccctgagaccatacctgagcagcgaggaagatcggaagaagggaaagaaattcgctcggtaccagctgggcgacctgctgctgcacctggaaaagaagcacggcgaggactggggaaaggtgtacgacgaggcctgggagcggattgacaagaaagtggaaggcctgagcaagcacatcaagctggaagaggaacggagaagcgaggacgcccagagcaaggccgccctgaccgactggctgcgggctaaggccagcttcgtgatcgagggcctgaaggaggccgacaaggacgagttctgcagatgcgagctgaagctgcagaagtggtacggggacctgcggggaaagcccttcgccatcgaagccgagaacagcatcctggacatcagcggcttcagcaagcagtacaactgtgccttcatctggcagaaggacggcgtgaagaagctgaacctgtacctgatcatcaactacttcaagggcggcaagctgcggttcaagaagatcaaacctgaagccttcgaagccaacagattctacaccgtgatcaacaaaaagagcggcgagatcgtgcccatggaggtgaacttcaacttcgacgaccccaacctgatcatcctgcctctggcctttggcaagagacagggcagagaattcatctggaacgacctgctgtccctggaaaccggcagcctgaagctggccaacggaagagtgatcgagaagacactgtacaacagaagaacccggcaggatgagcctgccctgttcgtggccctgaccttcgagcggcgggaggtcctggactcctccaatatcaaaccaatgaacctgatcggcgtggcaagaggcgaaaacatccccgccgtgatcgccctgaccgaccccgagggctgcccactgagccggtttaaggatagcctgggaaacccaacccacatcctgagaatcggcgagagctataaggagaagcagcggaccatccaggccaagaaggaggtggagcagcggagagccggcggctacagccggaagtacgccagcaaagccaagaatctggcagacgatatggtgagaaacaccgctagagatctgctgtactacgccgtgacccaggatgccatgctgatcttcgccaacctgagccggggcttcggccggcagggcaagcggaccttcatggccgagagacagtacacacggatggaggactggctgaccgccaagctggcctacgagggcctgagcaagacctacctgtccaagacactggcccagtacacctccaagacatgcagcaactgtgggtttaccatcaccagcgccgactacgacagggtgctggagaagctgaagaagacagcaacaggctggatgaccacaattaacggcaaggagctgaaggtggagggccagattacctactacaacagatacaagagacagaacgtagtcaaggacctgtccgtcgagctggatagactgagcgaagaatctgtgaacaacgacatctcctcctggacaaagggcagaagcggagaagctctgagcctcctgaagaaaagattctcccatagacccgtgcaggagaagttcgtgtgcctgaactgcggcttcgagacacacgcagccgagcaagccgccctgaacatcgccagatcctggctgttcctgcggagccaggagtacaagaaataccagacaaacaagacaaccggcaacaccgataagagagccttcgtcgagacctggcagtccttttaccggaagaagcttaaggaggtgtggaaacctgccgtgcggtctggcggatctggcggaggctccacaagcgaggagccccccgtggtgttcgaggacgtggccgtgtacttcaccagggaggagtggggcaccctggtgaccaggcagaaggagctgtacagggacgtgatgaggctgaactacgagctgctggccagcctggagcccgccgccgccaagcccgacctgatcagcaagctggagaggagggccgccccctggatcagggaccccagcggccccaagtggggcaagggcaggccccccggcaagaccagccccaagaaaaagagaaaagtctaagctgccttctgcggggcttgccttctggccatgcccttcttctctcccttgcacctgtacctcttggtctttgaataaagcctgagtaggaaggctagcaaaaaaaaaaaaaaaaaaaaaaaaaaaaaaaaaaaaaaaaaaaaaaaaaaaaaaaaaaaaaaaaaaaaaaaaaaaaaaaa

SEQ ID NO: 2844 - RNA, 5419 nt, synthetic construct
  source 1..5419: mol_type = other RNA
aggaaataagagagaaaagaagagtaagaagaaatataagagccaccatggcccctaagaagaagcgtaaagtgagccgggtgaacggcagcggcagcggcggcggcatgaaccacgaccaggagttcgacccccctaaggtgtaccctcccgtccccgccgagaagagaaagcccatccgggtcctgagcctgttcgatggcatcgccaccggtctgctggtgctgaaggacctgggcatccaggtggataggtacattgcctccgaggtgtgcgaggactccatcaccgtgggaatggtgcgtcatcagggcaagatcatgtacgtgggcgacgtgcggagcgtgacacagaagcatatccaggagtggggccctttcgacctggtgatcggcggcagcccttgcaatgacctgagcatcgtgaacccagcccggaagggcctgtacgagggaaccggcagactgttcttcgagttttacagactgctgcacgacgcccggcctaaggaaggcgacgaccggcccttcttttggctgttcgagaatgtggtggccatgggagtcagcgacaagcgggatattagccggttcctggagagcaaccccgtgatgatcgatgccaaggaagtgagcgccgcccaccgggccagatacttctggggcaatctgcctggcatgaacagacccctggccagcaccgtgaacgacaagctggagctgcaggagtgcctggagcacggccggatcgccaagttcagcaaggtgagaaccatcaccacccgaagcaacagcatcaaacaaggcaaggaccagcactttcctgtgttcatgaacgagaaggaggacatcctgtggtgtaccgagatggagagagtgttcgggttcccagtccactacacagatgtcagcaacatgtctagactggccagacagagactgctgggaagaagctggtccgtccctgtgatcagacacctgttcgcccctctgaaggagtacttcgcctgcgtgagcagcggcaacagcaacgccaacagccggggccccagcttctctagcggcctggtgccactgtccctgagagggagccacatgggccccatggagatctacaaaaccgtgagcgcctggaagcggcagcctgtgcgcgtgctgagcctgtttcggaatatcgataaagtcctgaaaagcctgggattcctggagagcggctctggctccggcggtggcaccctgaagtacgtggaggatgtgacaaacgtggtcagacgggatgtggagaagtggggccccttcgatctggtgtacggcagcacccaacccctgggcagctcttgtgaccggtgccctggctggtacatgtttcagttccaccggatcctgcagtacgccctgccgagacaggagtcccagcggccattcttttggattttcatggacaacttgctgctgaccgaggatgaccaggaaactaccactcggttcctgcagaccgaagccgtgaccctgcaggacgtgagaggccgggactaccagaacgccatgcgggtgtggtccaacatccctggactgaaaagcaagcacgcacctctgacccctaaagaagaggagtacctgcaggcccaggtgcggagcagaagcaagctggacgcccctaaggtggatctgctggtgaagaattgcctcctgcccctgagagagtacttcaagtatttcagccagaatagtctgcccctgggcggcccaagcagcggcgcccctcctcccagcggcggcagcccagccggctccccaacctctaccgaggagggcacctctgagtccgccacccccgagagcggccctggcacctccaccgagcccagcgagggcagcgcacccggcagccctgccggcagccccacctccacagaggagggaaccagcaccgagcccagcgaaggcagcgccccaggcaccagcaccgagcctagtgagggcggctctggcggcggcagcgcccaggagattaaacggatcaacaagatcagaagaagacttgtgaaagacagcaacaccaagaaggccggcaagacaggccccatgaaaaccctgctggttagagtgatgacacccgatctgagagagcggctggaaaacctgagaaagaagcctgaaaatatcccccagcccatcagcaatacatctagagccaacctgaataagctgctgaccgattacaccgaaatgaagaaggcgatcctgcatgtgtactgggaagagttccagaaggaccctgtgggcctgatgagccgggtggcccagcctgccagcaagaagatcgatcagaacaagctgaaacctgagatggacgagaagggcaacctgaccaccgccggctttgcctgctctcagtgtggccagcccctgttcgtgtacaagctggagcaggtgtctgagaagggcaaggcttacaccaactacttcggacggtgcaatgtggccgagcacgaaaagctgatcctgctggcccagctgaagcccgagaaggatagcgacgaagccgtgacatatagcctgggaaagtttgggcagagggccctggatttctacagcattcatgtgaccaaggagtccacccaccccgtgaagcccctggcccagatcgccggaaacagatacgcctccggacctgtgggaaaggccctgagcgacgcatgtatgggcacaatcgcctccttcctgtctaagtaccaggacatcatcatcgaacaccagaaggtggtgaagggcaaccagaagagactggagagcctgcgggagctggccggcaaggaaaacctggaataccctagcgtgaccctgccacctcagcctcacaccaaggagggcgttgatgcctacaacgaagtgatcgcccgggtgcgaatgtgggtgaacctgaacctgtggcagaagctgaagctaagcagagatgatgccaagcctctgctgagactgaagggattcccttcctttcctctggtcgagagacaggccaacgaagtggactggtgggacatggtgtgtaacgtgaagaagctgatcaacgagaaaaaggaggatggcaaggtgttttggcagaatctggctggctacaagagacaggaagccctgagaccatacctgagcagcgaggaagatcggaagaagggaaagaaattcgctcggtaccagctgggcgacctgctgctgcacctggaaaagaagcacggcgaggactggggaaaggtgtacgacgaggcctgggagcggattgacaagaaagtggaaggcctgagcaagcacatcaagctggaagaggaacggagaagcgaggacgcccagagcaaggccgccctgaccgactggctgcgggctaaggccagcttcgtgatcgagggcctgaaggaggccgacaaggacgagttctgcagatgcgagctgaagctgcagaagtggtacggggacctgcggggaaagcccttcgccatcgaagccgagaacagcatcctggacatcagcggcttcagcaagcagtacaactgtgccttcatctggcagaaggacggcgtgaagaagctgaacctgtacctgatcatcaactacttcaagggcggcaagctgcggttcaagaagatcaaacctgaagccttcgaagccaacagattctacaccgtgatcaacaaaaagagcggcgagatcgtgcccatggaggtgaacttcaacttcgacgaccccaacctgatcatcctgcctctggcctttggcaagagacagggcagagaattcatctggaacgacctgctgtccctggaaaccggcagcctgaagctggccaacggaagagtgatcgagaagacactgtacaacagaagaacccggcaggatgagcctgccctgttcgtggccctgaccttcgagcggcgggaggtcctggactcctccaatatcaaaccaatgaacctgatcggcgtggcaagaggcgaaaacatccccgccgtgatcgccctgaccgaccccgagggctgcccactgagccggtttaaggatagcctgggaaacccaacccacatcctgagaatcggcgagagctataaggagaagcagcggaccatccaggccaagaaggaggtggagcagcggagagccggcggctacagccggaagtacgccagcaaagccaagaatctggcagacgatatggtgagaaacaccgctagagatctgctgtactacgccgtgacccaggatgccatgctgatcttcgccaacctgagccggggcttcggccggcagggcaagcggaccttcatggccgagagacagtacacacggatggaggactggctgaccgccaagctggcctacgagggcctgagcaagacctacctgtccaagacactggcccagtacacctccaagacatgcagcaactgtgggtttaccatcaccagcgccgactacgacagggtgctggagaagctgaagaagacagcaacaggctggatgaccacaattaacggcaaggagctgaaggtggagggccagattacctactacaacagatacaagagacagaacgtagtcaaggacctgtccgtcgagctggatagactgagcgaagaatctgtgaacaacgacatctcctcctggacaaagggcagaagcggagaagctctgagcctcctgaagaaaagattctcccatagacccgtgcaggagaagttcgtgtgcctgaactgcggcttcgagacacacgcagccgagcaagccgccctgaacatcgccagatcctggctgttcctgcggagccaggagtacaagaaataccagacaaacaagacaaccggcaacaccgataagagagccttcgtcgagacctggcagtccttttaccggaagaagcttaaggaggtgtggaaacctgccgtgcggtctggcggatctggcggaggctccacaagccagggcagcgtgatgttcagcgacgtgagcatcatcttcagccaggaggagtgggagtacctggacagggagcagaggaacctgtacaggaacgtgatgatggagaactacagcaacctggtgagcctggccggctgcttcatcagcaagcccgacgtgatcaccctgctggagcagggcaaggacccctggaaggtggtgaggaagggcaggaagaggtacagcgacctggagaccagccacaccagccccaagaaaaagagaaaagtctaagctgccttctgcggggcttgccttctggccatgcccttcttctctcccttgcacctgtacctcttggtctttgaataaagcctgagtaggaaggctagcaaaaaaaaaaaaaaaaaaaaaaaaaaaaaaaaaaaaaaaaaaaaaaaaaaaaaaaaaaaaaaaaaaaaaaaaaaaaaaaa

SEQ ID NO: 2845 - RNA, 5419 nt, synthetic construct
  source 1..5419: mol_type = other RNA
aggaaataagagagaaaagaagagtaagaagaaatataagagccaccatggcccctaagaagaagcgtaaagtgagccgggtgaacggcagcggcagcggcggcggcatgaaccacgaccaggagttcgacccccctaaggtgtaccctcccgtccccgccgagaagagaaagcccatccgggtcctgagcctgttcgatggcatcgccaccggtctgctggtgctgaaggacctgggcatccaggtggataggtacattgcctccgaggtgtgcgaggactccatcaccgtgggaatggtgcgtcatcagggcaagatcatgtacgtgggcgacgtgcggagcgtgacacagaagcatatccaggagtggggccctttcgacctggtgatcggcggcagcccttgcaatgacctgagcatcgtgaacccagcccggaagggcctgtacgagggaaccggcagactgttcttcgagttttacagactgctgcacgacgcccggcctaaggaaggcgacgaccggcccttcttttggctgttcgagaatgtggtggccatgggagtcagcgacaagcgggatattagccggttcctggagagcaaccccgtgatgatcgatgccaaggaagtgagcgccgcccaccgggccagatacttctggggcaatctgcctggcatgaacagacccctggccagcaccgtgaacgacaagctggagctgcaggagtgcctggagcacggccggatcgccaagttcagcaaggtgagaaccatcaccacccgaagcaacagcatcaaacaaggcaaggaccagcactttcctgtgttcatgaacgagaaggaggacatcctgtggtgtaccgagatggagagagtgttcgggttcccagtccactacacagatgtcagcaacatgtctagactggccagacagagactgctgggaagaagctggtccgtccctgtgatcagacacctgttcgcccctctgaaggagtacttcgcctgcgtgagcagcggcaacagcaacgccaacagccggggccccagcttctctagcggcctggtgccactgtccctgagagggagccacatgggccccatggagatctacaaaaccgtgagcgcctggaagcggcagcctgtgcgcgtgctgagcctgtttcggaatatcgataaagtcctgaaaagcctgggattcctggagagcggctctggctccggcggtggcaccctgaagtacgtggaggatgtgacaaacgtggtcagacgggatgtggagaagtggggccccttcgatctggtgtacggcagcacccaacccctgggcagctcttgtgaccggtgccctggctggtacatgtttcagttccaccggatcctgcagtacgccctgccgagacaggagtcccagcggccattcttttggattttcatggacaacttgctgctgaccgaggatgaccaggaaactaccactcggttcctgcagaccgaagccgtgaccctgcaggacgtgagaggccgggactaccagaacgccatgcgggtgtggtccaacatccctggactgaaaagcaagcacgcacctctgacccctaaagaagaggagtacctgcaggcccaggtgcggagcagaagcaagctggacgcccctaaggtggatctgctggtgaagaattgcctcctgcccctgagagagtacttcaagtatttcagccagaatagtctgcccctgggcggcccaagcagcggcgcccctcctcccagcggcggcagcccagccggctccccaacctctaccgaggagggcacctctgagtccgccacccccgagagcggccctggcacctccaccgagcccagcgagggcagcgcacccggcagccctgccggcagccccacctccacagaggagggaaccagcaccgagcccagcgaaggcagcgccccaggcaccagcaccgagcctagtgagggcggctctggcggcggcagcgcccaggagattaaacggatcaacaagatcagaagaagacttgtgaaagacagcaacaccaagaaggccggcaagacaggccccatgaaaaccctgctggttagagtgatgacacccgatctgagagagcggctggaaaacctgagaaagaagcctgaaaatatcccccagcccatcagcaatacatctagagccaacctgaataagctgctgaccgattacaccgaaatgaagaaggcgatcctgcatgtgtactgggaagagttccagaaggaccctgtgggcctgatgagccgggtggcccagcctgccagcaagaagatcgatcagaacaagctgaaacctgagatggacgagaagggcaacctgaccaccgccggctttgcctgctctcagtgtggccagcccctgttcgtgtacaagctggagcaggtgtctgagaagggcaaggcttacaccaactacttcggacggtgcaatgtggccgagcacgaaaagctgatcctgctggcccagctgaagcccgagaaggatagcgacgaagccgtgacatatagcctgggaaagtttgggcagagggccctggatttctacagcattcatgtgaccaaggagtccacccaccccgtgaagcccctggcccagatcgccggaaacagatacgcctccggacctgtgggaaaggccctgagcgacgcatgtatgggcacaatcgcctccttcctgtctaagtaccaggacatcatcatcgaacaccagaaggtggtgaagggcaaccagaagagactggagagcctgcgggagctggccggcaaggaaaacctggaataccctagcgtgaccctgccacctcagcctcacaccaaggagggcgttgatgcctacaacgaagtgatcgcccgggtgcgaatgtgggtgaacctgaacctgtggcagaagctgaagctaagcagagatgatgccaagcctctgctgagactgaagggattcccttcctttcctctggtcgagagacaggccaacgaagtggactggtgggacatggtgtgtaacgtgaagaagctgatcaacgagaaaaaggaggatggcaaggtgttttggcagaatctggctggctacaagagacaggaagccctgagaccatacctgagcagcgaggaagatcggaagaagggaaagaaattcgctcggtaccagctgggcgacctgctgctgcacctggaaaagaagcacggcgaggactggggaaaggtgtacgacgaggcctgggagcggattgacaagaaagtggaaggcctgagcaagcacatcaagctggaagaggaacggagaagcgaggacgcccagagcaaggccgccctgaccgactggctgcgggctaaggccagcttcgtgatcgagggcctgaaggaggccgacaaggacgagttctgcagatgcgagctgaagctgcagaagtggtacggggacctgcggggaaagcccttcgccatcgaagccgagaacagcatcctggacatcagcggcttcagcaagcagtacaactgtgccttcatctggcagaaggacggcgtgaagaagctgaacctgtacctgatcatcaactacttcaagggcggcaagctgcggttcaagaagatcaaacctgaagccttcgaagccaacagattctacaccgtgatcaacaaaaagagcggcgagatcgtgcccatggaggtgaacttcaacttcgacgaccccaacctgatcatcctgcctctggcctttggcaagagacagggcagagaattcatctggaacgacctgctgtccctggaaaccggcagcctgaagctggccaacggaagagtgatcgagaagacactgtacaacagaagaacccggcaggatgagcctgccctgttcgtggccctgaccttcgagcggcgggaggtcctggactcctccaatatcaaaccaatgaacctgatcggcgtggcaagaggcgaaaacatccccgccgtgatcgccctgaccgaccccgagggctgcccactgagccggtttaaggatagcctgggaaacccaacccacatcctgagaatcggcgagagctataaggagaagcagcggaccatccaggccaagaaggaggtggagcagcggagagccggcggctacagccggaagtacgccagcaaagccaagaatctggcagacgatatggtgagaaacaccgctagagatctgctgtactacgccgtgacccaggatgccatgctgatcttcgccaacctgagccggggcttcggccggcagggcaagcggaccttcatggccgagagacagtacacacggatggaggactggctgaccgccaagctggcctacgagggcctgagcaagacctacctgtccaagacactggcccagtacacctccaagacatgcagcaactgtgggtttaccatcaccagcgccgactacgacagggtgctggagaagctgaagaagacagcaacaggctggatgaccacaattaacggcaaggagctgaaggtggagggccagattacctactacaacagatacaagagacagaacgtagtcaaggacctgtccgtcgagctggatagactgagcgaagaatctgtgaacaacgacatctcctcctggacaaagggcagaagcggagaagctctgagcctcctgaagaaaagattctcccatagacccgtgcaggagaagttcgtgtgcctgaactgcggcttcgagacacacgcagccgagcaagccgccctgaacatcgccagatcctggctgttcctgcggagccaggagtacaagaaataccagacaaacaagacaaccggcaacaccgataagagagccttcgtcgagacctggcagtccttttaccggaagaagcttaaggaggtgtggaaacctgccgtgcggtctggcggatctggcggaggctccacaagcacccagggcagcctgaccttcaaggacgtggccatcgagttcagccaggaggagtggaagtgcctggaccccgtgcagaaggccctgtacagggacgtgatgctggagaactacaggaacctgggcttcctgggcctgtgcctgcccgacctggacatcatcagcatgctggagcagggcaaggagccctggaccgtggtgagccaggtgaagatcaccaggaaccccaactgcggcgagtgcaccagccccaagaaaaagagaaaagtctaagctgccttctgcggggcttgccttctggccatgcccttcttctctcccttgcacctgtacctcttggtctttgaataaagcctgagtaggaaggctagcaaaaaaaaaaaaaaaaaaaaaaaaaaaaaaaaaaaaaaaaaaaaaaaaaaaaaaaaaaaaaaaaaaaaaaaaaaaaaaaa

SEQ ID NO: 2846 - RNA, 5419 nt, synthetic construct
  source 1..5419: mol_type = other RNA
aggaaataagagagaaaagaagagtaagaagaaatataagagccaccatggcccctaagaagaagcgtaaagtgagccgggtgaacggcagcggcagcggcggcggcatgaaccacgaccaggagttcgacccccctaaggtgtaccctcccgtccccgccgagaagagaaagcccatccgggtcctgagcctgttcgatggcatcgccaccggtctgctggtgctgaaggacctgggcatccaggtggataggtacattgcctccgaggtgtgcgaggactccatcaccgtgggaatggtgcgtcatcagggcaagatcatgtacgtgggcgacgtgcggagcgtgacacagaagcatatccaggagtggggccctttcgacctggtgatcggcggcagcccttgcaatgacctgagcatcgtgaacccagcccggaagggcctgtacgagggaaccggcagactgttcttcgagttttacagactgctgcacgacgcccggcctaaggaaggcgacgaccggcccttcttttggctgttcgagaatgtggtggccatgggagtcagcgacaagcgggatattagccggttcctggagagcaaccccgtgatgatcgatgccaaggaagtgagcgccgcccaccgggccagatacttctggggcaatctgcctggcatgaacagacccctggccagcaccgtgaacgacaagctggagctgcaggagtgcctggagcacggccggatcgccaagttcagcaaggtgagaaccatcaccacccgaagcaacagcatcaaacaaggcaaggaccagcactttcctgtgttcatgaacgagaaggaggacatcctgtggtgtaccgagatggagagagtgttcgggttcccagtccactacacagatgtcagcaacatgtctagactggccagacagagactgctgggaagaagctggtccgtccctgtgatcagacacctgttcgcccctctgaaggagtacttcgcctgcgtgagcagcggcaacagcaacgccaacagccggggccccagcttctctagcggcctggtgccactgtccctgagagggagccacatgggccccatggagatctacaaaaccgtgagcgcctggaagcggcagcctgtgcgcgtgctgagcctgtttcggaatatcgataaagtcctgaaaagcctgggattcctggagagcggctctggctccggcggtggcaccctgaagtacgtggaggatgtgacaaacgtggtcagacgggatgtggagaagtggggccccttcgatctggtgtacggcagcacccaacccctgggcagctcttgtgaccggtgccctggctggtacatgtttcagttccaccggatcctgcagtacgccctgccgagacaggagtcccagcggccattcttttggattttcatggacaacttgctgctgaccgaggatgaccaggaaactaccactcggttcctgcagaccgaagccgtgaccctgcaggacgtgagaggccgggactaccagaacgccatgcgggtgtggtccaacatccctggactgaaaagcaagcacgcacctctgacccctaaagaagaggagtacctgcaggcccaggtgcggagcagaagcaagctggacgcccctaaggtggatctgctggtgaagaattgcctcctgcccctgagagagtacttcaagtatttcagccagaatagtctgcccctgggcggcccaagcagcggcgcccctcctcccagcggcggcagcccagccggctccccaacctctaccgaggagggcacctctgagtccgccacccccgagagcggccctggcacctccaccgagcccagcgagggcagcgcacccggcagccctgccggcagccccacctccacagaggagggaaccagcaccgagcccagcgaaggcagcgccccaggcaccagcaccgagcctagtgagggcggctctggcggcggcagcgcccaggagattaaacggatcaacaagatcagaagaagacttgtgaaagacagcaacaccaagaaggccggcaagacaggccccatgaaaaccctgctggttagagtgatgacacccgatctgagagagcggctggaaaacctgagaaagaagcctgaaaatatcccccagcccatcagcaatacatctagagccaacctgaataagctgctgaccgattacaccgaaatgaagaaggcgatcctgcatgtgtactgggaagagttccagaaggaccctgtgggcctgatgagccgggtggcccagcctgccagcaagaagatcgatcagaacaagctgaaacctgagatggacgagaagggcaacctgaccaccgccggctttgcctgctctcagtgtggccagcccctgttcgtgtacaagctggagcaggtgtctgagaagggcaaggcttacaccaactacttcggacggtgcaatgtggccgagcacgaaaagctgatcctgctggcccagctgaagcccgagaaggatagcgacgaagccgtgacatatagcctgggaaagtttgggcagagggccctggatttctacagcattcatgtgaccaaggagtccacccaccccgtgaagcccctggcccagatcgccggaaacagatacgcctccggacctgtgggaaaggccctgagcgacgcatgtatgggcacaatcgcctccttcctgtctaagtaccaggacatcatcatcgaacaccagaaggtggtgaagggcaaccagaagagactggagagcctgcgggagctggccggcaaggaaaacctggaataccctagcgtgaccctgccacctcagcctcacaccaaggagggcgttgatgcctacaacgaagtgatcgcccgggtgcgaatgtgggtgaacctgaacctgtggcagaagctgaagctaagcagagatgatgccaagcctctgctgagactgaagggattcccttcctttcctctggtcgagagacaggccaacgaagtggactggtgggacatggtgtgtaacgtgaagaagctgatcaacgagaaaaaggaggatggcaaggtgttttggcagaatctggctggctacaagagacaggaagccctgagaccatacctgagcagcgaggaagatcggaagaagggaaagaaattcgctcggtaccagctgggcgacctgctgctgcacctggaaaagaagcacggcgaggactggggaaaggtgtacgacgaggcctgggagcggattgacaagaaagtggaaggcctgagcaagcacatcaagctggaagaggaacggagaagcgaggacgcccagagcaaggccgccctgaccgactggctgcgggctaaggccagcttcgtgatcgagggcctgaaggaggccgacaaggacgagttctgcagatgcgagctgaagctgcagaagtggtacggggacctgcggggaaagcccttcgccatcgaagccgagaacagcatcctggacatcagcggcttcagcaagcagtacaactgtgccttcatctggcagaaggacggcgtgaagaagctgaacctgtacctgatcatcaactacttcaagggcggcaagctgcggttcaagaagatcaaacctgaagccttcgaagccaacagattctacaccgtgatcaacaaaaagagcggcgagatcgtgcccatggaggtgaacttcaacttcgacgaccccaacctgatcatcctgcctctggcctttggcaagagacagggcagagaattcatctggaacgacctgctgtccctggaaaccggcagcctgaagctggccaacggaagagtgatcgagaagacactgtacaacagaagaacccggcaggatgagcctgccctgttcgtggccctgaccttcgagcggcgggaggtcctggactcctccaatatcaaaccaatgaacctgatcggcgtggcaagaggcgaaaacatccccgccgtgatcgccctgaccgaccccgagggctgcccactgagccggtttaaggatagcctgggaaacccaacccacatcctgagaatcggcgagagctataaggagaagcagcggaccatccaggccaagaaggaggtggagcagcggagagccggcggctacagccggaagtacgccagcaaagccaagaatctggcagacgatatggtgagaaacaccgctagagatctgctgtactacgccgtgacccaggatgccatgctgatcttcgccaacctgagccggggcttcggccggcagggcaagcggaccttcatggccgagagacagtacacacggatggaggactggctgaccgccaagctggcctacgagggcctgagcaagacctacctgtccaagacactggcccagtacacctccaagacatgcagcaactgtgggtttaccatcaccagcgccgactacgacagggtgctggagaagctgaagaagacagcaacaggctggatgaccacaattaacggcaaggagctgaaggtggagggccagattacctactacaacagatacaagagacagaacgtagtcaaggacctgtccgtcgagctggatagactgagcgaagaatctgtgaacaacgacatctcctcctggacaaagggcagaagcggagaagctctgagcctcctgaagaaaagattctcccatagacccgtgcaggagaagttcgtgtgcctgaactgcggcttcgagacacacgcagccgagcaagccgccctgaacatcgccagatcctggctgttcctgcggagccaggagtacaagaaataccagacaaacaagacaaccggcaacaccgataagagagccttcgtcgagacctggcagtccttttaccggaagaagcttaaggaggtgtggaaacctgccgtgcggtctggcggatctggcggaggctccacaagcttcaaggagctggtggtgttcagggacgtggccgtggagttctgcaaggaggagtgggagtgcctgggccccgagcagaggagcctgtacagggacgtgatgctggagaactacagcaacttcgtgagcctgggcctggccatcagcaagcccaccatcatcagcctgctggagcagggcaaggagccctggatcgtggagcaggccggctggtaccccgacctgctgagcgagaacgaggccaccagccccaagaaaaagagaaaagtctaagctgccttctgcggggcttgccttctggccatgcccttcttctctcccttgcacctgtacctcttggtctttgaataaagcctgagtaggaaggctagcaaaaaaaaaaaaaaaaaaaaaaaaaaaaaaaaaaaaaaaaaaaaaaaaaaaaaaaaaaaaaaaaaaaaaaaaaaaaaaaa

SEQ ID NO: 2847 - RNA, 5419 nt, synthetic construct
  source 1..5419: mol_type = other RNA
aggaaataagagagaaaagaagagtaagaagaaatataagagccaccatggcccctaagaagaagcgtaaagtgagccgggtgaacggcagcggcagcggcggcggcatgaaccacgaccaggagttcgacccccctaaggtgtaccctcccgtccccgccgagaagagaaagcccatccgggtcctgagcctgttcgatggcatcgccaccggtctgctggtgctgaaggacctgggcatccaggtggataggtacattgcctccgaggtgtgcgaggactccatcaccgtgggaatggtgcgtcatcagggcaagatcatgtacgtgggcgacgtgcggagcgtgacacagaagcatatccaggagtggggccctttcgacctggtgatcggcggcagcccttgcaatgacctgagcatcgtgaacccagcccggaagggcctgtacgagggaaccggcagactgttcttcgagttttacagactgctgcacgacgcccggcctaaggaaggcgacgaccggcccttcttttggctgttcgagaatgtggtggccatgggagtcagcgacaagcgggatattagccggttcctggagagcaaccccgtgatgatcgatgccaaggaagtgagcgccgcccaccgggccagatacttctggggcaatctgcctggcatgaacagacccctggccagcaccgtgaacgacaagctggagctgcaggagtgcctggagcacggccggatcgccaagttcagcaaggtgagaaccatcaccacccgaagcaacagcatcaaacaaggcaaggaccagcactttcctgtgttcatgaacgagaaggaggacatcctgtggtgtaccgagatggagagagtgttcgggttcccagtccactacacagatgtcagcaacatgtctagactggccagacagagactgctgggaagaagctggtccgtccctgtgatcagacacctgttcgcccctctgaaggagtacttcgcctgcgtgagcagcggcaacagcaacgccaacagccggggccccagcttctctagcggcctggtgccactgtccctgagagggagccacatgggccccatggagatctacaaaaccgtgagcgcctggaagcggcagcctgtgcgcgtgctgagcctgtttcggaatatcgataaagtcctgaaaagcctgggattcctggagagcggctctggctccggcggtggcaccctgaagtacgtggaggatgtgacaaacgtggtcagacgggatgtggagaagtggggccccttcgatctggtgtacggcagcacccaacccctgggcagctcttgtgaccggtgccctggctggtacatgtttcagttccaccggatcctgcagtacgccctgccgagacaggagtcccagcggccattcttttggattttcatggacaacttgctgctgaccgaggatgaccaggaaactaccactcggttcctgcagaccgaagccgtgaccctgcaggacgtgagaggccgggactaccagaacgccatgcgggtgtggtccaacatccctggactgaaaagcaagcacgcacctctgacccctaaagaagaggagtacctgcaggcccaggtgcggagcagaagcaagctggacgcccctaaggtggatctgctggtgaagaattgcctcctgcccctgagagagtacttcaagtatttcagccagaatagtctgcccctgggcggcccaagcagcggcgcccctcctcccagcggcggcagcccagccggctccccaacctctaccgaggagggcacctctgagtccgccacccccgagagcggccctggcacctccaccgagcccagcgagggcagcgcacccggcagccctgccggcagccccacctccacagaggagggaaccagcaccgagcccagcgaaggcagcgccccaggcaccagcaccgagcctagtgagggcggctctggcggcggcagcgcccaggagattaaacggatcaacaagatcagaagaagacttgtgaaagacagcaacaccaagaaggccggcaagacaggccccatgaaaaccctgctggttagagtgatgacacccgatctgagagagcggctggaaaacctgagaaagaagcctgaaaatatcccccagcccatcagcaatacatctagagccaacctgaataagctgctgaccgattacaccgaaatgaagaaggcgatcctgcatgtgtactgggaagagttccagaaggaccctgtgggcctgatgagccgggtggcccagcctgccagcaagaagatcgatcagaacaagctgaaacctgagatggacgagaagggcaacctgaccaccgccggctttgcctgctctcagtgtggccagcccctgttcgtgtacaagctggagcaggtgtctgagaagggcaaggcttacaccaactacttcggacggtgcaatgtggccgagcacgaaaagctgatcctgctggcccagctgaagcccgagaaggatagcgacgaagccgtgacatatagcctgggaaagtttgggcagagggccctggatttctacagcattcatgtgaccaaggagtccacccaccccgtgaagcccctggcccagatcgccggaaacagatacgcctccggacctgtgggaaaggccctgagcgacgcatgtatgggcacaatcgcctccttcctgtctaagtaccaggacatcatcatcgaacaccagaaggtggtgaagggcaaccagaagagactggagagcctgcgggagctggccggcaaggaaaacctggaataccctagcgtgaccctgccacctcagcctcacaccaaggagggcgttgatgcctacaacgaagtgatcgcccgggtgcgaatgtgggtgaacctgaacctgtggcagaagctgaagctaagcagagatgatgccaagcctctgctgagactgaagggattcccttcctttcctctggtcgagagacaggccaacgaagtggactggtgggacatggtgtgtaacgtgaagaagctgatcaacgagaaaaaggaggatggcaaggtgttttggcagaatctggctggctacaagagacaggaagccctgagaccatacctgagcagcgaggaagatcggaagaagggaaagaaattcgctcggtaccagctgggcgacctgctgctgcacctggaaaagaagcacggcgaggactggggaaaggtgtacgacgaggcctgggagcggattgacaagaaagtggaaggcctgagcaagcacatcaagctggaagaggaacggagaagcgaggacgcccagagcaaggccgccctgaccgactggctgcgggctaaggccagcttcgtgatcgagggcctgaaggaggccgacaaggacgagttctgcagatgcgagctgaagctgcagaagtggtacggggacctgcggggaaagcccttcgccatcgaagccgagaacagcatcctggacatcagcggcttcagcaagcagtacaactgtgccttcatctggcagaaggacggcgtgaagaagctgaacctgtacctgatcatcaactacttcaagggcggcaagctgcggttcaagaagatcaaacctgaagccttcgaagccaacagattctacaccgtgatcaacaaaaagagcggcgagatcgtgcccatggaggtgaacttcaacttcgacgaccccaacctgatcatcctgcctctggcctttggcaagagacagggcagagaattcatctggaacgacctgctgtccctggaaaccggcagcctgaagctggccaacggaagagtgatcgagaagacactgtacaacagaagaacccggcaggatgagcctgccctgttcgtggccctgaccttcgagcggcgggaggtcctggactcctccaatatcaaaccaatgaacctgatcggcgtggcaagaggcgaaaacatccccgccgtgatcgccctgaccgaccccgagggctgcccactgagccggtttaaggatagcctgggaaacccaacccacatcctgagaatcggcgagagctataaggagaagcagcggaccatccaggccaagaaggaggtggagcagcggagagccggcggctacagccggaagtacgccagcaaagccaagaatctggcagacgatatggtgagaaacaccgctagagatctgctgtactacgccgtgacccaggatgccatgctgatcttcgccaacctgagccggggcttcggccggcagggcaagcggaccttcatggccgagagacagtacacacggatggaggactggctgaccgccaagctggcctacgagggcctgagcaagacctacctgtccaagacactggcccagtacacctccaagacatgcagcaactgtgggtttaccatcaccagcgccgactacgacagggtgctggagaagctgaagaagacagcaacaggctggatgaccacaattaacggcaaggagctgaaggtggagggccagattacctactacaacagatacaagagacagaacgtagtcaaggacctgtccgtcgagctggatagactgagcgaagaatctgtgaacaacgacatctcctcctggacaaagggcagaagcggagaagctctgagcctcctgaagaaaagattctcccatagacccgtgcaggagaagttcgtgtgcctgaactgcggcttcgagacacacgcagccgagcaagccgccctgaacatcgccagatcctggctgttcctgcggagccaggagtacaagaaataccagacaaacaagacaaccggcaacaccgataagagagccttcgtcgagacctggcagtccttttaccggaagaagcttaaggaggtgtggaaacctgccgtgcggtctggcggatctggcggaggctccacaagccccctggagaccgtgaccttcggcgacgtggtgctggacttcacccaggaggagtgggccctgctggacaccagccagaagaagctgttcagggacgtgatgctggagaacatccaccacctggtgagcgtgggctaccagatcagcaagagcgacgtgatcctgcagctggagcagggcaaggagctgtggagggagggcgagggcaggccccagggcaggggccccggcagcgagagccccaccagccccaagaaaaagagaaaagtctaagctgccttctgcggggcttgccttctggccatgcccttcttctctcccttgcacctgtacctcttggtctttgaataaagcctgagtaggaaggctagcaaaaaaaaaaaaaaaaaaaaaaaaaaaaaaaaaaaaaaaaaaaaaaaaaaaaaaaaaaaaaaaaaaaaaaaaaaaaaaaa

SEQ ID NO: 2848 - RNA, 5419 nt, synthetic construct
  source 1..5419: mol_type = other RNA
aggaaataagagagaaaagaagagtaagaagaaatataagagccaccatggcccctaagaagaagcgtaaagtgagccgggtgaacggcagcggcagcggcggcggcatgaaccacgaccaggagttcgacccccctaaggtgtaccctcccgtccccgccgagaagagaaagcccatccgggtcctgagcctgttcgatggcatcgccaccggtctgctggtgctgaaggacctgggcatccaggtggataggtacattgcctccgaggtgtgcgaggactccatcaccgtgggaatggtgcgtcatcagggcaagatcatgtacgtgggcgacgtgcggagcgtgacacagaagcatatccaggagtggggccctttcgacctggtgatcggcggcagcccttgcaatgacctgagcatcgtgaacccagcccggaagggcctgtacgagggaaccggcagactgttcttcgagttttacagactgctgcacgacgcccggcctaaggaaggcgacgaccggcccttcttttggctgttcgagaatgtggtggccatgggagtcagcgacaagcgggatattagccggttcctggagagcaaccccgtgatgatcgatgccaaggaagtgagcgccgcccaccgggccagatacttctggggcaatctgcctggcatgaacagacccctggccagcaccgtgaacgacaagctggagctgcaggagtgcctggagcacggccggatcgccaagttcagcaaggtgagaaccatcaccacccgaagcaacagcatcaaacaaggcaaggaccagcactttcctgtgttcatgaacgagaaggaggacatcctgtggtgtaccgagatggagagagtgttcgggttcccagtccactacacagatgtcagcaacatgtctagactggccagacagagactgctgggaagaagctggtccgtccctgtgatcagacacctgttcgcccctctgaaggagtacttcgcctgcgtgagcagcggcaacagcaacgccaacagccggggccccagcttctctagcggcctggtgccactgtccctgagagggagccacatgggccccatggagatctacaaaaccgtgagcgcctggaagcggcagcctgtgcgcgtgctgagcctgtttcggaatatcgataaagtcctgaaaagcctgggattcctggagagcggctctggctccggcggtggcaccctgaagtacgtggaggatgtgacaaacgtggtcagacgggatgtggagaagtggggccccttcgatctggtgtacggcagcacccaacccctgggcagctcttgtgaccggtgccctggctggtacatgtttcagttccaccggatcctgcagtacgccctgccgagacaggagtcccagcggccattcttttggattttcatggacaacttgctgctgaccgaggatgaccaggaaactaccactcggttcctgcagaccgaagccgtgaccctgcaggacgtgagaggccgggactaccagaacgccatgcgggtgtggtccaacatccctggactgaaaagcaagcacgcacctctgacccctaaagaagaggagtacctgcaggcccaggtgcggagcagaagcaagctggacgcccctaaggtggatctgctggtgaagaattgcctcctgcccctgagagagtacttcaagtatttcagccagaatagtctgcccctgggcggcccaagcagcggcgcccctcctcccagcggcggcagcccagccggctccccaacctctaccgaggagggcacctctgagtccgccacccccgagagcggccctggcacctccaccgagcccagcgagggcagcgcacccggcagccctgccggcagccccacctccacagaggagggaaccagcaccgagcccagcgaaggcagcgccccaggcaccagcaccgagcctagtgagggcggctctggcggcggcagcgcccaggagattaaacggatcaacaagatcagaagaagacttgtgaaagacagcaacaccaagaaggccggcaagacaggccccatgaaaaccctgctggttagagtgatgacacccgatctgagagagcggctggaaaacctgagaaagaagcctgaaaatatcccccagcccatcagcaatacatctagagccaacctgaataagctgctgaccgattacaccgaaatgaagaaggcgatcctgcatgtgtactgggaagagttccagaaggaccctgtgggcctgatgagccgggtggcccagcctgccagcaagaagatcgatcagaacaagctgaaacctgagatggacgagaagggcaacctgaccaccgccggctttgcctgctctcagtgtggccagcccctgttcgtgtacaagctggagcaggtgtctgagaagggcaaggcttacaccaactacttcggacggtgcaatgtggccgagcacgaaaagctgatcctgctggcccagctgaagcccgagaaggatagcgacgaagccgtgacatatagcctgggaaagtttgggcagagggccctggatttctacagcattcatgtgaccaaggagtccacccaccccgtgaagcccctggcccagatcgccggaaacagatacgcctccggacctgtgggaaaggccctgagcgacgcatgtatgggcacaatcgcctccttcctgtctaagtaccaggacatcatcatcgaacaccagaaggtggtgaagggcaaccagaagagactggagagcctgcgggagctggccggcaaggaaaacctggaataccctagcgtgaccctgccacctcagcctcacaccaaggagggcgttgatgcctacaacgaagtgatcgcccgggtgcgaatgtgggtgaacctgaacctgtggcagaagctgaagctaagcagagatgatgccaagcctctgctgagactgaagggattcccttcctttcctctggtcgagagacaggccaacgaagtggactggtgggacatggtgtgtaacgtgaagaagctgatcaacgagaaaaaggaggatggcaaggtgttttggcagaatctggctggctacaagagacaggaagccctgagaccatacctgagcagcgaggaagatcggaagaagggaaagaaattcgctcggtaccagctgggcgacctgctgctgcacctggaaaagaagcacggcgaggactggggaaaggtgtacgacgaggcctgggagcggattgacaagaaagtggaaggcctgagcaagcacatcaagctggaagaggaacggagaagcgaggacgcccagagcaaggccgccctgaccgactggctgcgggctaaggccagcttcgtgatcgagggcctgaaggaggccgacaaggacgagttctgcagatgcgagctgaagctgcagaagtggtacggggacctgcggggaaagcccttcgccatcgaagccgagaacagcatcctggacatcagcggcttcagcaagcagtacaactgtgccttcatctggcagaaggacggcgtgaagaagctgaacctgtacctgatcatcaactacttcaagggcggcaagctgcggttcaagaagatcaaacctgaagccttcgaagccaacagattctacaccgtgatcaacaaaaagagcggcgagatcgtgcccatggaggtgaacttcaacttcgacgaccccaacctgatcatcctgcctctggcctttggcaagagacagggcagagaattcatctggaacgacctgctgtccctggaaaccggcagcctgaagctggccaacggaagagtgatcgagaagacactgtacaacagaagaacccggcaggatgagcctgccctgttcgtggccctgaccttcgagcggcgggaggtcctggactcctccaatatcaaaccaatgaacctgatcggcgtggcaagaggcgaaaacatccccgccgtgatcgccctgaccgaccccgagggctgcccactgagccggtttaaggatagcctgggaaacccaacccacatcctgagaatcggcgagagctataaggagaagcagcggaccatccaggccaagaaggaggtggagcagcggagagccggcggctacagccggaagtacgccagcaaagccaagaatctggcagacgatatggtgagaaacaccgctagagatctgctgtactacgccgtgacccaggatgccatgctgatcttcgccaacctgagccggggcttcggccggcagggcaagcggaccttcatggccgagagacagtacacacggatggaggactggctgaccgccaagctggcctacgagggcctgagcaagacctacctgtccaagacactggcccagtacacctccaagacatgcagcaactgtgggtttaccatcaccagcgccgactacgacagggtgctggagaagctgaagaagacagcaacaggctggatgaccacaattaacggcaaggagctgaaggtggagggccagattacctactacaacagatacaagagacagaacgtagtcaaggacctgtccgtcgagctggatagactgagcgaagaatctgtgaacaacgacatctcctcctggacaaagggcagaagcggagaagctctgagcctcctgaagaaaagattctcccatagacccgtgcaggagaagttcgtgtgcctgaactgcggcttcgagacacacgcagccgagcaagccgccctgaacatcgccagatcctggctgttcctgcggagccaggagtacaagaaataccagacaaacaagacaaccggcaacaccgataagagagccttcgtcgagacctggcagtccttttaccggaagaagcttaaggaggtgtggaaacctgccgtgcggtctggcggatctggcggaggctccacaagcagccagggcctgctgaccttcaaggacgtggccatcgagttcagccccgaggagtgggagtacctggaccccccccagaggatgctgtacaggaccgtgatgctggagaaccacaggaacctggtgttcctgggcctggccgtgagcaagcccgacctgatcatgtgcctggagcagaggagggagccctggaacgtgaagagccacagcaagctggccaagagccccgccgtgaccagccacaccagccccaagaaaaagagaaaagtctaagctgccttctgcggggcttgccttctggccatgcccttcttctctcccttgcacctgtacctcttggtctttgaataaagcctgagtaggaaggctagcaaaaaaaaaaaaaaaaaaaaaaaaaaaaaaaaaaaaaaaaaaaaaaaaaaaaaaaaaaaaaaaaaaaaaaaaaaaaaaaa

SEQ ID NO: 2849 - RNA, 5419 nt, synthetic construct
  source 1..5419: mol_type = other RNA
aggaaataagagagaaaagaagagtaagaagaaatataagagccaccatggcccctaagaagaagcgtaaagtgagccgggtgaacggcagcggcagcggcggcggcatgaaccacgaccaggagttcgacccccctaaggtgtaccctcccgtccccgccgagaagagaaagcccatccgggtcctgagcctgttcgatggcatcgccaccggtctgctggtgctgaaggacctgggcatccaggtggataggtacattgcctccgaggtgtgcgaggactccatcaccgtgggaatggtgcgtcatcagggcaagatcatgtacgtgggcgacgtgcggagcgtgacacagaagcatatccaggagtggggccctttcgacctggtgatcggcggcagcccttgcaatgacctgagcatcgtgaacccagcccggaagggcctgtacgagggaaccggcagactgttcttcgagttttacagactgctgcacgacgcccggcctaaggaaggcgacgaccggcccttcttttggctgttcgagaatgtggtggccatgggagtcagcgacaagcgggatattagccggttcctggagagcaaccccgtgatgatcgatgccaaggaagtgagcgccgcccaccgggccagatacttctggggcaatctgcctggcatgaacagacccctggccagcaccgtgaacgacaagctggagctgcaggagtgcctggagcacggccggatcgccaagttcagcaaggtgagaaccatcaccacccgaagcaacagcatcaaacaaggcaaggaccagcactttcctgtgttcatgaacgagaaggaggacatcctgtggtgtaccgagatggagagagtgttcgggttcccagtccactacacagatgtcagcaacatgtctagactggccagacagagactgctgggaagaagctggtccgtccctgtgatcagacacctgttcgcccctctgaaggagtacttcgcctgcgtgagcagcggcaacagcaacgccaacagccggggccccagcttctctagcggcctggtgccactgtccctgagagggagccacatgggccccatggagatctacaaaaccgtgagcgcctggaagcggcagcctgtgcgcgtgctgagcctgtttcggaatatcgataaagtcctgaaaagcctgggattcctggagagcggctctggctccggcggtggcaccctgaagtacgtggaggatgtgacaaacgtggtcagacgggatgtggagaagtggggccccttcgatctggtgtacggcagcacccaacccctgggcagctcttgtgaccggtgccctggctggtacatgtttcagttccaccggatcctgcagtacgccctgccgagacaggagtcccagcggccattcttttggattttcatggacaacttgctgctgaccgaggatgaccaggaaactaccactcggttcctgcagaccgaagccgtgaccctgcaggacgtgagaggccgggactaccagaacgccatgcgggtgtggtccaacatccctggactgaaaagcaagcacgcacctctgacccctaaagaagaggagtacctgcaggcccaggtgcggagcagaagcaagctggacgcccctaaggtggatctgctggtgaagaattgcctcctgcccctgagagagtacttcaagtatttcagccagaatagtctgcccctgggcggcccaagcagcggcgcccctcctcccagcggcggcagcccagccggctccccaacctctaccgaggagggcacctctgagtccgccacccccgagagcggccctggcacctccaccgagcccagcgagggcagcgcacccggcagccctgccggcagccccacctccacagaggagggaaccagcaccgagcccagcgaaggcagcgccccaggcaccagcaccgagcctagtgagggcggctctggcggcggcagcgcccaggagattaaacggatcaacaagatcagaagaagacttgtgaaagacagcaacaccaagaaggccggcaagacaggccccatgaaaaccctgctggttagagtgatgacacccgatctgagagagcggctggaaaacctgagaaagaagcctgaaaatatcccccagcccatcagcaatacatctagagccaacctgaataagctgctgaccgattacaccgaaatgaagaaggcgatcctgcatgtgtactgggaagagttccagaaggaccctgtgggcctgatgagccgggtggcccagcctgccagcaagaagatcgatcagaacaagctgaaacctgagatggacgagaagggcaacctgaccaccgccggctttgcctgctctcagtgtggccagcccctgttcgtgtacaagctggagcaggtgtctgagaagggcaaggcttacaccaactacttcggacggtgcaatgtggccgagcacgaaaagctgatcctgctggcccagctgaagcccgagaaggatagcgacgaagccgtgacatatagcctgggaaagtttgggcagagggccctggatttctacagcattcatgtgaccaaggagtccacccaccccgtgaagcccctggcccagatcgccggaaacagatacgcctccggacctgtgggaaaggccctgagcgacgcatgtatgggcacaatcgcctccttcctgtctaagtaccaggacatcatcatcgaacaccagaaggtggtgaagggcaaccagaagagactggagagcctgcgggagctggccggcaaggaaaacctggaataccctagcgtgaccctgccacctcagcctcacaccaaggagggcgttgatgcctacaacgaagtgatcgcccgggtgcgaatgtgggtgaacctgaacctgtggcagaagctgaagctaagcagagatgatgccaagcctctgctgagactgaagggattcccttcctttcctctggtcgagagacaggccaacgaagtggactggtgggacatggtgtgtaacgtgaagaagctgatcaacgagaaaaaggaggatggcaaggtgttttggcagaatctggctggctacaagagacaggaagccctgagaccatacctgagcagcgaggaagatcggaagaagggaaagaaattcgctcggtaccagctgggcgacctgctgctgcacctggaaaagaagcacggcgaggactggggaaaggtgtacgacgaggcctgggagcggattgacaagaaagtggaaggcctgagcaagcacatcaagctggaagaggaacggagaagcgaggacgcccagagcaaggccgccctgaccgactggctgcgggctaaggccagcttcgtgatcgagggcctgaaggaggccgacaaggacgagttctgcagatgcgagctgaagctgcagaagtggtacggggacctgcggggaaagcccttcgccatcgaagccgagaacagcatcctggacatcagcggcttcagcaagcagtacaactgtgccttcatctggcagaaggacggcgtgaagaagctgaacctgtacctgatcatcaactacttcaagggcggcaagctgcggttcaagaagatcaaacctgaagccttcgaagccaacagattctacaccgtgatcaacaaaaagagcggcgagatcgtgcccatggaggtgaacttcaacttcgacgaccccaacctgatcatcctgcctctggcctttggcaagagacagggcagagaattcatctggaacgacctgctgtccctggaaaccggcagcctgaagctggccaacggaagagtgatcgagaagacactgtacaacagaagaacccggcaggatgagcctgccctgttcgtggccctgaccttcgagcggcgggaggtcctggactcctccaatatcaaaccaatgaacctgatcggcgtggcaagaggcgaaaacatccccgccgtgatcgccctgaccgaccccgagggctgcccactgagccggtttaaggatagcctgggaaacccaacccacatcctgagaatcggcgagagctataaggagaagcagcggaccatccaggccaagaaggaggtggagcagcggagagccggcggctacagccggaagtacgccagcaaagccaagaatctggcagacgatatggtgagaaacaccgctagagatctgctgtactacgccgtgacccaggatgccatgctgatcttcgccaacctgagccggggcttcggccggcagggcaagcggaccttcatggccgagagacagtacacacggatggaggactggctgaccgccaagctggcctacgagggcctgagcaagacctacctgtccaagacactggcccagtacacctccaagacatgcagcaactgtgggtttaccatcaccagcgccgactacgacagggtgctggagaagctgaagaagacagcaacaggctggatgaccacaattaacggcaaggagctgaaggtggagggccagattacctactacaacagatacaagagacagaacgtagtcaaggacctgtccgtcgagctggatagactgagcgaagaatctgtgaacaacgacatctcctcctggacaaagggcagaagcggagaagctctgagcctcctgaagaaaagattctcccatagacccgtgcaggagaagttcgtgtgcctgaactgcggcttcgagacacacgcagccgagcaagccgccctgaacatcgccagatcctggctgttcctgcggagccaggagtacaagaaataccagacaaacaagacaaccggcaacaccgataagagagccttcgtcgagacctggcagtccttttaccggaagaagcttaaggaggtgtggaaacctgccgtgcggtctggcggatctggcggaggctccacaagcagccaggagcccgtgaccttcgaggacgtggccgtgtacttcacccagaaccagtgggccagcctggaccccatgcagagggccctgtacctggaggtgatgctggagaactacgccaacatcaccagcctggccgccctgcccttccccaagcccgacctgatcctgcagctggagcagggcggcgccccctggggcctggacccctggacccccctggagggcgaggccctgggcggcgtgaccagccccaagaaaaagagaaaagtctaagctgccttctgcggggcttgccttctggccatgcccttcttctctcccttgcacctgtacctcttggtctttgaataaagcctgagtaggaaggctagcaaaaaaaaaaaaaaaaaaaaaaaaaaaaaaaaaaaaaaaaaaaaaaaaaaaaaaaaaaaaaaaaaaaaaaaaaaaaaaaa

SEQ ID NO: 2850 - RNA, 5419 nt, synthetic construct
  source 1..5419: mol_type = other RNA
aggaaataagagagaaaagaagagtaagaagaaatataagagccaccatggcccctaagaagaagcgtaaagtgagccgggtgaacggcagcggcagcggcggcggcatgaaccacgaccaggagttcgacccccctaaggtgtaccctcccgtccccgccgagaagagaaagcccatccgggtcctgagcctgttcgatggcatcgccaccggtctgctggtgctgaaggacctgggcatccaggtggataggtacattgcctccgaggtgtgcgaggactccatcaccgtgggaatggtgcgtcatcagggcaagatcatgtacgtgggcgacgtgcggagcgtgacacagaagcatatccaggagtggggccctttcgacctggtgatcggcggcagcccttgcaatgacctgagcatcgtgaacccagcccggaagggcctgtacgagggaaccggcagactgttcttcgagttttacagactgctgcacgacgcccggcctaaggaaggcgacgaccggcccttcttttggctgttcgagaatgtggtggccatgggagtcagcgacaagcgggatattagccggttcctggagagcaaccccgtgatgatcgatgccaaggaagtgagcgccgcccaccgggccagatacttctggggcaatctgcctggcatgaacagacccctggccagcaccgtgaacgacaagctggagctgcaggagtgcctggagcacggccggatcgccaagttcagcaaggtgagaaccatcaccacccgaagcaacagcatcaaacaaggcaaggaccagcactttcctgtgttcatgaacgagaaggaggacatcctgtggtgtaccgagatggagagagtgttcgggttcccagtccactacacagatgtcagcaacatgtctagactggccagacagagactgctgggaagaagctggtccgtccctgtgatcagacacctgttcgcccctctgaaggagtacttcgcctgcgtgagcagcggcaacagcaacgccaacagccggggccccagcttctctagcggcctggtgccactgtccctgagagggagccacatgggccccatggagatctacaaaaccgtgagcgcctggaagcggcagcctgtgcgcgtgctgagcctgtttcggaatatcgataaagtcctgaaaagcctgggattcctggagagcggctctggctccggcggtggcaccctgaagtacgtggaggatgtgacaaacgtggtcagacgggatgtggagaagtggggccccttcgatctggtgtacggcagcacccaacccctgggcagctcttgtgaccggtgccctggctggtacatgtttcagttccaccggatcctgcagtacgccctgccgagacaggagtcccagcggccattcttttggattttcatggacaacttgctgctgaccgaggatgaccaggaaactaccactcggttcctgcagaccgaagccgtgaccctgcaggacgtgagaggccgggactaccagaacgccatgcgggtgtggtccaacatccctggactgaaaagcaagcacgcacctctgacccctaaagaagaggagtacctgcaggcccaggtgcggagcagaagcaagctggacgcccctaaggtggatctgctggtgaagaattgcctcctgcccctgagagagtacttcaagtatttcagccagaatagtctgcccctgggcggcccaagcagcggcgcccctcctcccagcggcggcagcccagccggctccccaacctctaccgaggagggcacctctgagtccgccacccccgagagcggccctggcacctccaccgagcccagcgagggcagcgcacccggcagccctgccggcagccccacctccacagaggagggaaccagcaccgagcccagcgaaggcagcgccccaggcaccagcaccgagcctagtgagggcggctctggcggcggcagcgcccaggagattaaacggatcaacaagatcagaagaagacttgtgaaagacagcaacaccaagaaggccggcaagacaggccccatgaaaaccctgctggttagagtgatgacacccgatctgagagagcggctggaaaacctgagaaagaagcctgaaaatatcccccagcccatcagcaatacatctagagccaacctgaataagctgctgaccgattacaccgaaatgaagaaggcgatcctgcatgtgtactgggaagagttccagaaggaccctgtgggcctgatgagccgggtggcccagcctgccagcaagaagatcgatcagaacaagctgaaacctgagatggacgagaagggcaacctgaccaccgccggctttgcctgctctcagtgtggccagcccctgttcgtgtacaagctggagcaggtgtctgagaagggcaaggcttacaccaactacttcggacggtgcaatgtggccgagcacgaaaagctgatcctgctggcccagctgaagcccgagaaggatagcgacgaagccgtgacatatagcctgggaaagtttgggcagagggccctggatttctacagcattcatgtgaccaaggagtccacccaccccgtgaagcccctggcccagatcgccggaaacagatacgcctccggacctgtgggaaaggccctgagcgacgcatgtatgggcacaatcgcctccttcctgtctaagtaccaggacatcatcatcgaacaccagaaggtggtgaagggcaaccagaagagactggagagcctgcgggagctggccggcaaggaaaacctggaataccctagcgtgaccctgccacctcagcctcacaccaaggagggcgttgatgcctacaacgaagtgatcgcccgggtgcgaatgtgggtgaacctgaacctgtggcagaagctgaagctaagcagagatgatgccaagcctctgctgagactgaagggattcccttcctttcctctggtcgagagacaggccaacgaagtggactggtgggacatggtgtgtaacgtgaagaagctgatcaacgagaaaaaggaggatggcaaggtgttttggcagaatctggctggctacaagagacaggaagccctgagaccatacctgagcagcgaggaagatcggaagaagggaaagaaattcgctcggtaccagctgggcgacctgctgctgcacctggaaaagaagcacggcgaggactggggaaaggtgtacgacgaggcctgggagcggattgacaagaaagtggaaggcctgagcaagcacatcaagctggaagaggaacggagaagcgaggacgcccagagcaaggccgccctgaccgactggctgcgggctaaggccagcttcgtgatcgagggcctgaaggaggccgacaaggacgagttctgcagatgcgagctgaagctgcagaagtggtacggggacctgcggggaaagcccttcgccatcgaagccgagaacagcatcctggacatcagcggcttcagcaagcagtacaactgtgccttcatctggcagaaggacggcgtgaagaagctgaacctgtacctgatcatcaactacttcaagggcggcaagctgcggttcaagaagatcaaacctgaagccttcgaagccaacagattctacaccgtgatcaacaaaaagagcggcgagatcgtgcccatggaggtgaacttcaacttcgacgaccccaacctgatcatcctgcctctggcctttggcaagagacagggcagagaattcatctggaacgacctgctgtccctggaaaccggcagcctgaagctggccaacggaagagtgatcgagaagacactgtacaacagaagaacccggcaggatgagcctgccctgttcgtggccctgaccttcgagcggcgggaggtcctggactcctccaatatcaaaccaatgaacctgatcggcgtggcaagaggcgaaaacatccccgccgtgatcgccctgaccgaccccgagggctgcccactgagccggtttaaggatagcctgggaaacccaacccacatcctgagaatcggcgagagctataaggagaagcagcggaccatccaggccaagaaggaggtggagcagcggagagccggcggctacagccggaagtacgccagcaaagccaagaatctggcagacgatatggtgagaaacaccgctagagatctgctgtactacgccgtgacccaggatgccatgctgatcttcgccaacctgagccggggcttcggccggcagggcaagcggaccttcatggccgagagacagtacacacggatggaggactggctgaccgccaagctggcctacgagggcctgagcaagacctacctgtccaagacactggcccagtacacctccaagacatgcagcaactgtgggtttaccatcaccagcgccgactacgacagggtgctggagaagctgaagaagacagcaacaggctggatgaccacaattaacggcaaggagctgaaggtggagggccagattacctactacaacagatacaagagacagaacgtagtcaaggacctgtccgtcgagctggatagactgagcgaagaatctgtgaacaacgacatctcctcctggacaaagggcagaagcggagaagctctgagcctcctgaagaaaagattctcccatagacccgtgcaggagaagttcgtgtgcctgaactgcggcttcgagacacacgcagccgagcaagccgccctgaacatcgccagatcctggctgttcctgcggagccaggagtacaagaaataccagacaaacaagacaaccggcaacaccgataagagagccttcgtcgagacctggcagtccttttaccggaagaagcttaaggaggtgtggaaacctgccgtgcggtctggcggatctggcggaggctccacaagcctgcagggcctgctgaccttcagggacgtggccatcgagttcagccaggaggagtggggctgcctgagccacacccagagggagctgtacagggacgtgatgctggagaactacggccacctgctgttcagcggcctgatcgccagcaagcccgacctggtgagctgcctggagcagaagaaggagccctgggacctgaagaggaagaagaccgtggccatccaccccgtgtacgagctgaagaccagccccaagaaaaagagaaaagtctaagctgccttctgcggggcttgccttctggccatgcccttcttctctcccttgcacctgtacctcttggtctttgaataaagcctgagtaggaaggctagcaaaaaaaaaaaaaaaaaaaaaaaaaaaaaaaaaaaaaaaaaaaaaaaaaaaaaaaaaaaaaaaaaaaaaaaaaaaaaaaa

SEQ ID NO: 2851 - RNA, 5419 nt, synthetic construct
  source 1..5419: mol_type = other RNA
aggaaataagagagaaaagaagagtaagaagaaatataagagccaccatggcccctaagaagaagcgtaaagtgagccgggtgaacggcagcggcagcggcggcggcatgaaccacgaccaggagttcgacccccctaaggtgtaccctcccgtccccgccgagaagagaaagcccatccgggtcctgagcctgttcgatggcatcgccaccggtctgctggtgctgaaggacctgggcatccaggtggataggtacattgcctccgaggtgtgcgaggactccatcaccgtgggaatggtgcgtcatcagggcaagatcatgtacgtgggcgacgtgcggagcgtgacacagaagcatatccaggagtggggccctttcgacctggtgatcggcggcagcccttgcaatgacctgagcatcgtgaacccagcccggaagggcctgtacgagggaaccggcagactgttcttcgagttttacagactgctgcacgacgcccggcctaaggaaggcgacgaccggcccttcttttggctgttcgagaatgtggtggccatgggagtcagcgacaagcgggatattagccggttcctggagagcaaccccgtgatgatcgatgccaaggaagtgagcgccgcccaccgggccagatacttctggggcaatctgcctggcatgaacagacccctggccagcaccgtgaacgacaagctggagctgcaggagtgcctggagcacggccggatcgccaagttcagcaaggtgagaaccatcaccacccgaagcaacagcatcaaacaaggcaaggaccagcactttcctgtgttcatgaacgagaaggaggacatcctgtggtgtaccgagatggagagagtgttcgggttcccagtccactacacagatgtcagcaacatgtctagactggccagacagagactgctgggaagaagctggtccgtccctgtgatcagacacctgttcgcccctctgaaggagtacttcgcctgcgtgagcagcggcaacagcaacgccaacagccggggccccagcttctctagcggcctggtgccactgtccctgagagggagccacatgggccccatggagatctacaaaaccgtgagcgcctggaagcggcagcctgtgcgcgtgctgagcctgtttcggaatatcgataaagtcctgaaaagcctgggattcctggagagcggctctggctccggcggtggcaccctgaagtacgtggaggatgtgacaaacgtggtcagacgggatgtggagaagtggggccccttcgatctggtgtacggcagcacccaacccctgggcagctcttgtgaccggtgccctggctggtacatgtttcagttccaccggatcctgcagtacgccctgccgagacaggagtcccagcggccattcttttggattttcatggacaacttgctgctgaccgaggatgaccaggaaactaccactcggttcctgcagaccgaagccgtgaccctgcaggacgtgagaggccgggactaccagaacgccatgcgggtgtggtccaacatccctggactgaaaagcaagcacgcacctctgacccctaaagaagaggagtacctgcaggcccaggtgcggagcagaagcaagctggacgcccctaaggtggatctgctggtgaagaattgcctcctgcccctgagagagtacttcaagtatttcagccagaatagtctgcccctgggcggcccaagcagcggcgcccctcctcccagcggcggcagcccagccggctccccaacctctaccgaggagggcacctctgagtccgccacccccgagagcggccctggcacctccaccgagcccagcgagggcagcgcacccggcagccctgccggcagccccacctccacagaggagggaaccagcaccgagcccagcgaaggcagcgccccaggcaccagcaccgagcctagtgagggcggctctggcggcggcagcgcccaggagattaaacggatcaacaagatcagaagaagacttgtgaaagacagcaacaccaagaaggccggcaagacaggccccatgaaaaccctgctggttagagtgatgacacccgatctgagagagcggctggaaaacctgagaaagaagcctgaaaatatcccccagcccatcagcaatacatctagagccaacctgaataagctgctgaccgattacaccgaaatgaagaaggcgatcctgcatgtgtactgggaagagttccagaaggaccctgtgggcctgatgagccgggtggcccagcctgccagcaagaagatcgatcagaacaagctgaaacctgagatggacgagaagggcaacctgaccaccgccggctttgcctgctctcagtgtggccagcccctgttcgtgtacaagctggagcaggtgtctgagaagggcaaggcttacaccaactacttcggacggtgcaatgtggccgagcacgaaaagctgatcctgctggcccagctgaagcccgagaaggatagcgacgaagccgtgacatatagcctgggaaagtttgggcagagggccctggatttctacagcattcatgtgaccaaggagtccacccaccccgtgaagcccctggcccagatcgccggaaacagatacgcctccggacctgtgggaaaggccctgagcgacgcatgtatgggcacaatcgcctccttcctgtctaagtaccaggacatcatcatcgaacaccagaaggtggtgaagggcaaccagaagagactggagagcctgcgggagctggccggcaaggaaaacctggaataccctagcgtgaccctgccacctcagcctcacaccaaggagggcgttgatgcctacaacgaagtgatcgcccgggtgcgaatgtgggtgaacctgaacctgtggcagaagctgaagctaagcagagatgatgccaagcctctgctgagactgaagggattcccttcctttcctctggtcgagagacaggccaacgaagtggactggtgggacatggtgtgtaacgtgaagaagctgatcaacgagaaaaaggaggatggcaaggtgttttggcagaatctggctggctacaagagacaggaagccctgagaccatacctgagcagcgaggaagatcggaagaagggaaagaaattcgctcggtaccagctgggcgacctgctgctgcacctggaaaagaagcacggcgaggactggggaaaggtgtacgacgaggcctgggagcggattgacaagaaagtggaaggcctgagcaagcacatcaagctggaagaggaacggagaagcgaggacgcccagagcaaggccgccctgaccgactggctgcgggctaaggccagcttcgtgatcgagggcctgaaggaggccgacaaggacgagttctgcagatgcgagctgaagctgcagaagtggtacggggacctgcggggaaagcccttcgccatcgaagccgagaacagcatcctggacatcagcggcttcagcaagcagtacaactgtgccttcatctggcagaaggacggcgtgaagaagctgaacctgtacctgatcatcaactacttcaagggcggcaagctgcggttcaagaagatcaaacctgaagccttcgaagccaacagattctacaccgtgatcaacaaaaagagcggcgagatcgtgcccatggaggtgaacttcaacttcgacgaccccaacctgatcatcctgcctctggcctttggcaagagacagggcagagaattcatctggaacgacctgctgtccctggaaaccggcagcctgaagctggccaacggaagagtgatcgagaagacactgtacaacagaagaacccggcaggatgagcctgccctgttcgtggccctgaccttcgagcggcgggaggtcctggactcctccaatatcaaaccaatgaacctgatcggcgtggcaagaggcgaaaacatccccgccgtgatcgccctgaccgaccccgagggctgcccactgagccggtttaaggatagcctgggaaacccaacccacatcctgagaatcggcgagagctataaggagaagcagcggaccatccaggccaagaaggaggtggagcagcggagagccggcggctacagccggaagtacgccagcaaagccaagaatctggcagacgatatggtgagaaacaccgctagagatctgctgtactacgccgtgacccaggatgccatgctgatcttcgccaacctgagccggggcttcggccggcagggcaagcggaccttcatggccgagagacagtacacacggatggaggactggctgaccgccaagctggcctacgagggcctgagcaagacctacctgtccaagacactggcccagtacacctccaagacatgcagcaactgtgggtttaccatcaccagcgccgactacgacagggtgctggagaagctgaagaagacagcaacaggctggatgaccacaattaacggcaaggagctgaaggtggagggccagattacctactacaacagatacaagagacagaacgtagtcaaggacctgtccgtcgagctggatagactgagcgaagaatctgtgaacaacgacatctcctcctggacaaagggcagaagcggagaagctctgagcctcctgaagaaaagattctcccatagacccgtgcaggagaagttcgtgtgcctgaactgcggcttcgagacacacgcagccgagcaagccgccctgaacatcgccagatcctggctgttcctgcggagccaggagtacaagaaataccagacaaacaagacaaccggcaacaccgataagagagccttcgtcgagacctggcagtccttttaccggaagaagcttaaggaggtgtggaaacctgccgtgcggtctggcggatctggcggaggctccacaagcccccaggagcccgtgaccttcgaggacgtggccgtgctgttcacccccgaggagtggatgttcctggacagcgcccagaggagcctgtacagggacgtgatgctggagaactacaggaacgtggccagcgtgggcgaccagctgggcaagttcagcagcttcagccacctggagcagggcgaggagtggtggcccaccgagaggagggtgttccccggcagctgccccgagcccagcctgcccaccagccccaagaaaaagagaaaagtctaagctgccttctgcggggcttgccttctggccatgcccttcttctctcccttgcacctgtacctcttggtctttgaataaagcctgagtaggaaggctagcaaaaaaaaaaaaaaaaaaaaaaaaaaaaaaaaaaaaaaaaaaaaaaaaaaaaaaaaaaaaaaaaaaaaaaaaaaaaaaaa

SEQ ID NO: 2852 - RNA, 5419 nt, synthetic construct
  source 1..5419: mol_type = other RNA
aggaaataagagagaaaagaagagtaagaagaaatataagagccaccatggcccctaagaagaagcgtaaagtgagccgggtgaacggcagcggcagcggcggcggcatgaaccacgaccaggagttcgacccccctaaggtgtaccctcccgtccccgccgagaagagaaagcccatccgggtcctgagcctgttcgatggcatcgccaccggtctgctggtgctgaaggacctgggcatccaggtggataggtacattgcctccgaggtgtgcgaggactccatcaccgtgggaatggtgcgtcatcagggcaagatcatgtacgtgggcgacgtgcggagcgtgacacagaagcatatccaggagtggggccctttcgacctggtgatcggcggcagcccttgcaatgacctgagcatcgtgaacccagcccggaagggcctgtacgagggaaccggcagactgttcttcgagttttacagactgctgcacgacgcccggcctaaggaaggcgacgaccggcccttcttttggctgttcgagaatgtggtggccatgggagtcagcgacaagcgggatattagccggttcctggagagcaaccccgtgatgatcgatgccaaggaagtgagcgccgcccaccgggccagatacttctggggcaatctgcctggcatgaacagacccctggccagcaccgtgaacgacaagctggagctgcaggagtgcctggagcacggccggatcgccaagttcagcaaggtgagaaccatcaccacccgaagcaacagcatcaaacaaggcaaggaccagcactttcctgtgttcatgaacgagaaggaggacatcctgtggtgtaccgagatggagagagtgttcgggttcccagtccactacacagatgtcagcaacatgtctagactggccagacagagactgctgggaagaagctggtccgtccctgtgatcagacacctgttcgcccctctgaaggagtacttcgcctgcgtgagcagcggcaacagcaacgccaacagccggggccccagcttctctagcggcctggtgccactgtccctgagagggagccacatgggccccatggagatctacaaaaccgtgagcgcctggaagcggcagcctgtgcgcgtgctgagcctgtttcggaatatcgataaagtcctgaaaagcctgggattcctggagagcggctctggctccggcggtggcaccctgaagtacgtggaggatgtgacaaacgtggtcagacgggatgtggagaagtggggccccttcgatctggtgtacggcagcacccaacccctgggcagctcttgtgaccggtgccctggctggtacatgtttcagttccaccggatcctgcagtacgccctgccgagacaggagtcccagcggccattcttttggattttcatggacaacttgctgctgaccgaggatgaccaggaaactaccactcggttcctgcagaccgaagccgtgaccctgcaggacgtgagaggccgggactaccagaacgccatgcgggtgtggtccaacatccctggactgaaaagcaagcacgcacctctgacccctaaagaagaggagtacctgcaggcccaggtgcggagcagaagcaagctggacgcccctaaggtggatctgctggtgaagaattgcctcctgcccctgagagagtacttcaagtatttcagccagaatagtctgcccctgggcggcccaagcagcggcgcccctcctcccagcggcggcagcccagccggctccccaacctctaccgaggagggcacctctgagtccgccacccccgagagcggccctggcacctccaccgagcccagcgagggcagcgcacccggcagccctgccggcagccccacctccacagaggagggaaccagcaccgagcccagcgaaggcagcgccccaggcaccagcaccgagcctagtgagggcggctctggcggcggcagcgcccaggagattaaacggatcaacaagatcagaagaagacttgtgaaagacagcaacaccaagaaggccggcaagacaggccccatgaaaaccctgctggttagagtgatgacacccgatctgagagagcggctggaaaacctgagaaagaagcctgaaaatatcccccagcccatcagcaatacatctagagccaacctgaataagctgctgaccgattacaccgaaatgaagaaggcgatcctgcatgtgtactgggaagagttccagaaggaccctgtgggcctgatgagccgggtggcccagcctgccagcaagaagatcgatcagaacaagctgaaacctgagatggacgagaagggcaacctgaccaccgccggctttgcctgctctcagtgtggccagcccctgttcgtgtacaagctggagcaggtgtctgagaagggcaaggcttacaccaactacttcggacggtgcaatgtggccgagcacgaaaagctgatcctgctggcccagctgaagcccgagaaggatagcgacgaagccgtgacatatagcctgggaaagtttgggcagagggccctggatttctacagcattcatgtgaccaaggagtccacccaccccgtgaagcccctggcccagatcgccggaaacagatacgcctccggacctgtgggaaaggccctgagcgacgcatgtatgggcacaatcgcctccttcctgtctaagtaccaggacatcatcatcgaacaccagaaggtggtgaagggcaaccagaagagactggagagcctgcgggagctggccggcaaggaaaacctggaataccctagcgtgaccctgccacctcagcctcacaccaaggagggcgttgatgcctacaacgaagtgatcgcccgggtgcgaatgtgggtgaacctgaacctgtggcagaagctgaagctaagcagagatgatgccaagcctctgctgagactgaagggattcccttcctttcctctggtcgagagacaggccaacgaagtggactggtgggacatggtgtgtaacgtgaagaagctgatcaacgagaaaaaggaggatggcaaggtgttttggcagaatctggctggctacaagagacaggaagccctgagaccatacctgagcagcgaggaagatcggaagaagggaaagaaattcgctcggtaccagctgggcgacctgctgctgcacctggaaaagaagcacggcgaggactggggaaaggtgtacgacgaggcctgggagcggattgacaagaaagtggaaggcctgagcaagcacatcaagctggaagaggaacggagaagcgaggacgcccagagcaaggccgccctgaccgactggctgcgggctaaggccagcttcgtgatcgagggcctgaaggaggccgacaaggacgagttctgcagatgcgagctgaagctgcagaagtggtacggggacctgcggggaaagcccttcgccatcgaagccgagaacagcatcctggacatcagcggcttcagcaagcagtacaactgtgccttcatctggcagaaggacggcgtgaagaagctgaacctgtacctgatcatcaactacttcaagggcggcaagctgcggttcaagaagatcaaacctgaagccttcgaagccaacagattctacaccgtgatcaacaaaaagagcggcgagatcgtgcccatggaggtgaacttcaacttcgacgaccccaacctgatcatcctgcctctggcctttggcaagagacagggcagagaattcatctggaacgacctgctgtccctggaaaccggcagcctgaagctggccaacggaagagtgatcgagaagacactgtacaacagaagaacccggcaggatgagcctgccctgttcgtggccctgaccttcgagcggcgggaggtcctggactcctccaatatcaaaccaatgaacctgatcggcgtggcaagaggcgaaaacatccccgccgtgatcgccctgaccgaccccgagggctgcccactgagccggtttaaggatagcctgggaaacccaacccacatcctgagaatcggcgagagctataaggagaagcagcggaccatccaggccaagaaggaggtggagcagcggagagccggcggctacagccggaagtacgccagcaaagccaagaatctggcagacgatatggtgagaaacaccgctagagatctgctgtactacgccgtgacccaggatgccatgctgatcttcgccaacctgagccggggcttcggccggcagggcaagcggaccttcatggccgagagacagtacacacggatggaggactggctgaccgccaagctggcctacgagggcctgagcaagacctacctgtccaagacactggcccagtacacctccaagacatgcagcaactgtgggtttaccatcaccagcgccgactacgacagggtgctggagaagctgaagaagacagcaacaggctggatgaccacaattaacggcaaggagctgaaggtggagggccagattacctactacaacagatacaagagacagaacgtagtcaaggacctgtccgtcgagctggatagactgagcgaagaatctgtgaacaacgacatctcctcctggacaaagggcagaagcggagaagctctgagcctcctgaagaaaagattctcccatagacccgtgcaggagaagttcgtgtgcctgaactgcggcttcgagacacacgcagccgagcaagccgccctgaacatcgccagatcctggctgttcctgcggagccaggagtacaagaaataccagacaaacaagacaaccggcaacaccgataagagagccttcgtcgagacctggcagtccttttaccggaagaagcttaaggaggtgtggaaacctgccgtgcggtctggcggatctggcggaggctccacaagcatgctgagcttctgggacgtggccatcgagttcagccccgaggagagggagtgcctggaccccgcccagtggagcctgtacagggacgtgatgctggagaactacagcaacctgctgttcctgggcctggccgtgcccaagccccacctggtgaccttcctggagcagaggcaggagagcagcggcgtgaagaggcaggccgccgccaccgtgcaccccggcaggatccccaacgactacaacaccagccccaagaaaaagagaaaagtctaagctgccttctgcggggcttgccttctggccatgcccttcttctctcccttgcacctgtacctcttggtctttgaataaagcctgagtaggaaggctagcaaaaaaaaaaaaaaaaaaaaaaaaaaaaaaaaaaaaaaaaaaaaaaaaaaaaaaaaaaaaaaaaaaaaaaaaaaaaaaaa

SEQ ID NO: 2853 - RNA, 5419 nt, synthetic construct
  source 1..5419: mol_type = other RNA
aggaaataagagagaaaagaagagtaagaagaaatataagagccaccatggcccctaagaagaagcgtaaagtgagccgggtgaacggcagcggcagcggcggcggcatgaaccacgaccaggagttcgacccccctaaggtgtaccctcccgtccccgccgagaagagaaagcccatccgggtcctgagcctgttcgatggcatcgccaccggtctgctggtgctgaaggacctgggcatccaggtggataggtacattgcctccgaggtgtgcgaggactccatcaccgtgggaatggtgcgtcatcagggcaagatcatgtacgtgggcgacgtgcggagcgtgacacagaagcatatccaggagtggggccctttcgacctggtgatcggcggcagcccttgcaatgacctgagcatcgtgaacccagcccggaagggcctgtacgagggaaccggcagactgttcttcgagttttacagactgctgcacgacgcccggcctaaggaaggcgacgaccggcccttcttttggctgttcgagaatgtggtggccatgggagtcagcgacaagcgggatattagccggttcctggagagcaaccccgtgatgatcgatgccaaggaagtgagcgccgcccaccgggccagatacttctggggcaatctgcctggcatgaacagacccctggccagcaccgtgaacgacaagctggagctgcaggagtgcctggagcacggccggatcgccaagttcagcaaggtgagaaccatcaccacccgaagcaacagcatcaaacaaggcaaggaccagcactttcctgtgttcatgaacgagaaggaggacatcctgtggtgtaccgagatggagagagtgttcgggttcccagtccactacacagatgtcagcaacatgtctagactggccagacagagactgctgggaagaagctggtccgtccctgtgatcagacacctgttcgcccctctgaaggagtacttcgcctgcgtgagcagcggcaacagcaacgccaacagccggggccccagcttctctagcggcctggtgccactgtccctgagagggagccacatgggccccatggagatctacaaaaccgtgagcgcctggaagcggcagcctgtgcgcgtgctgagcctgtttcggaatatcgataaagtcctgaaaagcctgggattcctggagagcggctctggctccggcggtggcaccctgaagtacgtggaggatgtgacaaacgtggtcagacgggatgtggagaagtggggccccttcgatctggtgtacggcagcacccaacccctgggcagctcttgtgaccggtgccctggctggtacatgtttcagttccaccggatcctgcagtacgccctgccgagacaggagtcccagcggccattcttttggattttcatggacaacttgctgctgaccgaggatgaccaggaaactaccactcggttcctgcagaccgaagccgtgaccctgcaggacgtgagaggccgggactaccagaacgccatgcgggtgtggtccaacatccctggactgaaaagcaagcacgcacctctgacccctaaagaagaggagtacctgcaggcccaggtgcggagcagaagcaagctggacgcccctaaggtggatctgctggtgaagaattgcctcctgcccctgagagagtacttcaagtatttcagccagaatagtctgcccctgggcggcccaagcagcggcgcccctcctcccagcggcggcagcccagccggctccccaacctctaccgaggagggcacctctgagtccgccacccccgagagcggccctggcacctccaccgagcccagcgagggcagcgcacccggcagccctgccggcagccccacctccacagaggagggaaccagcaccgagcccagcgaaggcagcgccccaggcaccagcaccgagcctagtgagggcggctctggcggcggcagcgcccaggagattaaacggatcaacaagatcagaagaagacttgtgaaagacagcaacaccaagaaggccggcaagacaggccccatgaaaaccctgctggttagagtgatgacacccgatctgagagagcggctggaaaacctgagaaagaagcctgaaaatatcccccagcccatcagcaatacatctagagccaacctgaataagctgctgaccgattacaccgaaatgaagaaggcgatcctgcatgtgtactgggaagagttccagaaggaccctgtgggcctgatgagccgggtggcccagcctgccagcaagaagatcgatcagaacaagctgaaacctgagatggacgagaagggcaacctgaccaccgccggctttgcctgctctcagtgtggccagcccctgttcgtgtacaagctggagcaggtgtctgagaagggcaaggcttacaccaactacttcggacggtgcaatgtggccgagcacgaaaagctgatcctgctggcccagctgaagcccgagaaggatagcgacgaagccgtgacatatagcctgggaaagtttgggcagagggccctggatttctacagcattcatgtgaccaaggagtccacccaccccgtgaagcccctggcccagatcgccggaaacagatacgcctccggacctgtgggaaaggccctgagcgacgcatgtatgggcacaatcgcctccttcctgtctaagtaccaggacatcatcatcgaacaccagaaggtggtgaagggcaaccagaagagactggagagcctgcgggagctggccggcaaggaaaacctggaataccctagcgtgaccctgccacctcagcctcacaccaaggagggcgttgatgcctacaacgaagtgatcgcccgggtgcgaatgtgggtgaacctgaacctgtggcagaagctgaagctaagcagagatgatgccaagcctctgctgagactgaagggattcccttcctttcctctggtcgagagacaggccaacgaagtggactggtgggacatggtgtgtaacgtgaagaagctgatcaacgagaaaaaggaggatggcaaggtgttttggcagaatctggctggctacaagagacaggaagccctgagaccatacctgagcagcgaggaagatcggaagaagggaaagaaattcgctcggtaccagctgggcgacctgctgctgcacctggaaaagaagcacggcgaggactggggaaaggtgtacgacgaggcctgggagcggattgacaagaaagtggaaggcctgagcaagcacatcaagctggaagaggaacggagaagcgaggacgcccagagcaaggccgccctgaccgactggctgcgggctaaggccagcttcgtgatcgagggcctgaaggaggccgacaaggacgagttctgcagatgcgagctgaagctgcagaagtggtacggggacctgcggggaaagcccttcgccatcgaagccgagaacagcatcctggacatcagcggcttcagcaagcagtacaactgtgccttcatctggcagaaggacggcgtgaagaagctgaacctgtacctgatcatcaactacttcaagggcggcaagctgcggttcaagaagatcaaacctgaagccttcgaagccaacagattctacaccgtgatcaacaaaaagagcggcgagatcgtgcccatggaggtgaacttcaacttcgacgaccccaacctgatcatcctgcctctggcctttggcaagagacagggcagagaattcatctggaacgacctgctgtccctggaaaccggcagcctgaagctggccaacggaagagtgatcgagaagacactgtacaacagaagaacccggcaggatgagcctgccctgttcgtggccctgaccttcgagcggcgggaggtcctggactcctccaatatcaaaccaatgaacctgatcggcgtggcaagaggcgaaaacatccccgccgtgatcgccctgaccgaccccgagggctgcccactgagccggtttaaggatagcctgggaaacccaacccacatcctgagaatcggcgagagctataaggagaagcagcggaccatccaggccaagaaggaggtggagcagcggagagccggcggctacagccggaagtacgccagcaaagccaagaatctggcagacgatatggtgagaaacaccgctagagatctgctgtactacgccgtgacccaggatgccatgctgatcttcgccaacctgagccggggcttcggccggcagggcaagcggaccttcatggccgagagacagtacacacggatggaggactggctgaccgccaagctggcctacgagggcctgagcaagacctacctgtccaagacactggcccagtacacctccaagacatgcagcaactgtgggtttaccatcaccagcgccgactacgacagggtgctggagaagctgaagaagacagcaacaggctggatgaccacaattaacggcaaggagctgaaggtggagggccagattacctactacaacagatacaagagacagaacgtagtcaaggacctgtccgtcgagctggatagactgagcgaagaatctgtgaacaacgacatctcctcctggacaaagggcagaagcggagaagctctgagcctcctgaagaaaagattctcccatagacccgtgcaggagaagttcgtgtgcctgaactgcggcttcgagacacacgcagccgagcaagccgccctgaacatcgccagatcctggctgttcctgcggagccaggagtacaagaaataccagacaaacaagacaaccggcaacaccgataagagagccttcgtcgagacctggcagtccttttaccggaagaagcttaaggaggtgtggaaacctgccgtgcggtctggcggatctggcggaggctccacaagcgccctgggcagcgtgaccttcagggacgtggccgtgttcttcagccaggacgagtggctgcacctggacagcgcccagaagaccctgtaccaggaggtgatgctggagaactacagcaccctggtgagcctgggcatccccttcagcatgcccaaggtgatctgccagctgcagcagggcgaggacccctgcatggtggagggcgaggccctgagggacccctgcctggacttcaagacctggaccagccccaagaaaaagagaaaagtctaagctgccttctgcggggcttgccttctggccatgcccttcttctctcccttgcacctgtacctcttggtctttgaataaagcctgagtaggaaggctagcaaaaaaaaaaaaaaaaaaaaaaaaaaaaaaaaaaaaaaaaaaaaaaaaaaaaaaaaaaaaaaaaaaaaaaaaaaaaaaaa

SEQ ID NO: 2854 - RNA, 5419 nt, synthetic construct
  source 1..5419: mol_type = other RNA
aggaaataagagagaaaagaagagtaagaagaaatataagagccaccatggcccctaagaagaagcgtaaagtgagccgggtgaacggcagcggcagcggcggcggcatgaaccacgaccaggagttcgacccccctaaggtgtaccctcccgtccccgccgagaagagaaagcccatccgggtcctgagcctgttcgatggcatcgccaccggtctgctggtgctgaaggacctgggcatccaggtggataggtacattgcctccgaggtgtgcgaggactccatcaccgtgggaatggtgcgtcatcagggcaagatcatgtacgtgggcgacgtgcggagcgtgacacagaagcatatccaggagtggggccctttcgacctggtgatcggcggcagcccttgcaatgacctgagcatcgtgaacccagcccggaagggcctgtacgagggaaccggcagactgttcttcgagttttacagactgctgcacgacgcccggcctaaggaaggcgacgaccggcccttcttttggctgttcgagaatgtggtggccatgggagtcagcgacaagcgggatattagccggttcctggagagcaaccccgtgatgatcgatgccaaggaagtgagcgccgcccaccgggccagatacttctggggcaatctgcctggcatgaacagacccctggccagcaccgtgaacgacaagctggagctgcaggagtgcctggagcacggccggatcgccaagttcagcaaggtgagaaccatcaccacccgaagcaacagcatcaaacaaggcaaggaccagcactttcctgtgttcatgaacgagaaggaggacatcctgtggtgtaccgagatggagagagtgttcgggttcccagtccactacacagatgtcagcaacatgtctagactggccagacagagactgctgggaagaagctggtccgtccctgtgatcagacacctgttcgcccctctgaaggagtacttcgcctgcgtgagcagcggcaacagcaacgccaacagccggggccccagcttctctagcggcctggtgccactgtccctgagagggagccacatgggccccatggagatctacaaaaccgtgagcgcctggaagcggcagcctgtgcgcgtgctgagcctgtttcggaatatcgataaagtcctgaaaagcctgggattcctggagagcggctctggctccggcggtggcaccctgaagtacgtggaggatgtgacaaacgtggtcagacgggatgtggagaagtggggccccttcgatctggtgtacggcagcacccaacccctgggcagctcttgtgaccggtgccctggctggtacatgtttcagttccaccggatcctgcagtacgccctgccgagacaggagtcccagcggccattcttttggattttcatggacaacttgctgctgaccgaggatgaccaggaaactaccactcggttcctgcagaccgaagccgtgaccctgcaggacgtgagaggccgggactaccagaacgccatgcgggtgtggtccaacatccctggactgaaaagcaagcacgcacctctgacccctaaagaagaggagtacctgcaggcccaggtgcggagcagaagcaagctggacgcccctaaggtggatctgctggtgaagaattgcctcctgcccctgagagagtacttcaagtatttcagccagaatagtctgcccctgggcggcccaagcagcggcgcccctcctcccagcggcggcagcccagccggctccccaacctctaccgaggagggcacctctgagtccgccacccccgagagcggccctggcacctccaccgagcccagcgagggcagcgcacccggcagccctgccggcagccccacctccacagaggagggaaccagcaccgagcccagcgaaggcagcgccccaggcaccagcaccgagcctagtgagggcggctctggcggcggcagcgcccaggagattaaacggatcaacaagatcagaagaagacttgtgaaagacagcaacaccaagaaggccggcaagacaggccccatgaaaaccctgctggttagagtgatgacacccgatctgagagagcggctggaaaacctgagaaagaagcctgaaaatatcccccagcccatcagcaatacatctagagccaacctgaataagctgctgaccgattacaccgaaatgaagaaggcgatcctgcatgtgtactgggaagagttccagaaggaccctgtgggcctgatgagccgggtggcccagcctgccagcaagaagatcgatcagaacaagctgaaacctgagatggacgagaagggcaacctgaccaccgccggctttgcctgctctcagtgtggccagcccctgttcgtgtacaagctggagcaggtgtctgagaagggcaaggcttacaccaactacttcggacggtgcaatgtggccgagcacgaaaagctgatcctgctggcccagctgaagcccgagaaggatagcgacgaagccgtgacatatagcctgggaaagtttgggcagagggccctggatttctacagcattcatgtgaccaaggagtccacccaccccgtgaagcccctggcccagatcgccggaaacagatacgcctccggacctgtgggaaaggccctgagcgacgcatgtatgggcacaatcgcctccttcctgtctaagtaccaggacatcatcatcgaacaccagaaggtggtgaagggcaaccagaagagactggagagcctgcgggagctggccggcaaggaaaacctggaataccctagcgtgaccctgccacctcagcctcacaccaaggagggcgttgatgcctacaacgaagtgatcgcccgggtgcgaatgtgggtgaacctgaacctgtggcagaagctgaagctaagcagagatgatgccaagcctctgctgagactgaagggattcccttcctttcctctggtcgagagacaggccaacgaagtggactggtgggacatggtgtgtaacgtgaagaagctgatcaacgagaaaaaggaggatggcaaggtgttttggcagaatctggctggctacaagagacaggaagccctgagaccatacctgagcagcgaggaagatcggaagaagggaaagaaattcgctcggtaccagctgggcgacctgctgctgcacctggaaaagaagcacggcgaggactggggaaaggtgtacgacgaggcctgggagcggattgacaagaaagtggaaggcctgagcaagcacatcaagctggaagaggaacggagaagcgaggacgcccagagcaaggccgccctgaccgactggctgcgggctaaggccagcttcgtgatcgagggcctgaaggaggccgacaaggacgagttctgcagatgcgagctgaagctgcagaagtggtacggggacctgcggggaaagcccttcgccatcgaagccgagaacagcatcctggacatcagcggcttcagcaagcagtacaactgtgccttcatctggcagaaggacggcgtgaagaagctgaacctgtacctgatcatcaactacttcaagggcggcaagctgcggttcaagaagatcaaacctgaagccttcgaagccaacagattctacaccgtgatcaacaaaaagagcggcgagatcgtgcccatggaggtgaacttcaacttcgacgaccccaacctgatcatcctgcctctggcctttggcaagagacagggcagagaattcatctggaacgacctgctgtccctggaaaccggcagcctgaagctggccaacggaagagtgatcgagaagacactgtacaacagaagaacccggcaggatgagcctgccctgttcgtggccctgaccttcgagcggcgggaggtcctggactcctccaatatcaaaccaatgaacctgatcggcgtggcaagaggcgaaaacatccccgccgtgatcgccctgaccgaccccgagggctgcccactgagccggtttaaggatagcctgggaaacccaacccacatcctgagaatcggcgagagctataaggagaagcagcggaccatccaggccaagaaggaggtggagcagcggagagccggcggctacagccggaagtacgccagcaaagccaagaatctggcagacgatatggtgagaaacaccgctagagatctgctgtactacgccgtgacccaggatgccatgctgatcttcgccaacctgagccggggcttcggccggcagggcaagcggaccttcatggccgagagacagtacacacggatggaggactggctgaccgccaagctggcctacgagggcctgagcaagacctacctgtccaagacactggcccagtacacctccaagacatgcagcaactgtgggtttaccatcaccagcgccgactacgacagggtgctggagaagctgaagaagacagcaacaggctggatgaccacaattaacggcaaggagctgaaggtggagggccagattacctactacaacagatacaagagacagaacgtagtcaaggacctgtccgtcgagctggatagactgagcgaagaatctgtgaacaacgacatctcctcctggacaaagggcagaagcggagaagctctgagcctcctgaagaaaagattctcccatagacccgtgcaggagaagttcgtgtgcctgaactgcggcttcgagacacacgcagccgagcaagccgccctgaacatcgccagatcctggctgttcctgcggagccaggagtacaagaaataccagacaaacaagacaaccggcaacaccgataagagagccttcgtcgagacctggcagtccttttaccggaagaagcttaaggaggtgtggaaacctgccgtgcggtctggcggatctggcggaggctccacaagcagcgagaccggcaacgccgtgacctacgacgacgtgcacatcagcttcaccagcaaggagtgggccctgctggaccccagccagaagagcctgtacaaggacgtgatgctggagatctacagccacctgaccgccatcggctacaagtgggaggcccacgacagcgaggaccacggccagaggttcaggaggcagaggaggcacaagaggagccacaccgaggtgaagacctacaagtgcagcaccagccccaagaaaaagagaaaagtctaagctgccttctgcggggcttgccttctggccatgcccttcttctctcccttgcacctgtacctcttggtctttgaataaagcctgagtaggaaggctagcaaaaaaaaaaaaaaaaaaaaaaaaaaaaaaaaaaaaaaaaaaaaaaaaaaaaaaaaaaaaaaaaaaaaaaaaaaaaaaaa

SEQ ID NO: 2855 - RNA, 5419 nt, synthetic construct
  source 1..5419: mol_type = other RNA
aggaaataagagagaaaagaagagtaagaagaaatataagagccaccatggcccctaagaagaagcgtaaagtgagccgggtgaacggcagcggcagcggcggcggcatgaaccacgaccaggagttcgacccccctaaggtgtaccctcccgtccccgccgagaagagaaagcccatccgggtcctgagcctgttcgatggcatcgccaccggtctgctggtgctgaaggacctgggcatccaggtggataggtacattgcctccgaggtgtgcgaggactccatcaccgtgggaatggtgcgtcatcagggcaagatcatgtacgtgggcgacgtgcggagcgtgacacagaagcatatccaggagtggggccctttcgacctggtgatcggcggcagcccttgcaatgacctgagcatcgtgaacccagcccggaagggcctgtacgagggaaccggcagactgttcttcgagttttacagactgctgcacgacgcccggcctaaggaaggcgacgaccggcccttcttttggctgttcgagaatgtggtggccatgggagtcagcgacaagcgggatattagccggttcctggagagcaaccccgtgatgatcgatgccaaggaagtgagcgccgcccaccgggccagatacttctggggcaatctgcctggcatgaacagacccctggccagcaccgtgaacgacaagctggagctgcaggagtgcctggagcacggccggatcgccaagttcagcaaggtgagaaccatcaccacccgaagcaacagcatcaaacaaggcaaggaccagcactttcctgtgttcatgaacgagaaggaggacatcctgtggtgtaccgagatggagagagtgttcgggttcccagtccactacacagatgtcagcaacatgtctagactggccagacagagactgctgggaagaagctggtccgtccctgtgatcagacacctgttcgcccctctgaaggagtacttcgcctgcgtgagcagcggcaacagcaacgccaacagccggggccccagcttctctagcggcctggtgccactgtccctgagagggagccacatgggccccatggagatctacaaaaccgtgagcgcctggaagcggcagcctgtgcgcgtgctgagcctgtttcggaatatcgataaagtcctgaaaagcctgggattcctggagagcggctctggctccggcggtggcaccctgaagtacgtggaggatgtgacaaacgtggtcagacgggatgtggagaagtggggccccttcgatctggtgtacggcagcacccaacccctgggcagctcttgtgaccggtgccctggctggtacatgtttcagttccaccggatcctgcagtacgccctgccgagacaggagtcccagcggccattcttttggattttcatggacaacttgctgctgaccgaggatgaccaggaaactaccactcggttcctgcagaccgaagccgtgaccctgcaggacgtgagaggccgggactaccagaacgccatgcgggtgtggtccaacatccctggactgaaaagcaagcacgcacctctgacccctaaagaagaggagtacctgcaggcccaggtgcggagcagaagcaagctggacgcccctaaggtggatctgctggtgaagaattgcctcctgcccctgagagagtacttcaagtatttcagccagaatagtctgcccctgggcggcccaagcagcggcgcccctcctcccagcggcggcagcccagccggctccccaacctctaccgaggagggcacctctgagtccgccacccccgagagcggccctggcacctccaccgagcccagcgagggcagcgcacccggcagccctgccggcagccccacctccacagaggagggaaccagcaccgagcccagcgaaggcagcgccccaggcaccagcaccgagcctagtgagggcggctctggcggcggcagcgcccaggagattaaacggatcaacaagatcagaagaagacttgtgaaagacagcaacaccaagaaggccggcaagacaggccccatgaaaaccctgctggttagagtgatgacacccgatctgagagagcggctggaaaacctgagaaagaagcctgaaaatatcccccagcccatcagcaatacatctagagccaacctgaataagctgctgaccgattacaccgaaatgaagaaggcgatcctgcatgtgtactgggaagagttccagaaggaccctgtgggcctgatgagccgggtggcccagcctgccagcaagaagatcgatcagaacaagctgaaacctgagatggacgagaagggcaacctgaccaccgccggctttgcctgctctcagtgtggccagcccctgttcgtgtacaagctggagcaggtgtctgagaagggcaaggcttacaccaactacttcggacggtgcaatgtggccgagcacgaaaagctgatcctgctggcccagctgaagcccgagaaggatagcgacgaagccgtgacatatagcctgggaaagtttgggcagagggccctggatttctacagcattcatgtgaccaaggagtccacccaccccgtgaagcccctggcccagatcgccggaaacagatacgcctccggacctgtgggaaaggccctgagcgacgcatgtatgggcacaatcgcctccttcctgtctaagtaccaggacatcatcatcgaacaccagaaggtggtgaagggcaaccagaagagactggagagcctgcgggagctggccggcaaggaaaacctggaataccctagcgtgaccctgccacctcagcctcacaccaaggagggcgttgatgcctacaacgaagtgatcgcccgggtgcgaatgtgggtgaacctgaacctgtggcagaagctgaagctaagcagagatgatgccaagcctctgctgagactgaagggattcccttcctttcctctggtcgagagacaggccaacgaagtggactggtgggacatggtgtgtaacgtgaagaagctgatcaacgagaaaaaggaggatggcaaggtgttttggcagaatctggctggctacaagagacaggaagccctgagaccatacctgagcagcgaggaagatcggaagaagggaaagaaattcgctcggtaccagctgggcgacctgctgctgcacctggaaaagaagcacggcgaggactggggaaaggtgtacgacgaggcctgggagcggattgacaagaaagtggaaggcctgagcaagcacatcaagctggaagaggaacggagaagcgaggacgcccagagcaaggccgccctgaccgactggctgcgggctaaggccagcttcgtgatcgagggcctgaaggaggccgacaaggacgagttctgcagatgcgagctgaagctgcagaagtggtacggggacctgcggggaaagcccttcgccatcgaagccgagaacagcatcctggacatcagcggcttcagcaagcagtacaactgtgccttcatctggcagaaggacggcgtgaagaagctgaacctgtacctgatcatcaactacttcaagggcggcaagctgcggttcaagaagatcaaacctgaagccttcgaagccaacagattctacaccgtgatcaacaaaaagagcggcgagatcgtgcccatggaggtgaacttcaacttcgacgaccccaacctgatcatcctgcctctggcctttggcaagagacagggcagagaattcatctggaacgacctgctgtccctggaaaccggcagcctgaagctggccaacggaagagtgatcgagaagacactgtacaacagaagaacccggcaggatgagcctgccctgttcgtggccctgaccttcgagcggcgggaggtcctggactcctccaatatcaaaccaatgaacctgatcggcgtggcaagaggcgaaaacatccccgccgtgatcgccctgaccgaccccgagggctgcccactgagccggtttaaggatagcctgggaaacccaacccacatcctgagaatcggcgagagctataaggagaagcagcggaccatccaggccaagaaggaggtggagcagcggagagccggcggctacagccggaagtacgccagcaaagccaagaatctggcagacgatatggtgagaaacaccgctagagatctgctgtactacgccgtgacccaggatgccatgctgatcttcgccaacctgagccggggcttcggccggcagggcaagcggaccttcatggccgagagacagtacacacggatggaggactggctgaccgccaagctggcctacgagggcctgagcaagacctacctgtccaagacactggcccagtacacctccaagacatgcagcaactgtgggtttaccatcaccagcgccgactacgacagggtgctggagaagctgaagaagacagcaacaggctggatgaccacaattaacggcaaggagctgaaggtggagggccagattacctactacaacagatacaagagacagaacgtagtcaaggacctgtccgtcgagctggatagactgagcgaagaatctgtgaacaacgacatctcctcctggacaaagggcagaagcggagaagctctgagcctcctgaagaaaagattctcccatagacccgtgcaggagaagttcgtgtgcctgaactgcggcttcgagacacacgcagccgagcaagccgccctgaacatcgccagatcctggctgttcctgcggagccaggagtacaagaaataccagacaaacaagacaaccggcaacaccgataagagagccttcgtcgagacctggcagtccttttaccggaagaagcttaaggaggtgtggaaacctgccgtgcggtctggcggatctggcggaggctccacaagcgtgtgcggcagcgtgaccttcaaggacgtggccgtggacttcagccaggaggagtgggcctgcctggacgccacccagaaggtgctgtacagggacatgatgctggagacctacagcaacctggtggccgtggtgggccactgcatcagcaagcccgacctgatcgtgctgctggagcaggagaaggagccctggatgaccgtgaaggaggagaccgacaggcccagccccgacctggaggccaccagccccaagaaaaagagaaaagtctaagctgccttctgcggggcttgccttctggccatgcccttcttctctcccttgcacctgtacctcttggtctttgaataaagcctgagtaggaaggctagcaaaaaaaaaaaaaaaaaaaaaaaaaaaaaaaaaaaaaaaaaaaaaaaaaaaaaaaaaaaaaaaaaaaaaaaaaaaaaaaa

SEQ ID NO: 2856 - RNA, 5419 nt, synthetic construct
  source 1..5419: mol_type = other RNA
aggaaataagagagaaaagaagagtaagaagaaatataagagccaccatggcccctaagaagaagcgtaaagtgagccgggtgaacggcagcggcagcggcggcggcatgaaccacgaccaggagttcgacccccctaaggtgtaccctcccgtccccgccgagaagagaaagcccatccgggtcctgagcctgttcgatggcatcgccaccggtctgctggtgctgaaggacctgggcatccaggtggataggtacattgcctccgaggtgtgcgaggactccatcaccgtgggaatggtgcgtcatcagggcaagatcatgtacgtgggcgacgtgcggagcgtgacacagaagcatatccaggagtggggccctttcgacctggtgatcggcggcagcccttgcaatgacctgagcatcgtgaacccagcccggaagggcctgtacgagggaaccggcagactgttcttcgagttttacagactgctgcacgacgcccggcctaaggaaggcgacgaccggcccttcttttggctgttcgagaatgtggtggccatgggagtcagcgacaagcgggatattagccggttcctggagagcaaccccgtgatgatcgatgccaaggaagtgagcgccgcccaccgggccagatacttctggggcaatctgcctggcatgaacagacccctggccagcaccgtgaacgacaagctggagctgcaggagtgcctggagcacggccggatcgccaagttcagcaaggtgagaaccatcaccacccgaagcaacagcatcaaacaaggcaaggaccagcactttcctgtgttcatgaacgagaaggaggacatcctgtggtgtaccgagatggagagagtgttcgggttcccagtccactacacagatgtcagcaacatgtctagactggccagacagagactgctgggaagaagctggtccgtccctgtgatcagacacctgttcgcccctctgaaggagtacttcgcctgcgtgagcagcggcaacagcaacgccaacagccggggccccagcttctctagcggcctggtgccactgtccctgagagggagccacatgggccccatggagatctacaaaaccgtgagcgcctggaagcggcagcctgtgcgcgtgctgagcctgtttcggaatatcgataaagtcctgaaaagcctgggattcctggagagcggctctggctccggcggtggcaccctgaagtacgtggaggatgtgacaaacgtggtcagacgggatgtggagaagtggggccccttcgatctggtgtacggcagcacccaacccctgggcagctcttgtgaccggtgccctggctggtacatgtttcagttccaccggatcctgcagtacgccctgccgagacaggagtcccagcggccattcttttggattttcatggacaacttgctgctgaccgaggatgaccaggaaactaccactcggttcctgcagaccgaagccgtgaccctgcaggacgtgagaggccgggactaccagaacgccatgcgggtgtggtccaacatccctggactgaaaagcaagcacgcacctctgacccctaaagaagaggagtacctgcaggcccaggtgcggagcagaagcaagctggacgcccctaaggtggatctgctggtgaagaattgcctcctgcccctgagagagtacttcaagtatttcagccagaatagtctgcccctgggcggcccaagcagcggcgcccctcctcccagcggcggcagcccagccggctccccaacctctaccgaggagggcacctctgagtccgccacccccgagagcggccctggcacctccaccgagcccagcgagggcagcgcacccggcagccctgccggcagccccacctccacagaggagggaaccagcaccgagcccagcgaaggcagcgccccaggcaccagcaccgagcctagtgagggcggctctggcggcggcagcgcccaggagattaaacggatcaacaagatcagaagaagacttgtgaaagacagcaacaccaagaaggccggcaagacaggccccatgaaaaccctgctggttagagtgatgacacccgatctgagagagcggctggaaaacctgagaaagaagcctgaaaatatcccccagcccatcagcaatacatctagagccaacctgaataagctgctgaccgattacaccgaaatgaagaaggcgatcctgcatgtgtactgggaagagttccagaaggaccctgtgggcctgatgagccgggtggcccagcctgccagcaagaagatcgatcagaacaagctgaaacctgagatggacgagaagggcaacctgaccaccgccggctttgcctgctctcagtgtggccagcccctgttcgtgtacaagctggagcaggtgtctgagaagggcaaggcttacaccaactacttcggacggtgcaatgtggccgagcacgaaaagctgatcctgctggcccagctgaagcccgagaaggatagcgacgaagccgtgacatatagcctgggaaagtttgggcagagggccctggatttctacagcattcatgtgaccaaggagtccacccaccccgtgaagcccctggcccagatcgccggaaacagatacgcctccggacctgtgggaaaggccctgagcgacgcatgtatgggcacaatcgcctccttcctgtctaagtaccaggacatcatcatcgaacaccagaaggtggtgaagggcaaccagaagagactggagagcctgcgggagctggccggcaaggaaaacctggaataccctagcgtgaccctgccacctcagcctcacaccaaggagggcgttgatgcctacaacgaagtgatcgcccgggtgcgaatgtgggtgaacctgaacctgtggcagaagctgaagctaagcagagatgatgccaagcctctgctgagactgaagggattcccttcctttcctctggtcgagagacaggccaacgaagtggactggtgggacatggtgtgtaacgtgaagaagctgatcaacgagaaaaaggaggatggcaaggtgttttggcagaatctggctggctacaagagacaggaagccctgagaccatacctgagcagcgaggaagatcggaagaagggaaagaaattcgctcggtaccagctgggcgacctgctgctgcacctggaaaagaagcacggcgaggactggggaaaggtgtacgacgaggcctgggagcggattgacaagaaagtggaaggcctgagcaagcacatcaagctggaagaggaacggagaagcgaggacgcccagagcaaggccgccctgaccgactggctgcgggctaaggccagcttcgtgatcgagggcctgaaggaggccgacaaggacgagttctgcagatgcgagctgaagctgcagaagtggtacggggacctgcggggaaagcccttcgccatcgaagccgagaacagcatcctggacatcagcggcttcagcaagcagtacaactgtgccttcatctggcagaaggacggcgtgaagaagctgaacctgtacctgatcatcaactacttcaagggcggcaagctgcggttcaagaagatcaaacctgaagccttcgaagccaacagattctacaccgtgatcaacaaaaagagcggcgagatcgtgcccatggaggtgaacttcaacttcgacgaccccaacctgatcatcctgcctctggcctttggcaagagacagggcagagaattcatctggaacgacctgctgtccctggaaaccggcagcctgaagctggccaacggaagagtgatcgagaagacactgtacaacagaagaacccggcaggatgagcctgccctgttcgtggccctgaccttcgagcggcgggaggtcctggactcctccaatatcaaaccaatgaacctgatcggcgtggcaagaggcgaaaacatccccgccgtgatcgccctgaccgaccccgagggctgcccactgagccggtttaaggatagcctgggaaacccaacccacatcctgagaatcggcgagagctataaggagaagcagcggaccatccaggccaagaaggaggtggagcagcggagagccggcggctacagccggaagtacgccagcaaagccaagaatctggcagacgatatggtgagaaacaccgctagagatctgctgtactacgccgtgacccaggatgccatgctgatcttcgccaacctgagccggggcttcggccggcagggcaagcggaccttcatggccgagagacagtacacacggatggaggactggctgaccgccaagctggcctacgagggcctgagcaagacctacctgtccaagacactggcccagtacacctccaagacatgcagcaactgtgggtttaccatcaccagcgccgactacgacagggtgctggagaagctgaagaagacagcaacaggctggatgaccacaattaacggcaaggagctgaaggtggagggccagattacctactacaacagatacaagagacagaacgtagtcaaggacctgtccgtcgagctggatagactgagcgaagaatctgtgaacaacgacatctcctcctggacaaagggcagaagcggagaagctctgagcctcctgaagaaaagattctcccatagacccgtgcaggagaagttcgtgtgcctgaactgcggcttcgagacacacgcagccgagcaagccgccctgaacatcgccagatcctggctgttcctgcggagccaggagtacaagaaataccagacaaacaagacaaccggcaacaccgataagagagccttcgtcgagacctggcagtccttttaccggaagaagcttaaggaggtgtggaaacctgccgtgcggtctggcggatctggcggaggctccacaagcgcccaccacctggtgatgttcagggacgtggccgtggacttcagccaggaggagtgggagtgcctgaacagctaccagaggaacctgtacagggacgtgatcctggagaactacagcaacctggtgagcgtgggctgcagcatcagcaagcccgacgtgatcaccctgctggagcagggcaaggagccctggatggtggtgagggacgagaggaggaggaggagcctggacctggagagcaggaccagccccaagaaaaagagaaaagtctaagctgccttctgcggggcttgccttctggccatgcccttcttctctcccttgcacctgtacctcttggtctttgaataaagcctgagtaggaaggctagcaaaaaaaaaaaaaaaaaaaaaaaaaaaaaaaaaaaaaaaaaaaaaaaaaaaaaaaaaaaaaaaaaaaaaaaaaaaaaaaa

SEQ ID NO: 2857 - RNA, 5419 nt, synthetic construct
  source 1..5419: mol_type = other RNA
aggaaataagagagaaaagaagagtaagaagaaatataagagccaccatggcccctaagaagaagcgtaaagtgagccgggtgaacggcagcggcagcggcggcggcatgaaccacgaccaggagttcgacccccctaaggtgtaccctcccgtccccgccgagaagagaaagcccatccgggtcctgagcctgttcgatggcatcgccaccggtctgctggtgctgaaggacctgggcatccaggtggataggtacattgcctccgaggtgtgcgaggactccatcaccgtgggaatggtgcgtcatcagggcaagatcatgtacgtgggcgacgtgcggagcgtgacacagaagcatatccaggagtggggccctttcgacctggtgatcggcggcagcccttgcaatgacctgagcatcgtgaacccagcccggaagggcctgtacgagggaaccggcagactgttcttcgagttttacagactgctgcacgacgcccggcctaaggaaggcgacgaccggcccttcttttggctgttcgagaatgtggtggccatgggagtcagcgacaagcgggatattagccggttcctggagagcaaccccgtgatgatcgatgccaaggaagtgagcgccgcccaccgggccagatacttctggggcaatctgcctggcatgaacagacccctggccagcaccgtgaacgacaagctggagctgcaggagtgcctggagcacggccggatcgccaagttcagcaaggtgagaaccatcaccacccgaagcaacagcatcaaacaaggcaaggaccagcactttcctgtgttcatgaacgagaaggaggacatcctgtggtgtaccgagatggagagagtgttcgggttcccagtccactacacagatgtcagcaacatgtctagactggccagacagagactgctgggaagaagctggtccgtccctgtgatcagacacctgttcgcccctctgaaggagtacttcgcctgcgtgagcagcggcaacagcaacgccaacagccggggccccagcttctctagcggcctggtgccactgtccctgagagggagccacatgggccccatggagatctacaaaaccgtgagcgcctggaagcggcagcctgtgcgcgtgctgagcctgtttcggaatatcgataaagtcctgaaaagcctgggattcctggagagcggctctggctccggcggtggcaccctgaagtacgtggaggatgtgacaaacgtggtcagacgggatgtggagaagtggggccccttcgatctggtgtacggcagcacccaacccctgggcagctcttgtgaccggtgccctggctggtacatgtttcagttccaccggatcctgcagtacgccctgccgagacaggagtcccagcggccattcttttggattttcatggacaacttgctgctgaccgaggatgaccaggaaactaccactcggttcctgcagaccgaagccgtgaccctgcaggacgtgagaggccgggactaccagaacgccatgcgggtgtggtccaacatccctggactgaaaagcaagcacgcacctctgacccctaaagaagaggagtacctgcaggcccaggtgcggagcagaagcaagctggacgcccctaaggtggatctgctggtgaagaattgcctcctgcccctgagagagtacttcaagtatttcagccagaatagtctgcccctgggcggcccaagcagcggcgcccctcctcccagcggcggcagcccagccggctccccaacctctaccgaggagggcacctctgagtccgccacccccgagagcggccctggcacctccaccgagcccagcgagggcagcgcacccggcagccctgccggcagccccacctccacagaggagggaaccagcaccgagcccagcgaaggcagcgccccaggcaccagcaccgagcctagtgagggcggctctggcggcggcagcgcccaggagattaaacggatcaacaagatcagaagaagacttgtgaaagacagcaacaccaagaaggccggcaagacaggccccatgaaaaccctgctggttagagtgatgacacccgatctgagagagcggctggaaaacctgagaaagaagcctgaaaatatcccccagcccatcagcaatacatctagagccaacctgaataagctgctgaccgattacaccgaaatgaagaaggcgatcctgcatgtgtactgggaagagttccagaaggaccctgtgggcctgatgagccgggtggcccagcctgccagcaagaagatcgatcagaacaagctgaaacctgagatggacgagaagggcaacctgaccaccgccggctttgcctgctctcagtgtggccagcccctgttcgtgtacaagctggagcaggtgtctgagaagggcaaggcttacaccaactacttcggacggtgcaatgtggccgagcacgaaaagctgatcctgctggcccagctgaagcccgagaaggatagcgacgaagccgtgacatatagcctgggaaagtttgggcagagggccctggatttctacagcattcatgtgaccaaggagtccacccaccccgtgaagcccctggcccagatcgccggaaacagatacgcctccggacctgtgggaaaggccctgagcgacgcatgtatgggcacaatcgcctccttcctgtctaagtaccaggacatcatcatcgaacaccagaaggtggtgaagggcaaccagaagagactggagagcctgcgggagctggccggcaaggaaaacctggaataccctagcgtgaccctgccacctcagcctcacaccaaggagggcgttgatgcctacaacgaagtgatcgcccgggtgcgaatgtgggtgaacctgaacctgtggcagaagctgaagctaagcagagatgatgccaagcctctgctgagactgaagggattcccttcctttcctctggtcgagagacaggccaacgaagtggactggtgggacatggtgtgtaacgtgaagaagctgatcaacgagaaaaaggaggatggcaaggtgttttggcagaatctggctggctacaagagacaggaagccctgagaccatacctgagcagcgaggaagatcggaagaagggaaagaaattcgctcggtaccagctgggcgacctgctgctgcacctggaaaagaagcacggcgaggactggggaaaggtgtacgacgaggcctgggagcggattgacaagaaagtggaaggcctgagcaagcacatcaagctggaagaggaacggagaagcgaggacgcccagagcaaggccgccctgaccgactggctgcgggctaaggccagcttcgtgatcgagggcctgaaggaggccgacaaggacgagttctgcagatgcgagctgaagctgcagaagtggtacggggacctgcggggaaagcccttcgccatcgaagccgagaacagcatcctggacatcagcggcttcagcaagcagtacaactgtgccttcatctggcagaaggacggcgtgaagaagctgaacctgtacctgatcatcaactacttcaagggcggcaagctgcggttcaagaagatcaaacctgaagccttcgaagccaacagattctacaccgtgatcaacaaaaagagcggcgagatcgtgcccatggaggtgaacttcaacttcgacgaccccaacctgatcatcctgcctctggcctttggcaagagacagggcagagaattcatctggaacgacctgctgtccctggaaaccggcagcctgaagctggccaacggaagagtgatcgagaagacactgtacaacagaagaacccggcaggatgagcctgccctgttcgtggccctgaccttcgagcggcgggaggtcctggactcctccaatatcaaaccaatgaacctgatcggcgtggcaagaggcgaaaacatccccgccgtgatcgccctgaccgaccccgagggctgcccactgagccggtttaaggatagcctgggaaacccaacccacatcctgagaatcggcgagagctataaggagaagcagcggaccatccaggccaagaaggaggtggagcagcggagagccggcggctacagccggaagtacgccagcaaagccaagaatctggcagacgatatggtgagaaacaccgctagagatctgctgtactacgccgtgacccaggatgccatgctgatcttcgccaacctgagccggggcttcggccggcagggcaagcggaccttcatggccgagagacagtacacacggatggaggactggctgaccgccaagctggcctacgagggcctgagcaagacctacctgtccaagacactggcccagtacacctccaagacatgcagcaactgtgggtttaccatcaccagcgccgactacgacagggtgctggagaagctgaagaagacagcaacaggctggatgaccacaattaacggcaaggagctgaaggtggagggccagattacctactacaacagatacaagagacagaacgtagtcaaggacctgtccgtcgagctggatagactgagcgaagaatctgtgaacaacgacatctcctcctggacaaagggcagaagcggagaagctctgagcctcctgaagaaaagattctcccatagacccgtgcaggagaagttcgtgtgcctgaactgcggcttcgagacacacgcagccgagcaagccgccctgaacatcgccagatcctggctgttcctgcggagccaggagtacaagaaataccagacaaacaagacaaccggcaacaccgataagagagccttcgtcgagacctggcagtccttttaccggaagaagcttaaggaggtgtggaaacctgccgtgcggtctggcggatctggcggaggctccacaagcttccagggcagcctgagcttcgaggacgtgaccgtgggcttcagccaggaggagtggcagcacctggaccccgcccagaggaccctgtacagggacgtgatgctggagaactacagccacctggtggccgtgggctgctgcgtgcccaagcccgacgtgatcttcaggctggagcagggccagcagccctggctggtggaggaggagagcctggaccagatctggcccgaggtgtgcagggtgaccagccccaagaaaaagagaaaagtctaagctgccttctgcggggcttgccttctggccatgcccttcttctctcccttgcacctgtacctcttggtctttgaataaagcctgagtaggaaggctagcaaaaaaaaaaaaaaaaaaaaaaaaaaaaaaaaaaaaaaaaaaaaaaaaaaaaaaaaaaaaaaaaaaaaaaaaaaaaaaaa

SEQ ID NO: 2858 - RNA, 5419 nt, synthetic construct
  source 1..5419: mol_type = other RNA
aggaaataagagagaaaagaagagtaagaagaaatataagagccaccatggcccctaagaagaagcgtaaagtgagccgggtgaacggcagcggcagcggcggcggcatgaaccacgaccaggagttcgacccccctaaggtgtaccctcccgtccccgccgagaagagaaagcccatccgggtcctgagcctgttcgatggcatcgccaccggtctgctggtgctgaaggacctgggcatccaggtggataggtacattgcctccgaggtgtgcgaggactccatcaccgtgggaatggtgcgtcatcagggcaagatcatgtacgtgggcgacgtgcggagcgtgacacagaagcatatccaggagtggggccctttcgacctggtgatcggcggcagcccttgcaatgacctgagcatcgtgaacccagcccggaagggcctgtacgagggaaccggcagactgttcttcgagttttacagactgctgcacgacgcccggcctaaggaaggcgacgaccggcccttcttttggctgttcgagaatgtggtggccatgggagtcagcgacaagcgggatattagccggttcctggagagcaaccccgtgatgatcgatgccaaggaagtgagcgccgcccaccgggccagatacttctggggcaatctgcctggcatgaacagacccctggccagcaccgtgaacgacaagctggagctgcaggagtgcctggagcacggccggatcgccaagttcagcaaggtgagaaccatcaccacccgaagcaacagcatcaaacaaggcaaggaccagcactttcctgtgttcatgaacgagaaggaggacatcctgtggtgtaccgagatggagagagtgttcgggttcccagtccactacacagatgtcagcaacatgtctagactggccagacagagactgctgggaagaagctggtccgtccctgtgatcagacacctgttcgcccctctgaaggagtacttcgcctgcgtgagcagcggcaacagcaacgccaacagccggggccccagcttctctagcggcctggtgccactgtccctgagagggagccacatgggccccatggagatctacaaaaccgtgagcgcctggaagcggcagcctgtgcgcgtgctgagcctgtttcggaatatcgataaagtcctgaaaagcctgggattcctggagagcggctctggctccggcggtggcaccctgaagtacgtggaggatgtgacaaacgtggtcagacgggatgtggagaagtggggccccttcgatctggtgtacggcagcacccaacccctgggcagctcttgtgaccggtgccctggctggtacatgtttcagttccaccggatcctgcagtacgccctgccgagacaggagtcccagcggccattcttttggattttcatggacaacttgctgctgaccgaggatgaccaggaaactaccactcggttcctgcagaccgaagccgtgaccctgcaggacgtgagaggccgggactaccagaacgccatgcgggtgtggtccaacatccctggactgaaaagcaagcacgcacctctgacccctaaagaagaggagtacctgcaggcccaggtgcggagcagaagcaagctggacgcccctaaggtggatctgctggtgaagaattgcctcctgcccctgagagagtacttcaagtatttcagccagaatagtctgcccctgggcggcccaagcagcggcgcccctcctcccagcggcggcagcccagccggctccccaacctctaccgaggagggcacctctgagtccgccacccccgagagcggccctggcacctccaccgagcccagcgagggcagcgcacccggcagccctgccggcagccccacctccacagaggagggaaccagcaccgagcccagcgaaggcagcgccccaggcaccagcaccgagcctagtgagggcggctctggcggcggcagcgcccaggagattaaacggatcaacaagatcagaagaagacttgtgaaagacagcaacaccaagaaggccggcaagacaggccccatgaaaaccctgctggttagagtgatgacacccgatctgagagagcggctggaaaacctgagaaagaagcctgaaaatatcccccagcccatcagcaatacatctagagccaacctgaataagctgctgaccgattacaccgaaatgaagaaggcgatcctgcatgtgtactgggaagagttccagaaggaccctgtgggcctgatgagccgggtggcccagcctgccagcaagaagatcgatcagaacaagctgaaacctgagatggacgagaagggcaacctgaccaccgccggctttgcctgctctcagtgtggccagcccctgttcgtgtacaagctggagcaggtgtctgagaagggcaaggcttacaccaactacttcggacggtgcaatgtggccgagcacgaaaagctgatcctgctggcccagctgaagcccgagaaggatagcgacgaagccgtgacatatagcctgggaaagtttgggcagagggccctggatttctacagcattcatgtgaccaaggagtccacccaccccgtgaagcccctggcccagatcgccggaaacagatacgcctccggacctgtgggaaaggccctgagcgacgcatgtatgggcacaatcgcctccttcctgtctaagtaccaggacatcatcatcgaacaccagaaggtggtgaagggcaaccagaagagactggagagcctgcgggagctggccggcaaggaaaacctggaataccctagcgtgaccctgccacctcagcctcacaccaaggagggcgttgatgcctacaacgaagtgatcgcccgggtgcgaatgtgggtgaacctgaacctgtggcagaagctgaagctaagcagagatgatgccaagcctctgctgagactgaagggattcccttcctttcctctggtcgagagacaggccaacgaagtggactggtgggacatggtgtgtaacgtgaagaagctgatcaacgagaaaaaggaggatggcaaggtgttttggcagaatctggctggctacaagagacaggaagccctgagaccatacctgagcagcgaggaagatcggaagaagggaaagaaattcgctcggtaccagctgggcgacctgctgctgcacctggaaaagaagcacggcgaggactggggaaaggtgtacgacgaggcctgggagcggattgacaagaaagtggaaggcctgagcaagcacatcaagctggaagaggaacggagaagcgaggacgcccagagcaaggccgccctgaccgactggctgcgggctaaggccagcttcgtgatcgagggcctgaaggaggccgacaaggacgagttctgcagatgcgagctgaagctgcagaagtggtacggggacctgcggggaaagcccttcgccatcgaagccgagaacagcatcctggacatcagcggcttcagcaagcagtacaactgtgccttcatctggcagaaggacggcgtgaagaagctgaacctgtacctgatcatcaactacttcaagggcggcaagctgcggttcaagaagatcaaacctgaagccttcgaagccaacagattctacaccgtgatcaacaaaaagagcggcgagatcgtgcccatggaggtgaacttcaacttcgacgaccccaacctgatcatcctgcctctggcctttggcaagagacagggcagagaattcatctggaacgacctgctgtccctggaaaccggcagcctgaagctggccaacggaagagtgatcgagaagacactgtacaacagaagaacccggcaggatgagcctgccctgttcgtggccctgaccttcgagcggcgggaggtcctggactcctccaatatcaaaccaatgaacctgatcggcgtggcaagaggcgaaaacatccccgccgtgatcgccctgaccgaccccgagggctgcccactgagccggtttaaggatagcctgggaaacccaacccacatcctgagaatcggcgagagctataaggagaagcagcggaccatccaggccaagaaggaggtggagcagcggagagccggcggctacagccggaagtacgccagcaaagccaagaatctggcagacgatatggtgagaaacaccgctagagatctgctgtactacgccgtgacccaggatgccatgctgatcttcgccaacctgagccggggcttcggccggcagggcaagcggaccttcatggccgagagacagtacacacggatggaggactggctgaccgccaagctggcctacgagggcctgagcaagacctacctgtccaagacactggcccagtacacctccaagacatgcagcaactgtgggtttaccatcaccagcgccgactacgacagggtgctggagaagctgaagaagacagcaacaggctggatgaccacaattaacggcaaggagctgaaggtggagggccagattacctactacaacagatacaagagacagaacgtagtcaaggacctgtccgtcgagctggatagactgagcgaagaatctgtgaacaacgacatctcctcctggacaaagggcagaagcggagaagctctgagcctcctgaagaaaagattctcccatagacccgtgcaggagaagttcgtgtgcctgaactgcggcttcgagacacacgcagccgagcaagccgccctgaacatcgccagatcctggctgttcctgcggagccaggagtacaagaaataccagacaaacaagacaaccggcaacaccgataagagagccttcgtcgagacctggcagtccttttaccggaagaagcttaaggaggtgtggaaacctgccgtgcggtctggcggatctggcggaggctccacaagcgcccaggagagcgtgaccttcgaggacgtggccgtgaacttcaccaacagggagtggcagagcctgacctacgcccagaggcacctgtacaagcacgtgatgctggagaactacggcaacatggtgagcctgggcttccccttccccaagccccccctgatcagccacctggagaggggcgtggagccctgcgtgcaggacccccaggacagggagagcctgagctgcagctaccccgtgagcaccagccccaagaaaaagagaaaagtctaagctgccttctgcggggcttgccttctggccatgcccttcttctctcccttgcacctgtacctcttggtctttgaataaagcctgagtaggaaggctagcaaaaaaaaaaaaaaaaaaaaaaaaaaaaaaaaaaaaaaaaaaaaaaaaaaaaaaaaaaaaaaaaaaaaaaaaaaaaaaaa

SEQ ID NO: 2859 - RNA, 5419 nt, synthetic construct
  source 1..5419: mol_type = other RNA
aggaaataagagagaaaagaagagtaagaagaaatataagagccaccatggcccctaagaagaagcgtaaagtgagccgggtgaacggcagcggcagcggcggcggcatgaaccacgaccaggagttcgacccccctaaggtgtaccctcccgtccccgccgagaagagaaagcccatccgggtcctgagcctgttcgatggcatcgccaccggtctgctggtgctgaaggacctgggcatccaggtggataggtacattgcctccgaggtgtgcgaggactccatcaccgtgggaatggtgcgtcatcagggcaagatcatgtacgtgggcgacgtgcggagcgtgacacagaagcatatccaggagtggggccctttcgacctggtgatcggcggcagcccttgcaatgacctgagcatcgtgaacccagcccggaagggcctgtacgagggaaccggcagactgttcttcgagttttacagactgctgcacgacgcccggcctaaggaaggcgacgaccggcccttcttttggctgttcgagaatgtggtggccatgggagtcagcgacaagcgggatattagccggttcctggagagcaaccccgtgatgatcgatgccaaggaagtgagcgccgcccaccgggccagatacttctggggcaatctgcctggcatgaacagacccctggccagcaccgtgaacgacaagctggagctgcaggagtgcctggagcacggccggatcgccaagttcagcaaggtgagaaccatcaccacccgaagcaacagcatcaaacaaggcaaggaccagcactttcctgtgttcatgaacgagaaggaggacatcctgtggtgtaccgagatggagagagtgttcgggttcccagtccactacacagatgtcagcaacatgtctagactggccagacagagactgctgggaagaagctggtccgtccctgtgatcagacacctgttcgcccctctgaaggagtacttcgcctgcgtgagcagcggcaacagcaacgccaacagccggggccccagcttctctagcggcctggtgccactgtccctgagagggagccacatgggccccatggagatctacaaaaccgtgagcgcctggaagcggcagcctgtgcgcgtgctgagcctgtttcggaatatcgataaagtcctgaaaagcctgggattcctggagagcggctctggctccggcggtggcaccctgaagtacgtggaggatgtgacaaacgtggtcagacgggatgtggagaagtggggccccttcgatctggtgtacggcagcacccaacccctgggcagctcttgtgaccggtgccctggctggtacatgtttcagttccaccggatcctgcagtacgccctgccgagacaggagtcccagcggccattcttttggattttcatggacaacttgctgctgaccgaggatgaccaggaaactaccactcggttcctgcagaccgaagccgtgaccctgcaggacgtgagaggccgggactaccagaacgccatgcgggtgtggtccaacatccctggactgaaaagcaagcacgcacctctgacccctaaagaagaggagtacctgcaggcccaggtgcggagcagaagcaagctggacgcccctaaggtggatctgctggtgaagaattgcctcctgcccctgagagagtacttcaagtatttcagccagaatagtctgcccctgggcggcccaagcagcggcgcccctcctcccagcggcggcagcccagccggctccccaacctctaccgaggagggcacctctgagtccgccacccccgagagcggccctggcacctccaccgagcccagcgagggcagcgcacccggcagccctgccggcagccccacctccacagaggagggaaccagcaccgagcccagcgaaggcagcgccccaggcaccagcaccgagcctagtgagggcggctctggcggcggcagcgcccaggagattaaacggatcaacaagatcagaagaagacttgtgaaagacagcaacaccaagaaggccggcaagacaggccccatgaaaaccctgctggttagagtgatgacacccgatctgagagagcggctggaaaacctgagaaagaagcctgaaaatatcccccagcccatcagcaatacatctagagccaacctgaataagctgctgaccgattacaccgaaatgaagaaggcgatcctgcatgtgtactgggaagagttccagaaggaccctgtgggcctgatgagccgggtggcccagcctgccagcaagaagatcgatcagaacaagctgaaacctgagatggacgagaagggcaacctgaccaccgccggctttgcctgctctcagtgtggccagcccctgttcgtgtacaagctggagcaggtgtctgagaagggcaaggcttacaccaactacttcggacggtgcaatgtggccgagcacgaaaagctgatcctgctggcccagctgaagcccgagaaggatagcgacgaagccgtgacatatagcctgggaaagtttgggcagagggccctggatttctacagcattcatgtgaccaaggagtccacccaccccgtgaagcccctggcccagatcgccggaaacagatacgcctccggacctgtgggaaaggccctgagcgacgcatgtatgggcacaatcgcctccttcctgtctaagtaccaggacatcatcatcgaacaccagaaggtggtgaagggcaaccagaagagactggagagcctgcgggagctggccggcaaggaaaacctggaataccctagcgtgaccctgccacctcagcctcacaccaaggagggcgttgatgcctacaacgaagtgatcgcccgggtgcgaatgtgggtgaacctgaacctgtggcagaagctgaagctaagcagagatgatgccaagcctctgctgagactgaagggattcccttcctttcctctggtcgagagacaggccaacgaagtggactggtgggacatggtgtgtaacgtgaagaagctgatcaacgagaaaaaggaggatggcaaggtgttttggcagaatctggctggctacaagagacaggaagccctgagaccatacctgagcagcgaggaagatcggaagaagggaaagaaattcgctcggtaccagctgggcgacctgctgctgcacctggaaaagaagcacggcgaggactggggaaaggtgtacgacgaggcctgggagcggattgacaagaaagtggaaggcctgagcaagcacatcaagctggaagaggaacggagaagcgaggacgcccagagcaaggccgccctgaccgactggctgcgggctaaggccagcttcgtgatcgagggcctgaaggaggccgacaaggacgagttctgcagatgcgagctgaagctgcagaagtggtacggggacctgcggggaaagcccttcgccatcgaagccgagaacagcatcctggacatcagcggcttcagcaagcagtacaactgtgccttcatctggcagaaggacggcgtgaagaagctgaacctgtacctgatcatcaactacttcaagggcggcaagctgcggttcaagaagatcaaacctgaagccttcgaagccaacagattctacaccgtgatcaacaaaaagagcggcgagatcgtgcccatggaggtgaacttcaacttcgacgaccccaacctgatcatcctgcctctggcctttggcaagagacagggcagagaattcatctggaacgacctgctgtccctggaaaccggcagcctgaagctggccaacggaagagtgatcgagaagacactgtacaacagaagaacccggcaggatgagcctgccctgttcgtggccctgaccttcgagcggcgggaggtcctggactcctccaatatcaaaccaatgaacctgatcggcgtggcaagaggcgaaaacatccccgccgtgatcgccctgaccgaccccgagggctgcccactgagccggtttaaggatagcctgggaaacccaacccacatcctgagaatcggcgagagctataaggagaagcagcggaccatccaggccaagaaggaggtggagcagcggagagccggcggctacagccggaagtacgccagcaaagccaagaatctggcagacgatatggtgagaaacaccgctagagatctgctgtactacgccgtgacccaggatgccatgctgatcttcgccaacctgagccggggcttcggccggcagggcaagcggaccttcatggccgagagacagtacacacggatggaggactggctgaccgccaagctggcctacgagggcctgagcaagacctacctgtccaagacactggcccagtacacctccaagacatgcagcaactgtgggtttaccatcaccagcgccgactacgacagggtgctggagaagctgaagaagacagcaacaggctggatgaccacaattaacggcaaggagctgaaggtggagggccagattacctactacaacagatacaagagacagaacgtagtcaaggacctgtccgtcgagctggatagactgagcgaagaatctgtgaacaacgacatctcctcctggacaaagggcagaagcggagaagctctgagcctcctgaagaaaagattctcccatagacccgtgcaggagaagttcgtgtgcctgaactgcggcttcgagacacacgcagccgagcaagccgccctgaacatcgccagatcctggctgttcctgcggagccaggagtacaagaaataccagacaaacaagacaaccggcaacaccgataagagagccttcgtcgagacctggcagtccttttaccggaagaagcttaaggaggtgtggaaacctgccgtgcggtctggcggatctggcggaggctccacaagcttccaggagagcgtgaccttcaaggacgtggccgtggacttcacctgggaggagtggggctacctggacaccagccagaaggagctgtactgggaggtgatgctggagaactacaggaacctggtgagcctgggcctggccgacagcaacgtgaacatgatcagccagctggagagcggcgaggcccacggcatcagcgtggacagcgtgctgaggagctgctggcccgacggcgacaccaggaccagccccaagaaaaagagaaaagtctaagctgccttctgcggggcttgccttctggccatgcccttcttctctcccttgcacctgtacctcttggtctttgaataaagcctgagtaggaaggctagcaaaaaaaaaaaaaaaaaaaaaaaaaaaaaaaaaaaaaaaaaaaaaaaaaaaaaaaaaaaaaaaaaaaaaaaaaaaaaaaa

SEQ ID NO: 2860 - RNA, 5419 nt, synthetic construct
  source 1..5419: mol_type = other RNA
aggaaataagagagaaaagaagagtaagaagaaatataagagccaccatggcccctaagaagaagcgtaaagtgagccgggtgaacggcagcggcagcggcggcggcatgaaccacgaccaggagttcgacccccctaaggtgtaccctcccgtccccgccgagaagagaaagcccatccgggtcctgagcctgttcgatggcatcgccaccggtctgctggtgctgaaggacctgggcatccaggtggataggtacattgcctccgaggtgtgcgaggactccatcaccgtgggaatggtgcgtcatcagggcaagatcatgtacgtgggcgacgtgcggagcgtgacacagaagcatatccaggagtggggccctttcgacctggtgatcggcggcagcccttgcaatgacctgagcatcgtgaacccagcccggaagggcctgtacgagggaaccggcagactgttcttcgagttttacagactgctgcacgacgcccggcctaaggaaggcgacgaccggcccttcttttggctgttcgagaatgtggtggccatgggagtcagcgacaagcgggatattagccggttcctggagagcaaccccgtgatgatcgatgccaaggaagtgagcgccgcccaccgggccagatacttctggggcaatctgcctggcatgaacagacccctggccagcaccgtgaacgacaagctggagctgcaggagtgcctggagcacggccggatcgccaagttcagcaaggtgagaaccatcaccacccgaagcaacagcatcaaacaaggcaaggaccagcactttcctgtgttcatgaacgagaaggaggacatcctgtggtgtaccgagatggagagagtgttcgggttcccagtccactacacagatgtcagcaacatgtctagactggccagacagagactgctgggaagaagctggtccgtccctgtgatcagacacctgttcgcccctctgaaggagtacttcgcctgcgtgagcagcggcaacagcaacgccaacagccggggccccagcttctctagcggcctggtgccactgtccctgagagggagccacatgggccccatggagatctacaaaaccgtgagcgcctggaagcggcagcctgtgcgcgtgctgagcctgtttcggaatatcgataaagtcctgaaaagcctgggattcctggagagcggctctggctccggcggtggcaccctgaagtacgtggaggatgtgacaaacgtggtcagacgggatgtggagaagtggggccccttcgatctggtgtacggcagcacccaacccctgggcagctcttgtgaccggtgccctggctggtacatgtttcagttccaccggatcctgcagtacgccctgccgagacaggagtcccagcggccattcttttggattttcatggacaacttgctgctgaccgaggatgaccaggaaactaccactcggttcctgcagaccgaagccgtgaccctgcaggacgtgagaggccgggactaccagaacgccatgcgggtgtggtccaacatccctggactgaaaagcaagcacgcacctctgacccctaaagaagaggagtacctgcaggcccaggtgcggagcagaagcaagctggacgcccctaaggtggatctgctggtgaagaattgcctcctgcccctgagagagtacttcaagtatttcagccagaatagtctgcccctgggcggcccaagcagcggcgcccctcctcccagcggcggcagcccagccggctccccaacctctaccgaggagggcacctctgagtccgccacccccgagagcggccctggcacctccaccgagcccagcgagggcagcgcacccggcagccctgccggcagccccacctccacagaggagggaaccagcaccgagcccagcgaaggcagcgccccaggcaccagcaccgagcctagtgagggcggctctggcggcggcagcgcccaggagattaaacggatcaacaagatcagaagaagacttgtgaaagacagcaacaccaagaaggccggcaagacaggccccatgaaaaccctgctggttagagtgatgacacccgatctgagagagcggctggaaaacctgagaaagaagcctgaaaatatcccccagcccatcagcaatacatctagagccaacctgaataagctgctgaccgattacaccgaaatgaagaaggcgatcctgcatgtgtactgggaagagttccagaaggaccctgtgggcctgatgagccgggtggcccagcctgccagcaagaagatcgatcagaacaagctgaaacctgagatggacgagaagggcaacctgaccaccgccggctttgcctgctctcagtgtggccagcccctgttcgtgtacaagctggagcaggtgtctgagaagggcaaggcttacaccaactacttcggacggtgcaatgtggccgagcacgaaaagctgatcctgctggcccagctgaagcccgagaaggatagcgacgaagccgtgacatatagcctgggaaagtttgggcagagggccctggatttctacagcattcatgtgaccaaggagtccacccaccccgtgaagcccctggcccagatcgccggaaacagatacgcctccggacctgtgggaaaggccctgagcgacgcatgtatgggcacaatcgcctccttcctgtctaagtaccaggacatcatcatcgaacaccagaaggtggtgaagggcaaccagaagagactggagagcctgcgggagctggccggcaaggaaaacctggaataccctagcgtgaccctgccacctcagcctcacaccaaggagggcgttgatgcctacaacgaagtgatcgcccgggtgcgaatgtgggtgaacctgaacctgtggcagaagctgaagctaagcagagatgatgccaagcctctgctgagactgaagggattcccttcctttcctctggtcgagagacaggccaacgaagtggactggtgggacatggtgtgtaacgtgaagaagctgatcaacgagaaaaaggaggatggcaaggtgttttggcagaatctggctggctacaagagacaggaagccctgagaccatacctgagcagcgaggaagatcggaagaagggaaagaaattcgctcggtaccagctgggcgacctgctgctgcacctggaaaagaagcacggcgaggactggggaaaggtgtacgacgaggcctgggagcggattgacaagaaagtggaaggcctgagcaagcacatcaagctggaagaggaacggagaagcgaggacgcccagagcaaggccgccctgaccgactggctgcgggctaaggccagcttcgtgatcgagggcctgaaggaggccgacaaggacgagttctgcagatgcgagctgaagctgcagaagtggtacggggacctgcggggaaagcccttcgccatcgaagccgagaacagcatcctggacatcagcggcttcagcaagcagtacaactgtgccttcatctggcagaaggacggcgtgaagaagctgaacctgtacctgatcatcaactacttcaagggcggcaagctgcggttcaagaagatcaaacctgaagccttcgaagccaacagattctacaccgtgatcaacaaaaagagcggcgagatcgtgcccatggaggtgaacttcaacttcgacgaccccaacctgatcatcctgcctctggcctttggcaagagacagggcagagaattcatctggaacgacctgctgtccctggaaaccggcagcctgaagctggccaacggaagagtgatcgagaagacactgtacaacagaagaacccggcaggatgagcctgccctgttcgtggccctgaccttcgagcggcgggaggtcctggactcctccaatatcaaaccaatgaacctgatcggcgtggcaagaggcgaaaacatccccgccgtgatcgccctgaccgaccccgagggctgcccactgagccggtttaaggatagcctgggaaacccaacccacatcctgagaatcggcgagagctataaggagaagcagcggaccatccaggccaagaaggaggtggagcagcggagagccggcggctacagccggaagtacgccagcaaagccaagaatctggcagacgatatggtgagaaacaccgctagagatctgctgtactacgccgtgacccaggatgccatgctgatcttcgccaacctgagccggggcttcggccggcagggcaagcggaccttcatggccgagagacagtacacacggatggaggactggctgaccgccaagctggcctacgagggcctgagcaagacctacctgtccaagacactggcccagtacacctccaagacatgcagcaactgtgggtttaccatcaccagcgccgactacgacagggtgctggagaagctgaagaagacagcaacaggctggatgaccacaattaacggcaaggagctgaaggtggagggccagattacctactacaacagatacaagagacagaacgtagtcaaggacctgtccgtcgagctggatagactgagcgaagaatctgtgaacaacgacatctcctcctggacaaagggcagaagcggagaagctctgagcctcctgaagaaaagattctcccatagacccgtgcaggagaagttcgtgtgcctgaactgcggcttcgagacacacgcagccgagcaagccgccctgaacatcgccagatcctggctgttcctgcggagccaggagtacaagaaataccagacaaacaagacaaccggcaacaccgataagagagccttcgtcgagacctggcagtccttttaccggaagaagcttaaggaggtgtggaaacctgccgtgcggtctggcggatctggcggaggctccacaagcatggagagcgtgagcttcgaggacgtggccgtgaagttcacccaggaggagtgggccgtgctggaccccagccagaagaagctgtacaaggacgtgatgcaggagaccctgaagaacctggccagcatcggcaacaagagcggcaagcagaaggtgatcaacgagtacggcaagctgtggaggaagctgagcagccacctggccggcaagttcagcgactacaacgagaaccaccagtgcgccaccagccccaagaaaaagagaaaagtctaagctgccttctgcggggcttgccttctggccatgcccttcttctctcccttgcacctgtacctcttggtctttgaataaagcctgagtaggaaggctagcaaaaaaaaaaaaaaaaaaaaaaaaaaaaaaaaaaaaaaaaaaaaaaaaaaaaaaaaaaaaaaaaaaaaaaaaaaaaaaaa

SEQ ID NO: 2861 - RNA, 5419 nt, synthetic construct
  source 1..5419: mol_type = other RNA
aggaaataagagagaaaagaagagtaagaagaaatataagagccaccatggcccctaagaagaagcgtaaagtgagccgggtgaacggcagcggcagcggcggcggcatgaaccacgaccaggagttcgacccccctaaggtgtaccctcccgtccccgccgagaagagaaagcccatccgggtcctgagcctgttcgatggcatcgccaccggtctgctggtgctgaaggacctgggcatccaggtggataggtacattgcctccgaggtgtgcgaggactccatcaccgtgggaatggtgcgtcatcagggcaagatcatgtacgtgggcgacgtgcggagcgtgacacagaagcatatccaggagtggggccctttcgacctggtgatcggcggcagcccttgcaatgacctgagcatcgtgaacccagcccggaagggcctgtacgagggaaccggcagactgttcttcgagttttacagactgctgcacgacgcccggcctaaggaaggcgacgaccggcccttcttttggctgttcgagaatgtggtggccatgggagtcagcgacaagcgggatattagccggttcctggagagcaaccccgtgatgatcgatgccaaggaagtgagcgccgcccaccgggccagatacttctggggcaatctgcctggcatgaacagacccctggccagcaccgtgaacgacaagctggagctgcaggagtgcctggagcacggccggatcgccaagttcagcaaggtgagaaccatcaccacccgaagcaacagcatcaaacaaggcaaggaccagcactttcctgtgttcatgaacgagaaggaggacatcctgtggtgtaccgagatggagagagtgttcgggttcccagtccactacacagatgtcagcaacatgtctagactggccagacagagactgctgggaagaagctggtccgtccctgtgatcagacacctgttcgcccctctgaaggagtacttcgcctgcgtgagcagcggcaacagcaacgccaacagccggggccccagcttctctagcggcctggtgccactgtccctgagagggagccacatgggccccatggagatctacaaaaccgtgagcgcctggaagcggcagcctgtgcgcgtgctgagcctgtttcggaatatcgataaagtcctgaaaagcctgggattcctggagagcggctctggctccggcggtggcaccctgaagtacgtggaggatgtgacaaacgtggtcagacgggatgtggagaagtggggccccttcgatctggtgtacggcagcacccaacccctgggcagctcttgtgaccggtgccctggctggtacatgtttcagttccaccggatcctgcagtacgccctgccgagacaggagtcccagcggccattcttttggattttcatggacaacttgctgctgaccgaggatgaccaggaaactaccactcggttcctgcagaccgaagccgtgaccctgcaggacgtgagaggccgggactaccagaacgccatgcgggtgtggtccaacatccctggactgaaaagcaagcacgcacctctgacccctaaagaagaggagtacctgcaggcccaggtgcggagcagaagcaagctggacgcccctaaggtggatctgctggtgaagaattgcctcctgcccctgagagagtacttcaagtatttcagccagaatagtctgcccctgggcggcccaagcagcggcgcccctcctcccagcggcggcagcccagccggctccccaacctctaccgaggagggcacctctgagtccgccacccccgagagcggccctggcacctccaccgagcccagcgagggcagcgcacccggcagccctgccggcagccccacctccacagaggagggaaccagcaccgagcccagcgaaggcagcgccccaggcaccagcaccgagcctagtgagggcggctctggcggcggcagcgcccaggagattaaacggatcaacaagatcagaagaagacttgtgaaagacagcaacaccaagaaggccggcaagacaggccccatgaaaaccctgctggttagagtgatgacacccgatctgagagagcggctggaaaacctgagaaagaagcctgaaaatatcccccagcccatcagcaatacatctagagccaacctgaataagctgctgaccgattacaccgaaatgaagaaggcgatcctgcatgtgtactgggaagagttccagaaggaccctgtgggcctgatgagccgggtggcccagcctgccagcaagaagatcgatcagaacaagctgaaacctgagatggacgagaagggcaacctgaccaccgccggctttgcctgctctcagtgtggccagcccctgttcgtgtacaagctggagcaggtgtctgagaagggcaaggcttacaccaactacttcggacggtgcaatgtggccgagcacgaaaagctgatcctgctggcccagctgaagcccgagaaggatagcgacgaagccgtgacatatagcctgggaaagtttgggcagagggccctggatttctacagcattcatgtgaccaaggagtccacccaccccgtgaagcccctggcccagatcgccggaaacagatacgcctccggacctgtgggaaaggccctgagcgacgcatgtatgggcacaatcgcctccttcctgtctaagtaccaggacatcatcatcgaacaccagaaggtggtgaagggcaaccagaagagactggagagcctgcgggagctggccggcaaggaaaacctggaataccctagcgtgaccctgccacctcagcctcacaccaaggagggcgttgatgcctacaacgaagtgatcgcccgggtgcgaatgtgggtgaacctgaacctgtggcagaagctgaagctaagcagagatgatgccaagcctctgctgagactgaagggattcccttcctttcctctggtcgagagacaggccaacgaagtggactggtgggacatggtgtgtaacgtgaagaagctgatcaacgagaaaaaggaggatggcaaggtgttttggcagaatctggctggctacaagagacaggaagccctgagaccatacctgagcagcgaggaagatcggaagaagggaaagaaattcgctcggtaccagctgggcgacctgctgctgcacctggaaaagaagcacggcgaggactggggaaaggtgtacgacgaggcctgggagcggattgacaagaaagtggaaggcctgagcaagcacatcaagctggaagaggaacggagaagcgaggacgcccagagcaaggccgccctgaccgactggctgcgggctaaggccagcttcgtgatcgagggcctgaaggaggccgacaaggacgagttctgcagatgcgagctgaagctgcagaagtggtacggggacctgcggggaaagcccttcgccatcgaagccgagaacagcatcctggacatcagcggcttcagcaagcagtacaactgtgccttcatctggcagaaggacggcgtgaagaagctgaacctgtacctgatcatcaactacttcaagggcggcaagctgcggttcaagaagatcaaacctgaagccttcgaagccaacagattctacaccgtgatcaacaaaaagagcggcgagatcgtgcccatggaggtgaacttcaacttcgacgaccccaacctgatcatcctgcctctggcctttggcaagagacagggcagagaattcatctggaacgacctgctgtccctggaaaccggcagcctgaagctggccaacggaagagtgatcgagaagacactgtacaacagaagaacccggcaggatgagcctgccctgttcgtggccctgaccttcgagcggcgggaggtcctggactcctccaatatcaaaccaatgaacctgatcggcgtggcaagaggcgaaaacatccccgccgtgatcgccctgaccgaccccgagggctgcccactgagccggtttaaggatagcctgggaaacccaacccacatcctgagaatcggcgagagctataaggagaagcagcggaccatccaggccaagaaggaggtggagcagcggagagccggcggctacagccggaagtacgccagcaaagccaagaatctggcagacgatatggtgagaaacaccgctagagatctgctgtactacgccgtgacccaggatgccatgctgatcttcgccaacctgagccggggcttcggccggcagggcaagcggaccttcatggccgagagacagtacacacggatggaggactggctgaccgccaagctggcctacgagggcctgagcaagacctacctgtccaagacactggcccagtacacctccaagacatgcagcaactgtgggtttaccatcaccagcgccgactacgacagggtgctggagaagctgaagaagacagcaacaggctggatgaccacaattaacggcaaggagctgaaggtggagggccagattacctactacaacagatacaagagacagaacgtagtcaaggacctgtccgtcgagctggatagactgagcgaagaatctgtgaacaacgacatctcctcctggacaaagggcagaagcggagaagctctgagcctcctgaagaaaagattctcccatagacccgtgcaggagaagttcgtgtgcctgaactgcggcttcgagacacacgcagccgagcaagccgccctgaacatcgccagatcctggctgttcctgcggagccaggagtacaagaaataccagacaaacaagacaaccggcaacaccgataagagagccttcgtcgagacctggcagtccttttaccggaagaagcttaaggaggtgtggaaacctgccgtgcggtctggcggatctggcggaggctccacaagcagccaggagcccgtgaccttcgaggacgtggccgtgtacttcacccagaaccagtgggccagcctggaccccatgcagagggccctgtacctggaggtgatgctggagaactacgccaacatcaccagcctggccgccctgcccttccccaagcccgacctgatcctgcagctggagcagggcgaggccccctggggcctggacccctggacccccctggagagggaggccctgggcggcgtgaccagccccaagaaaaagagaaaagtctaagctgccttctgcggggcttgccttctggccatgcccttcttctctcccttgcacctgtacctcttggtctttgaataaagcctgagtaggaaggctagcaaaaaaaaaaaaaaaaaaaaaaaaaaaaaaaaaaaaaaaaaaaaaaaaaaaaaaaaaaaaaaaaaaaaaaaaaaaaaaaa

SEQ ID NO: 2862 - RNA, 5419 nt, synthetic construct
  source 1..5419: mol_type = other RNA
aggaaataagagagaaaagaagagtaagaagaaatataagagccaccatggcccctaagaagaagcgtaaagtgagccgggtgaacggcagcggcagcggcggcggcatgaaccacgaccaggagttcgacccccctaaggtgtaccctcccgtccccgccgagaagagaaagcccatccgggtcctgagcctgttcgatggcatcgccaccggtctgctggtgctgaaggacctgggcatccaggtggataggtacattgcctccgaggtgtgcgaggactccatcaccgtgggaatggtgcgtcatcagggcaagatcatgtacgtgggcgacgtgcggagcgtgacacagaagcatatccaggagtggggccctttcgacctggtgatcggcggcagcccttgcaatgacctgagcatcgtgaacccagcccggaagggcctgtacgagggaaccggcagactgttcttcgagttttacagactgctgcacgacgcccggcctaaggaaggcgacgaccggcccttcttttggctgttcgagaatgtggtggccatgggagtcagcgacaagcgggatattagccggttcctggagagcaaccccgtgatgatcgatgccaaggaagtgagcgccgcccaccgggccagatacttctggggcaatctgcctggcatgaacagacccctggccagcaccgtgaacgacaagctggagctgcaggagtgcctggagcacggccggatcgccaagttcagcaaggtgagaaccatcaccacccgaagcaacagcatcaaacaaggcaaggaccagcactttcctgtgttcatgaacgagaaggaggacatcctgtggtgtaccgagatggagagagtgttcgggttcccagtccactacacagatgtcagcaacatgtctagactggccagacagagactgctgggaagaagctggtccgtccctgtgatcagacacctgttcgcccctctgaaggagtacttcgcctgcgtgagcagcggcaacagcaacgccaacagccggggccccagcttctctagcggcctggtgccactgtccctgagagggagccacatgggccccatggagatctacaaaaccgtgagcgcctggaagcggcagcctgtgcgcgtgctgagcctgtttcggaatatcgataaagtcctgaaaagcctgggattcctggagagcggctctggctccggcggtggcaccctgaagtacgtggaggatgtgacaaacgtggtcagacgggatgtggagaagtggggccccttcgatctggtgtacggcagcacccaacccctgggcagctcttgtgaccggtgccctggctggtacatgtttcagttccaccggatcctgcagtacgccctgccgagacaggagtcccagcggccattcttttggattttcatggacaacttgctgctgaccgaggatgaccaggaaactaccactcggttcctgcagaccgaagccgtgaccctgcaggacgtgagaggccgggactaccagaacgccatgcgggtgtggtccaacatccctggactgaaaagcaagcacgcacctctgacccctaaagaagaggagtacctgcaggcccaggtgcggagcagaagcaagctggacgcccctaaggtggatctgctggtgaagaattgcctcctgcccctgagagagtacttcaagtatttcagccagaatagtctgcccctgggcggcccaagcagcggcgcccctcctcccagcggcggcagcccagccggctccccaacctctaccgaggagggcacctctgagtccgccacccccgagagcggccctggcacctccaccgagcccagcgagggcagcgcacccggcagccctgccggcagccccacctccacagaggagggaaccagcaccgagcccagcgaaggcagcgccccaggcaccagcaccgagcctagtgagggcggctctggcggcggcagcgcccaggagattaaacggatcaacaagatcagaagaagacttgtgaaagacagcaacaccaagaaggccggcaagacaggccccatgaaaaccctgctggttagagtgatgacacccgatctgagagagcggctggaaaacctgagaaagaagcctgaaaatatcccccagcccatcagcaatacatctagagccaacctgaataagctgctgaccgattacaccgaaatgaagaaggcgatcctgcatgtgtactgggaagagttccagaaggaccctgtgggcctgatgagccgggtggcccagcctgccagcaagaagatcgatcagaacaagctgaaacctgagatggacgagaagggcaacctgaccaccgccggctttgcctgctctcagtgtggccagcccctgttcgtgtacaagctggagcaggtgtctgagaagggcaaggcttacaccaactacttcggacggtgcaatgtggccgagcacgaaaagctgatcctgctggcccagctgaagcccgagaaggatagcgacgaagccgtgacatatagcctgggaaagtttgggcagagggccctggatttctacagcattcatgtgaccaaggagtccacccaccccgtgaagcccctggcccagatcgccggaaacagatacgcctccggacctgtgggaaaggccctgagcgacgcatgtatgggcacaatcgcctccttcctgtctaagtaccaggacatcatcatcgaacaccagaaggtggtgaagggcaaccagaagagactggagagcctgcgggagctggccggcaaggaaaacctggaataccctagcgtgaccctgccacctcagcctcacaccaaggagggcgttgatgcctacaacgaagtgatcgcccgggtgcgaatgtgggtgaacctgaacctgtggcagaagctgaagctaagcagagatgatgccaagcctctgctgagactgaagggattcccttcctttcctctggtcgagagacaggccaacgaagtggactggtgggacatggtgtgtaacgtgaagaagctgatcaacgagaaaaaggaggatggcaaggtgttttggcagaatctggctggctacaagagacaggaagccctgagaccatacctgagcagcgaggaagatcggaagaagggaaagaaattcgctcggtaccagctgggcgacctgctgctgcacctggaaaagaagcacggcgaggactggggaaaggtgtacgacgaggcctgggagcggattgacaagaaagtggaaggcctgagcaagcacatcaagctggaagaggaacggagaagcgaggacgcccagagcaaggccgccctgaccgactggctgcgggctaaggccagcttcgtgatcgagggcctgaaggaggccgacaaggacgagttctgcagatgcgagctgaagctgcagaagtggtacggggacctgcggggaaagcccttcgccatcgaagccgagaacagcatcctggacatcagcggcttcagcaagcagtacaactgtgccttcatctggcagaaggacggcgtgaagaagctgaacctgtacctgatcatcaactacttcaagggcggcaagctgcggttcaagaagatcaaacctgaagccttcgaagccaacagattctacaccgtgatcaacaaaaagagcggcgagatcgtgcccatggaggtgaacttcaacttcgacgaccccaacctgatcatcctgcctctggcctttggcaagagacagggcagagaattcatctggaacgacctgctgtccctggaaaccggcagcctgaagctggccaacggaagagtgatcgagaagacactgtacaacagaagaacccggcaggatgagcctgccctgttcgtggccctgaccttcgagcggcgggaggtcctggactcctccaatatcaaaccaatgaacctgatcggcgtggcaagaggcgaaaacatccccgccgtgatcgccctgaccgaccccgagggctgcccactgagccggtttaaggatagcctgggaaacccaacccacatcctgagaatcggcgagagctataaggagaagcagcggaccatccaggccaagaaggaggtggagcagcggagagccggcggctacagccggaagtacgccagcaaagccaagaatctggcagacgatatggtgagaaacaccgctagagatctgctgtactacgccgtgacccaggatgccatgctgatcttcgccaacctgagccggggcttcggccggcagggcaagcggaccttcatggccgagagacagtacacacggatggaggactggctgaccgccaagctggcctacgagggcctgagcaagacctacctgtccaagacactggcccagtacacctccaagacatgcagcaactgtgggtttaccatcaccagcgccgactacgacagggtgctggagaagctgaagaagacagcaacaggctggatgaccacaattaacggcaaggagctgaaggtggagggccagattacctactacaacagatacaagagacagaacgtagtcaaggacctgtccgtcgagctggatagactgagcgaagaatctgtgaacaacgacatctcctcctggacaaagggcagaagcggagaagctctgagcctcctgaagaaaagattctcccatagacccgtgcaggagaagttcgtgtgcctgaactgcggcttcgagacacacgcagccgagcaagccgccctgaacatcgccagatcctggctgttcctgcggagccaggagtacaagaaataccagacaaacaagacaaccggcaacaccgataagagagccttcgtcgagacctggcagtccttttaccggaagaagcttaaggaggtgtggaaacctgccgtgcggtctggcggatctggcggaggctccacaagcgaggagctgcccgtggtgttcgaggacgtggccgtgtacttcaccagggaggagtgggccatgctggacaagaggcagaaggagctgtacagggacgtgatgaggatgaactacgagctgctggccagcctgggccccgccgccgccaagcccgagctgatcagcaagctggagaggagggccgccccctggatcaaggaccccaacggccccaagtggggcaagggcaggccccccggcaagaccagccccaagaaaaagagaaaagtctaagctgccttctgcggggcttgccttctggccatgcccttcttctctcccttgcacctgtacctcttggtctttgaataaagcctgagtaggaaggctagcaaaaaaaaaaaaaaaaaaaaaaaaaaaaaaaaaaaaaaaaaaaaaaaaaaaaaaaaaaaaaaaaaaaaaaaaaaaaaaaa

SEQ ID NO: 2863 - RNA, 5419 nt, synthetic construct
  source 1..5419: mol_type = other RNA
aggaaataagagagaaaagaagagtaagaagaaatataagagccaccatggcccctaagaagaagcgtaaagtgagccgggtgaacggcagcggcagcggcggcggcatgaaccacgaccaggagttcgacccccctaaggtgtaccctcccgtccccgccgagaagagaaagcccatccgggtcctgagcctgttcgatggcatcgccaccggtctgctggtgctgaaggacctgggcatccaggtggataggtacattgcctccgaggtgtgcgaggactccatcaccgtgggaatggtgcgtcatcagggcaagatcatgtacgtgggcgacgtgcggagcgtgacacagaagcatatccaggagtggggccctttcgacctggtgatcggcggcagcccttgcaatgacctgagcatcgtgaacccagcccggaagggcctgtacgagggaaccggcagactgttcttcgagttttacagactgctgcacgacgcccggcctaaggaaggcgacgaccggcccttcttttggctgttcgagaatgtggtggccatgggagtcagcgacaagcgggatattagccggttcctggagagcaaccccgtgatgatcgatgccaaggaagtgagcgccgcccaccgggccagatacttctggggcaatctgcctggcatgaacagacccctggccagcaccgtgaacgacaagctggagctgcaggagtgcctggagcacggccggatcgccaagttcagcaaggtgagaaccatcaccacccgaagcaacagcatcaaacaaggcaaggaccagcactttcctgtgttcatgaacgagaaggaggacatcctgtggtgtaccgagatggagagagtgttcgggttcccagtccactacacagatgtcagcaacatgtctagactggccagacagagactgctgggaagaagctggtccgtccctgtgatcagacacctgttcgcccctctgaaggagtacttcgcctgcgtgagcagcggcaacagcaacgccaacagccggggccccagcttctctagcggcctggtgccactgtccctgagagggagccacatgggccccatggagatctacaaaaccgtgagcgcctggaagcggcagcctgtgcgcgtgctgagcctgtttcggaatatcgataaagtcctgaaaagcctgggattcctggagagcggctctggctccggcggtggcaccctgaagtacgtggaggatgtgacaaacgtggtcagacgggatgtggagaagtggggccccttcgatctggtgtacggcagcacccaacccctgggcagctcttgtgaccggtgccctggctggtacatgtttcagttccaccggatcctgcagtacgccctgccgagacaggagtcccagcggccattcttttggattttcatggacaacttgctgctgaccgaggatgaccaggaaactaccactcggttcctgcagaccgaagccgtgaccctgcaggacgtgagaggccgggactaccagaacgccatgcgggtgtggtccaacatccctggactgaaaagcaagcacgcacctctgacccctaaagaagaggagtacctgcaggcccaggtgcggagcagaagcaagctggacgcccctaaggtggatctgctggtgaagaattgcctcctgcccctgagagagtacttcaagtatttcagccagaatagtctgcccctgggcggcccaagcagcggcgcccctcctcccagcggcggcagcccagccggctccccaacctctaccgaggagggcacctctgagtccgccacccccgagagcggccctggcacctccaccgagcccagcgagggcagcgcacccggcagccctgccggcagccccacctccacagaggagggaaccagcaccgagcccagcgaaggcagcgccccaggcaccagcaccgagcctagtgagggcggctctggcggcggcagcgcccaggagattaaacggatcaacaagatcagaagaagacttgtgaaagacagcaacaccaagaaggccggcaagacaggccccatgaaaaccctgctggttagagtgatgacacccgatctgagagagcggctggaaaacctgagaaagaagcctgaaaatatcccccagcccatcagcaatacatctagagccaacctgaataagctgctgaccgattacaccgaaatgaagaaggcgatcctgcatgtgtactgggaagagttccagaaggaccctgtgggcctgatgagccgggtggcccagcctgccagcaagaagatcgatcagaacaagctgaaacctgagatggacgagaagggcaacctgaccaccgccggctttgcctgctctcagtgtggccagcccctgttcgtgtacaagctggagcaggtgtctgagaagggcaaggcttacaccaactacttcggacggtgcaatgtggccgagcacgaaaagctgatcctgctggcccagctgaagcccgagaaggatagcgacgaagccgtgacatatagcctgggaaagtttgggcagagggccctggatttctacagcattcatgtgaccaaggagtccacccaccccgtgaagcccctggcccagatcgccggaaacagatacgcctccggacctgtgggaaaggccctgagcgacgcatgtatgggcacaatcgcctccttcctgtctaagtaccaggacatcatcatcgaacaccagaaggtggtgaagggcaaccagaagagactggagagcctgcgggagctggccggcaaggaaaacctggaataccctagcgtgaccctgccacctcagcctcacaccaaggagggcgttgatgcctacaacgaagtgatcgcccgggtgcgaatgtgggtgaacctgaacctgtggcagaagctgaagctaagcagagatgatgccaagcctctgctgagactgaagggattcccttcctttcctctggtcgagagacaggccaacgaagtggactggtgggacatggtgtgtaacgtgaagaagctgatcaacgagaaaaaggaggatggcaaggtgttttggcagaatctggctggctacaagagacaggaagccctgagaccatacctgagcagcgaggaagatcggaagaagggaaagaaattcgctcggtaccagctgggcgacctgctgctgcacctggaaaagaagcacggcgaggactggggaaaggtgtacgacgaggcctgggagcggattgacaagaaagtggaaggcctgagcaagcacatcaagctggaagaggaacggagaagcgaggacgcccagagcaaggccgccctgaccgactggctgcgggctaaggccagcttcgtgatcgagggcctgaaggaggccgacaaggacgagttctgcagatgcgagctgaagctgcagaagtggtacggggacctgcggggaaagcccttcgccatcgaagccgagaacagcatcctggacatcagcggcttcagcaagcagtacaactgtgccttcatctggcagaaggacggcgtgaagaagctgaacctgtacctgatcatcaactacttcaagggcggcaagctgcggttcaagaagatcaaacctgaagccttcgaagccaacagattctacaccgtgatcaacaaaaagagcggcgagatcgtgcccatggaggtgaacttcaacttcgacgaccccaacctgatcatcctgcctctggcctttggcaagagacagggcagagaattcatctggaacgacctgctgtccctggaaaccggcagcctgaagctggccaacggaagagtgatcgagaagacactgtacaacagaagaacccggcaggatgagcctgccctgttcgtggccctgaccttcgagcggcgggaggtcctggactcctccaatatcaaaccaatgaacctgatcggcgtggcaagaggcgaaaacatccccgccgtgatcgccctgaccgaccccgagggctgcccactgagccggtttaaggatagcctgggaaacccaacccacatcctgagaatcggcgagagctataaggagaagcagcggaccatccaggccaagaaggaggtggagcagcggagagccggcggctacagccggaagtacgccagcaaagccaagaatctggcagacgatatggtgagaaacaccgctagagatctgctgtactacgccgtgacccaggatgccatgctgatcttcgccaacctgagccggggcttcggccggcagggcaagcggaccttcatggccgagagacagtacacacggatggaggactggctgaccgccaagctggcctacgagggcctgagcaagacctacctgtccaagacactggcccagtacacctccaagacatgcagcaactgtgggtttaccatcaccagcgccgactacgacagggtgctggagaagctgaagaagacagcaacaggctggatgaccacaattaacggcaaggagctgaaggtggagggccagattacctactacaacagatacaagagacagaacgtagtcaaggacctgtccgtcgagctggatagactgagcgaagaatctgtgaacaacgacatctcctcctggacaaagggcagaagcggagaagctctgagcctcctgaagaaaagattctcccatagacccgtgcaggagaagttcgtgtgcctgaactgcggcttcgagacacacgcagccgagcaagccgccctgaacatcgccagatcctggctgttcctgcggagccaggagtacaagaaataccagacaaacaagacaaccggcaacaccgataagagagccttcgtcgagacctggcagtccttttaccggaagaagcttaaggaggtgtggaaacctgccgtgcggtctggcggatctggcggaggctccacaagcgcccagggccccgtgaccttcgaggacgtggccgtgtacttcagcgccgaggagtggcaggagctggccggctggcagagggagctgtacagggacgtgatgatggacacctacgagctggtggccagcctgggccccgccggcctgaagcccgaggtggtgagcaagctggagaggggcgaggagccccaccagcccgccaggagcagggagagccccagggcccccctgcccgtgctgctgaccagccccaagaaaaagagaaaagtctaagctgccttctgcggggcttgccttctggccatgcccttcttctctcccttgcacctgtacctcttggtctttgaataaagcctgagtaggaaggctagcaaaaaaaaaaaaaaaaaaaaaaaaaaaaaaaaaaaaaaaaaaaaaaaaaaaaaaaaaaaaaaaaaaaaaaaaaaaaaaaa

SEQ ID NO: 2864 - RNA, 5419 nt, synthetic construct
  source 1..5419: mol_type = other RNA
aggaaataagagagaaaagaagagtaagaagaaatataagagccaccatggcccctaagaagaagcgtaaagtgagccgggtgaacggcagcggcagcggcggcggcatgaaccacgaccaggagttcgacccccctaaggtgtaccctcccgtccccgccgagaagagaaagcccatccgggtcctgagcctgttcgatggcatcgccaccggtctgctggtgctgaaggacctgggcatccaggtggataggtacattgcctccgaggtgtgcgaggactccatcaccgtgggaatggtgcgtcatcagggcaagatcatgtacgtgggcgacgtgcggagcgtgacacagaagcatatccaggagtggggccctttcgacctggtgatcggcggcagcccttgcaatgacctgagcatcgtgaacccagcccggaagggcctgtacgagggaaccggcagactgttcttcgagttttacagactgctgcacgacgcccggcctaaggaaggcgacgaccggcccttcttttggctgttcgagaatgtggtggccatgggagtcagcgacaagcgggatattagccggttcctggagagcaaccccgtgatgatcgatgccaaggaagtgagcgccgcccaccgggccagatacttctggggcaatctgcctggcatgaacagacccctggccagcaccgtgaacgacaagctggagctgcaggagtgcctggagcacggccggatcgccaagttcagcaaggtgagaaccatcaccacccgaagcaacagcatcaaacaaggcaaggaccagcactttcctgtgttcatgaacgagaaggaggacatcctgtggtgtaccgagatggagagagtgttcgggttcccagtccactacacagatgtcagcaacatgtctagactggccagacagagactgctgggaagaagctggtccgtccctgtgatcagacacctgttcgcccctctgaaggagtacttcgcctgcgtgagcagcggcaacagcaacgccaacagccggggccccagcttctctagcggcctggtgccactgtccctgagagggagccacatgggccccatggagatctacaaaaccgtgagcgcctggaagcggcagcctgtgcgcgtgctgagcctgtttcggaatatcgataaagtcctgaaaagcctgggattcctggagagcggctctggctccggcggtggcaccctgaagtacgtggaggatgtgacaaacgtggtcagacgggatgtggagaagtggggccccttcgatctggtgtacggcagcacccaacccctgggcagctcttgtgaccggtgccctggctggtacatgtttcagttccaccggatcctgcagtacgccctgccgagacaggagtcccagcggccattcttttggattttcatggacaacttgctgctgaccgaggatgaccaggaaactaccactcggttcctgcagaccgaagccgtgaccctgcaggacgtgagaggccgggactaccagaacgccatgcgggtgtggtccaacatccctggactgaaaagcaagcacgcacctctgacccctaaagaagaggagtacctgcaggcccaggtgcggagcagaagcaagctggacgcccctaaggtggatctgctggtgaagaattgcctcctgcccctgagagagtacttcaagtatttcagccagaatagtctgcccctgggcggcccaagcagcggcgcccctcctcccagcggcggcagcccagccggctccccaacctctaccgaggagggcacctctgagtccgccacccccgagagcggccctggcacctccaccgagcccagcgagggcagcgcacccggcagccctgccggcagccccacctccacagaggagggaaccagcaccgagcccagcgaaggcagcgccccaggcaccagcaccgagcctagtgagggcggctctggcggcggcagcgcccaggagattaaacggatcaacaagatcagaagaagacttgtgaaagacagcaacaccaagaaggccggcaagacaggccccatgaaaaccctgctggttagagtgatgacacccgatctgagagagcggctggaaaacctgagaaagaagcctgaaaatatcccccagcccatcagcaatacatctagagccaacctgaataagctgctgaccgattacaccgaaatgaagaaggcgatcctgcatgtgtactgggaagagttccagaaggaccctgtgggcctgatgagccgggtggcccagcctgccagcaagaagatcgatcagaacaagctgaaacctgagatggacgagaagggcaacctgaccaccgccggctttgcctgctctcagtgtggccagcccctgttcgtgtacaagctggagcaggtgtctgagaagggcaaggcttacaccaactacttcggacggtgcaatgtggccgagcacgaaaagctgatcctgctggcccagctgaagcccgagaaggatagcgacgaagccgtgacatatagcctgggaaagtttgggcagagggccctggatttctacagcattcatgtgaccaaggagtccacccaccccgtgaagcccctggcccagatcgccggaaacagatacgcctccggacctgtgggaaaggccctgagcgacgcatgtatgggcacaatcgcctccttcctgtctaagtaccaggacatcatcatcgaacaccagaaggtggtgaagggcaaccagaagagactggagagcctgcgggagctggccggcaaggaaaacctggaataccctagcgtgaccctgccacctcagcctcacaccaaggagggcgttgatgcctacaacgaagtgatcgcccgggtgcgaatgtgggtgaacctgaacctgtggcagaagctgaagctaagcagagatgatgccaagcctctgctgagactgaagggattcccttcctttcctctggtcgagagacaggccaacgaagtggactggtgggacatggtgtgtaacgtgaagaagctgatcaacgagaaaaaggaggatggcaaggtgttttggcagaatctggctggctacaagagacaggaagccctgagaccatacctgagcagcgaggaagatcggaagaagggaaagaaattcgctcggtaccagctgggcgacctgctgctgcacctggaaaagaagcacggcgaggactggggaaaggtgtacgacgaggcctgggagcggattgacaagaaagtggaaggcctgagcaagcacatcaagctggaagaggaacggagaagcgaggacgcccagagcaaggccgccctgaccgactggctgcgggctaaggccagcttcgtgatcgagggcctgaaggaggccgacaaggacgagttctgcagatgcgagctgaagctgcagaagtggtacggggacctgcggggaaagcccttcgccatcgaagccgagaacagcatcctggacatcagcggcttcagcaagcagtacaactgtgccttcatctggcagaaggacggcgtgaagaagctgaacctgtacctgatcatcaactacttcaagggcggcaagctgcggttcaagaagatcaaacctgaagccttcgaagccaacagattctacaccgtgatcaacaaaaagagcggcgagatcgtgcccatggaggtgaacttcaacttcgacgaccccaacctgatcatcctgcctctggcctttggcaagagacagggcagagaattcatctggaacgacctgctgtccctggaaaccggcagcctgaagctggccaacggaagagtgatcgagaagacactgtacaacagaagaacccggcaggatgagcctgccctgttcgtggccctgaccttcgagcggcgggaggtcctggactcctccaatatcaaaccaatgaacctgatcggcgtggcaagaggcgaaaacatccccgccgtgatcgccctgaccgaccccgagggctgcccactgagccggtttaaggatagcctgggaaacccaacccacatcctgagaatcggcgagagctataaggagaagcagcggaccatccaggccaagaaggaggtggagcagcggagagccggcggctacagccggaagtacgccagcaaagccaagaatctggcagacgatatggtgagaaacaccgctagagatctgctgtactacgccgtgacccaggatgccatgctgatcttcgccaacctgagccggggcttcggccggcagggcaagcggaccttcatggccgagagacagtacacacggatggaggactggctgaccgccaagctggcctacgagggcctgagcaagacctacctgtccaagacactggcccagtacacctccaagacatgcagcaactgtgggtttaccatcaccagcgccgactacgacagggtgctggagaagctgaagaagacagcaacaggctggatgaccacaattaacggcaaggagctgaaggtggagggccagattacctactacaacagatacaagagacagaacgtagtcaaggacctgtccgtcgagctggatagactgagcgaagaatctgtgaacaacgacatctcctcctggacaaagggcagaagcggagaagctctgagcctcctgaagaaaagattctcccatagacccgtgcaggagaagttcgtgtgcctgaactgcggcttcgagacacacgcagccgagcaagccgccctgaacatcgccagatcctggctgttcctgcggagccaggagtacaagaaataccagacaaacaagacaaccggcaacaccgataagagagccttcgtcgagacctggcagtccttttaccggaagaagcttaaggaggtgtggaaacctgccgtgcggtctggcggatctggcggaggctccacaagcaagaccgcccccgtgaccttcgacgacgtggccgtgtacttcagcgccgaggagtgggaggagctggccgagtggcagaaggagctgtacaaggacgtgatgagggacaactacgaggccctgatcagcctgggccacgccgccgccaagcccgacatcatccagctgctggagcacggcgaggagccctgcgtgaagggccacaaggacagcggcaacggcaaggccttcaacttcatcagcaccagccccaagaaaaagagaaaagtctaagctgccttctgcggggcttgccttctggccatgcccttcttctctcccttgcacctgtacctcttggtctttgaataaagcctgagtaggaaggctagcaaaaaaaaaaaaaaaaaaaaaaaaaaaaaaaaaaaaaaaaaaaaaaaaaaaaaaaaaaaaaaaaaaaaaaaaaaaaaaaa

SEQ ID NO: 2865 - RNA, 5419 nt, synthetic construct
  source 1..5419: mol_type = other RNA
aggaaataagagagaaaagaagagtaagaagaaatataagagccaccatggcccctaagaagaagcgtaaagtgagccgggtgaacggcagcggcagcggcggcggcatgaaccacgaccaggagttcgacccccctaaggtgtaccctcccgtccccgccgagaagagaaagcccatccgggtcctgagcctgttcgatggcatcgccaccggtctgctggtgctgaaggacctgggcatccaggtggataggtacattgcctccgaggtgtgcgaggactccatcaccgtgggaatggtgcgtcatcagggcaagatcatgtacgtgggcgacgtgcggagcgtgacacagaagcatatccaggagtggggccctttcgacctggtgatcggcggcagcccttgcaatgacctgagcatcgtgaacccagcccggaagggcctgtacgagggaaccggcagactgttcttcgagttttacagactgctgcacgacgcccggcctaaggaaggcgacgaccggcccttcttttggctgttcgagaatgtggtggccatgggagtcagcgacaagcgggatattagccggttcctggagagcaaccccgtgatgatcgatgccaaggaagtgagcgccgcccaccgggccagatacttctggggcaatctgcctggcatgaacagacccctggccagcaccgtgaacgacaagctggagctgcaggagtgcctggagcacggccggatcgccaagttcagcaaggtgagaaccatcaccacccgaagcaacagcatcaaacaaggcaaggaccagcactttcctgtgttcatgaacgagaaggaggacatcctgtggtgtaccgagatggagagagtgttcgggttcccagtccactacacagatgtcagcaacatgtctagactggccagacagagactgctgggaagaagctggtccgtccctgtgatcagacacctgttcgcccctctgaaggagtacttcgcctgcgtgagcagcggcaacagcaacgccaacagccggggccccagcttctctagcggcctggtgccactgtccctgagagggagccacatgggccccatggagatctacaaaaccgtgagcgcctggaagcggcagcctgtgcgcgtgctgagcctgtttcggaatatcgataaagtcctgaaaagcctgggattcctggagagcggctctggctccggcggtggcaccctgaagtacgtggaggatgtgacaaacgtggtcagacgggatgtggagaagtggggccccttcgatctggtgtacggcagcacccaacccctgggcagctcttgtgaccggtgccctggctggtacatgtttcagttccaccggatcctgcagtacgccctgccgagacaggagtcccagcggccattcttttggattttcatggacaacttgctgctgaccgaggatgaccaggaaactaccactcggttcctgcagaccgaagccgtgaccctgcaggacgtgagaggccgggactaccagaacgccatgcgggtgtggtccaacatccctggactgaaaagcaagcacgcacctctgacccctaaagaagaggagtacctgcaggcccaggtgcggagcagaagcaagctggacgcccctaaggtggatctgctggtgaagaattgcctcctgcccctgagagagtacttcaagtatttcagccagaatagtctgcccctgggcggcccaagcagcggcgcccctcctcccagcggcggcagcccagccggctccccaacctctaccgaggagggcacctctgagtccgccacccccgagagcggccctggcacctccaccgagcccagcgagggcagcgcacccggcagccctgccggcagccccacctccacagaggagggaaccagcaccgagcccagcgaaggcagcgccccaggcaccagcaccgagcctagtgagggcggctctggcggcggcagcgcccaggagattaaacggatcaacaagatcagaagaagacttgtgaaagacagcaacaccaagaaggccggcaagacaggccccatgaaaaccctgctggttagagtgatgacacccgatctgagagagcggctggaaaacctgagaaagaagcctgaaaatatcccccagcccatcagcaatacatctagagccaacctgaataagctgctgaccgattacaccgaaatgaagaaggcgatcctgcatgtgtactgggaagagttccagaaggaccctgtgggcctgatgagccgggtggcccagcctgccagcaagaagatcgatcagaacaagctgaaacctgagatggacgagaagggcaacctgaccaccgccggctttgcctgctctcagtgtggccagcccctgttcgtgtacaagctggagcaggtgtctgagaagggcaaggcttacaccaactacttcggacggtgcaatgtggccgagcacgaaaagctgatcctgctggcccagctgaagcccgagaaggatagcgacgaagccgtgacatatagcctgggaaagtttgggcagagggccctggatttctacagcattcatgtgaccaaggagtccacccaccccgtgaagcccctggcccagatcgccggaaacagatacgcctccggacctgtgggaaaggccctgagcgacgcatgtatgggcacaatcgcctccttcctgtctaagtaccaggacatcatcatcgaacaccagaaggtggtgaagggcaaccagaagagactggagagcctgcgggagctggccggcaaggaaaacctggaataccctagcgtgaccctgccacctcagcctcacaccaaggagggcgttgatgcctacaacgaagtgatcgcccgggtgcgaatgtgggtgaacctgaacctgtggcagaagctgaagctaagcagagatgatgccaagcctctgctgagactgaagggattcccttcctttcctctggtcgagagacaggccaacgaagtggactggtgggacatggtgtgtaacgtgaagaagctgatcaacgagaaaaaggaggatggcaaggtgttttggcagaatctggctggctacaagagacaggaagccctgagaccatacctgagcagcgaggaagatcggaagaagggaaagaaattcgctcggtaccagctgggcgacctgctgctgcacctggaaaagaagcacggcgaggactggggaaaggtgtacgacgaggcctgggagcggattgacaagaaagtggaaggcctgagcaagcacatcaagctggaagaggaacggagaagcgaggacgcccagagcaaggccgccctgaccgactggctgcgggctaaggccagcttcgtgatcgagggcctgaaggaggccgacaaggacgagttctgcagatgcgagctgaagctgcagaagtggtacggggacctgcggggaaagcccttcgccatcgaagccgagaacagcatcctggacatcagcggcttcagcaagcagtacaactgtgccttcatctggcagaaggacggcgtgaagaagctgaacctgtacctgatcatcaactacttcaagggcggcaagctgcggttcaagaagatcaaacctgaagccttcgaagccaacagattctacaccgtgatcaacaaaaagagcggcgagatcgtgcccatggaggtgaacttcaacttcgacgaccccaacctgatcatcctgcctctggcctttggcaagagacagggcagagaattcatctggaacgacctgctgtccctggaaaccggcagcctgaagctggccaacggaagagtgatcgagaagacactgtacaacagaagaacccggcaggatgagcctgccctgttcgtggccctgaccttcgagcggcgggaggtcctggactcctccaatatcaaaccaatgaacctgatcggcgtggcaagaggcgaaaacatccccgccgtgatcgccctgaccgaccccgagggctgcccactgagccggtttaaggatagcctgggaaacccaacccacatcctgagaatcggcgagagctataaggagaagcagcggaccatccaggccaagaaggaggtggagcagcggagagccggcggctacagccggaagtacgccagcaaagccaagaatctggcagacgatatggtgagaaacaccgctagagatctgctgtactacgccgtgacccaggatgccatgctgatcttcgccaacctgagccggggcttcggccggcagggcaagcggaccttcatggccgagagacagtacacacggatggaggactggctgaccgccaagctggcctacgagggcctgagcaagacctacctgtccaagacactggcccagtacacctccaagacatgcagcaactgtgggtttaccatcaccagcgccgactacgacagggtgctggagaagctgaagaagacagcaacaggctggatgaccacaattaacggcaaggagctgaaggtggagggccagattacctactacaacagatacaagagacagaacgtagtcaaggacctgtccgtcgagctggatagactgagcgaagaatctgtgaacaacgacatctcctcctggacaaagggcagaagcggagaagctctgagcctcctgaagaaaagattctcccatagacccgtgcaggagaagttcgtgtgcctgaactgcggcttcgagacacacgcagccgagcaagccgccctgaacatcgccagatcctggctgttcctgcggagccaggagtacaagaaataccagacaaacaagacaaccggcaacaccgataagagagccttcgtcgagacctggcagtccttttaccggaagaagcttaaggaggtgtggaaacctgccgtgcggtctggcggatctggcggaggctccacaagcatggccgtggacctgctgagcgcccaggagagggtgaccttcagggacgtggccgtgttcttcagccaggacgagtggctgcacctggacagcgcccagagggccctgtacagggaggtgatgctggagaactacagcatcctggtgagcctgggcatccccttcagcatgcccaagctgatccaccagctgcagcagggcgaggacccctgcatggtggagagggaggtgcccagcgacaccaccagccccaagaaaaagagaaaagtctaagctgccttctgcggggcttgccttctggccatgcccttcttctctcccttgcacctgtacctcttggtctttgaataaagcctgagtaggaaggctagcaaaaaaaaaaaaaaaaaaaaaaaaaaaaaaaaaaaaaaaaaaaaaaaaaaaaaaaaaaaaaaaaaaaaaaaaaaaaaaaa

SEQ ID NO: 2866 - RNA, 5419 nt, synthetic construct
  source 1..5419: mol_type = other RNA
aggaaataagagagaaaagaagagtaagaagaaatataagagccaccatggcccctaagaagaagcgtaaagtgagccgggtgaacggcagcggcagcggcggcggcatgaaccacgaccaggagttcgacccccctaaggtgtaccctcccgtccccgccgagaagagaaagcccatccgggtcctgagcctgttcgatggcatcgccaccggtctgctggtgctgaaggacctgggcatccaggtggataggtacattgcctccgaggtgtgcgaggactccatcaccgtgggaatggtgcgtcatcagggcaagatcatgtacgtgggcgacgtgcggagcgtgacacagaagcatatccaggagtggggccctttcgacctggtgatcggcggcagcccttgcaatgacctgagcatcgtgaacccagcccggaagggcctgtacgagggaaccggcagactgttcttcgagttttacagactgctgcacgacgcccggcctaaggaaggcgacgaccggcccttcttttggctgttcgagaatgtggtggccatgggagtcagcgacaagcgggatattagccggttcctggagagcaaccccgtgatgatcgatgccaaggaagtgagcgccgcccaccgggccagatacttctggggcaatctgcctggcatgaacagacccctggccagcaccgtgaacgacaagctggagctgcaggagtgcctggagcacggccggatcgccaagttcagcaaggtgagaaccatcaccacccgaagcaacagcatcaaacaaggcaaggaccagcactttcctgtgttcatgaacgagaaggaggacatcctgtggtgtaccgagatggagagagtgttcgggttcccagtccactacacagatgtcagcaacatgtctagactggccagacagagactgctgggaagaagctggtccgtccctgtgatcagacacctgttcgcccctctgaaggagtacttcgcctgcgtgagcagcggcaacagcaacgccaacagccggggccccagcttctctagcggcctggtgccactgtccctgagagggagccacatgggccccatggagatctacaaaaccgtgagcgcctggaagcggcagcctgtgcgcgtgctgagcctgtttcggaatatcgataaagtcctgaaaagcctgggattcctggagagcggctctggctccggcggtggcaccctgaagtacgtggaggatgtgacaaacgtggtcagacgggatgtggagaagtggggccccttcgatctggtgtacggcagcacccaacccctgggcagctcttgtgaccggtgccctggctggtacatgtttcagttccaccggatcctgcagtacgccctgccgagacaggagtcccagcggccattcttttggattttcatggacaacttgctgctgaccgaggatgaccaggaaactaccactcggttcctgcagaccgaagccgtgaccctgcaggacgtgagaggccgggactaccagaacgccatgcgggtgtggtccaacatccctggactgaaaagcaagcacgcacctctgacccctaaagaagaggagtacctgcaggcccaggtgcggagcagaagcaagctggacgcccctaaggtggatctgctggtgaagaattgcctcctgcccctgagagagtacttcaagtatttcagccagaatagtctgcccctgggcggcccaagcagcggcgcccctcctcccagcggcggcagcccagccggctccccaacctctaccgaggagggcacctctgagtccgccacccccgagagcggccctggcacctccaccgagcccagcgagggcagcgcacccggcagccctgccggcagccccacctccacagaggagggaaccagcaccgagcccagcgaaggcagcgccccaggcaccagcaccgagcctagtgagggcggctctggcggcggcagcgcccaggagattaaacggatcaacaagatcagaagaagacttgtgaaagacagcaacaccaagaaggccggcaagacaggccccatgaaaaccctgctggttagagtgatgacacccgatctgagagagcggctggaaaacctgagaaagaagcctgaaaatatcccccagcccatcagcaatacatctagagccaacctgaataagctgctgaccgattacaccgaaatgaagaaggcgatcctgcatgtgtactgggaagagttccagaaggaccctgtgggcctgatgagccgggtggcccagcctgccagcaagaagatcgatcagaacaagctgaaacctgagatggacgagaagggcaacctgaccaccgccggctttgcctgctctcagtgtggccagcccctgttcgtgtacaagctggagcaggtgtctgagaagggcaaggcttacaccaactacttcggacggtgcaatgtggccgagcacgaaaagctgatcctgctggcccagctgaagcccgagaaggatagcgacgaagccgtgacatatagcctgggaaagtttgggcagagggccctggatttctacagcattcatgtgaccaaggagtccacccaccccgtgaagcccctggcccagatcgccggaaacagatacgcctccggacctgtgggaaaggccctgagcgacgcatgtatgggcacaatcgcctccttcctgtctaagtaccaggacatcatcatcgaacaccagaaggtggtgaagggcaaccagaagagactggagagcctgcgggagctggccggcaaggaaaacctggaataccctagcgtgaccctgccacctcagcctcacaccaaggagggcgttgatgcctacaacgaagtgatcgcccgggtgcgaatgtgggtgaacctgaacctgtggcagaagctgaagctaagcagagatgatgccaagcctctgctgagactgaagggattcccttcctttcctctggtcgagagacaggccaacgaagtggactggtgggacatggtgtgtaacgtgaagaagctgatcaacgagaaaaaggaggatggcaaggtgttttggcagaatctggctggctacaagagacaggaagccctgagaccatacctgagcagcgaggaagatcggaagaagggaaagaaattcgctcggtaccagctgggcgacctgctgctgcacctggaaaagaagcacggcgaggactggggaaaggtgtacgacgaggcctgggagcggattgacaagaaagtggaaggcctgagcaagcacatcaagctggaagaggaacggagaagcgaggacgcccagagcaaggccgccctgaccgactggctgcgggctaaggccagcttcgtgatcgagggcctgaaggaggccgacaaggacgagttctgcagatgcgagctgaagctgcagaagtggtacggggacctgcggggaaagcccttcgccatcgaagccgagaacagcatcctggacatcagcggcttcagcaagcagtacaactgtgccttcatctggcagaaggacggcgtgaagaagctgaacctgtacctgatcatcaactacttcaagggcggcaagctgcggttcaagaagatcaaacctgaagccttcgaagccaacagattctacaccgtgatcaacaaaaagagcggcgagatcgtgcccatggaggtgaacttcaacttcgacgaccccaacctgatcatcctgcctctggcctttggcaagagacagggcagagaattcatctggaacgacctgctgtccctggaaaccggcagcctgaagctggccaacggaagagtgatcgagaagacactgtacaacagaagaacccggcaggatgagcctgccctgttcgtggccctgaccttcgagcggcgggaggtcctggactcctccaatatcaaaccaatgaacctgatcggcgtggcaagaggcgaaaacatccccgccgtgatcgccctgaccgaccccgagggctgcccactgagccggtttaaggatagcctgggaaacccaacccacatcctgagaatcggcgagagctataaggagaagcagcggaccatccaggccaagaaggaggtggagcagcggagagccggcggctacagccggaagtacgccagcaaagccaagaatctggcagacgatatggtgagaaacaccgctagagatctgctgtactacgccgtgacccaggatgccatgctgatcttcgccaacctgagccggggcttcggccggcagggcaagcggaccttcatggccgagagacagtacacacggatggaggactggctgaccgccaagctggcctacgagggcctgagcaagacctacctgtccaagacactggcccagtacacctccaagacatgcagcaactgtgggtttaccatcaccagcgccgactacgacagggtgctggagaagctgaagaagacagcaacaggctggatgaccacaattaacggcaaggagctgaaggtggagggccagattacctactacaacagatacaagagacagaacgtagtcaaggacctgtccgtcgagctggatagactgagcgaagaatctgtgaacaacgacatctcctcctggacaaagggcagaagcggagaagctctgagcctcctgaagaaaagattctcccatagacccgtgcaggagaagttcgtgtgcctgaactgcggcttcgagacacacgcagccgagcaagccgccctgaacatcgccagatcctggctgttcctgcggagccaggagtacaagaaataccagacaaacaagacaaccggcaacaccgataagagagccttcgtcgagacctggcagtccttttaccggaagaagcttaaggaggtgtggaaacctgccgtgcggtctggcggatctggcggaggctccacaagcccccaggagctggtgaccttcgaggacgtggccgtgtacctgaccaaggaggagtgggagcacctgggccccgcccagaggaggctgtacagggacgtgatgctggagaactacgagaacgtggtgagcctgggcttccccgtgagcaagcccgacctgatcagccagctggagcagggcgaggtgccctgcctgcccgacctgcccaggaccgaggtgcccgagatccacggcggccccctgaccagccccaagaaaaagagaaaagtctaagctgccttctgcggggcttgccttctggccatgcccttcttctctcccttgcacctgtacctcttggtctttgaataaagcctgagtaggaaggctagcaaaaaaaaaaaaaaaaaaaaaaaaaaaaaaaaaaaaaaaaaaaaaaaaaaaaaaaaaaaaaaaaaaaaaaaaaaaaaaaa

SEQ ID NO: 2867 - RNA, 5419 nt, synthetic construct
  source 1..5419: mol_type = other RNA
aggaaataagagagaaaagaagagtaagaagaaatataagagccaccatggcccctaagaagaagcgtaaagtgagccgggtgaacggcagcggcagcggcggcggcatgaaccacgaccaggagttcgacccccctaaggtgtaccctcccgtccccgccgagaagagaaagcccatccgggtcctgagcctgttcgatggcatcgccaccggtctgctggtgctgaaggacctgggcatccaggtggataggtacattgcctccgaggtgtgcgaggactccatcaccgtgggaatggtgcgtcatcagggcaagatcatgtacgtgggcgacgtgcggagcgtgacacagaagcatatccaggagtggggccctttcgacctggtgatcggcggcagcccttgcaatgacctgagcatcgtgaacccagcccggaagggcctgtacgagggaaccggcagactgttcttcgagttttacagactgctgcacgacgcccggcctaaggaaggcgacgaccggcccttcttttggctgttcgagaatgtggtggccatgggagtcagcgacaagcgggatattagccggttcctggagagcaaccccgtgatgatcgatgccaaggaagtgagcgccgcccaccgggccagatacttctggggcaatctgcctggcatgaacagacccctggccagcaccgtgaacgacaagctggagctgcaggagtgcctggagcacggccggatcgccaagttcagcaaggtgagaaccatcaccacccgaagcaacagcatcaaacaaggcaaggaccagcactttcctgtgttcatgaacgagaaggaggacatcctgtggtgtaccgagatggagagagtgttcgggttcccagtccactacacagatgtcagcaacatgtctagactggccagacagagactgctgggaagaagctggtccgtccctgtgatcagacacctgttcgcccctctgaaggagtacttcgcctgcgtgagcagcggcaacagcaacgccaacagccggggccccagcttctctagcggcctggtgccactgtccctgagagggagccacatgggccccatggagatctacaaaaccgtgagcgcctggaagcggcagcctgtgcgcgtgctgagcctgtttcggaatatcgataaagtcctgaaaagcctgggattcctggagagcggctctggctccggcggtggcaccctgaagtacgtggaggatgtgacaaacgtggtcagacgggatgtggagaagtggggccccttcgatctggtgtacggcagcacccaacccctgggcagctcttgtgaccggtgccctggctggtacatgtttcagttccaccggatcctgcagtacgccctgccgagacaggagtcccagcggccattcttttggattttcatggacaacttgctgctgaccgaggatgaccaggaaactaccactcggttcctgcagaccgaagccgtgaccctgcaggacgtgagaggccgggactaccagaacgccatgcgggtgtggtccaacatccctggactgaaaagcaagcacgcacctctgacccctaaagaagaggagtacctgcaggcccaggtgcggagcagaagcaagctggacgcccctaaggtggatctgctggtgaagaattgcctcctgcccctgagagagtacttcaagtatttcagccagaatagtctgcccctgggcggcccaagcagcggcgcccctcctcccagcggcggcagcccagccggctccccaacctctaccgaggagggcacctctgagtccgccacccccgagagcggccctggcacctccaccgagcccagcgagggcagcgcacccggcagccctgccggcagccccacctccacagaggagggaaccagcaccgagcccagcgaaggcagcgccccaggcaccagcaccgagcctagtgagggcggctctggcggcggcagcgcccaggagattaaacggatcaacaagatcagaagaagacttgtgaaagacagcaacaccaagaaggccggcaagacaggccccatgaaaaccctgctggttagagtgatgacacccgatctgagagagcggctggaaaacctgagaaagaagcctgaaaatatcccccagcccatcagcaatacatctagagccaacctgaataagctgctgaccgattacaccgaaatgaagaaggcgatcctgcatgtgtactgggaagagttccagaaggaccctgtgggcctgatgagccgggtggcccagcctgccagcaagaagatcgatcagaacaagctgaaacctgagatggacgagaagggcaacctgaccaccgccggctttgcctgctctcagtgtggccagcccctgttcgtgtacaagctggagcaggtgtctgagaagggcaaggcttacaccaactacttcggacggtgcaatgtggccgagcacgaaaagctgatcctgctggcccagctgaagcccgagaaggatagcgacgaagccgtgacatatagcctgggaaagtttgggcagagggccctggatttctacagcattcatgtgaccaaggagtccacccaccccgtgaagcccctggcccagatcgccggaaacagatacgcctccggacctgtgggaaaggccctgagcgacgcatgtatgggcacaatcgcctccttcctgtctaagtaccaggacatcatcatcgaacaccagaaggtggtgaagggcaaccagaagagactggagagcctgcgggagctggccggcaaggaaaacctggaataccctagcgtgaccctgccacctcagcctcacaccaaggagggcgttgatgcctacaacgaagtgatcgcccgggtgcgaatgtgggtgaacctgaacctgtggcagaagctgaagctaagcagagatgatgccaagcctctgctgagactgaagggattcccttcctttcctctggtcgagagacaggccaacgaagtggactggtgggacatggtgtgtaacgtgaagaagctgatcaacgagaaaaaggaggatggcaaggtgttttggcagaatctggctggctacaagagacaggaagccctgagaccatacctgagcagcgaggaagatcggaagaagggaaagaaattcgctcggtaccagctgggcgacctgctgctgcacctggaaaagaagcacggcgaggactggggaaaggtgtacgacgaggcctgggagcggattgacaagaaagtggaaggcctgagcaagcacatcaagctggaagaggaacggagaagcgaggacgcccagagcaaggccgccctgaccgactggctgcgggctaaggccagcttcgtgatcgagggcctgaaggaggccgacaaggacgagttctgcagatgcgagctgaagctgcagaagtggtacggggacctgcggggaaagcccttcgccatcgaagccgagaacagcatcctggacatcagcggcttcagcaagcagtacaactgtgccttcatctggcagaaggacggcgtgaagaagctgaacctgtacctgatcatcaactacttcaagggcggcaagctgcggttcaagaagatcaaacctgaagccttcgaagccaacagattctacaccgtgatcaacaaaaagagcggcgagatcgtgcccatggaggtgaacttcaacttcgacgaccccaacctgatcatcctgcctctggcctttggcaagagacagggcagagaattcatctggaacgacctgctgtccctggaaaccggcagcctgaagctggccaacggaagagtgatcgagaagacactgtacaacagaagaacccggcaggatgagcctgccctgttcgtggccctgaccttcgagcggcgggaggtcctggactcctccaatatcaaaccaatgaacctgatcggcgtggcaagaggcgaaaacatccccgccgtgatcgccctgaccgaccccgagggctgcccactgagccggtttaaggatagcctgggaaacccaacccacatcctgagaatcggcgagagctataaggagaagcagcggaccatccaggccaagaaggaggtggagcagcggagagccggcggctacagccggaagtacgccagcaaagccaagaatctggcagacgatatggtgagaaacaccgctagagatctgctgtactacgccgtgacccaggatgccatgctgatcttcgccaacctgagccggggcttcggccggcagggcaagcggaccttcatggccgagagacagtacacacggatggaggactggctgaccgccaagctggcctacgagggcctgagcaagacctacctgtccaagacactggcccagtacacctccaagacatgcagcaactgtgggtttaccatcaccagcgccgactacgacagggtgctggagaagctgaagaagacagcaacaggctggatgaccacaattaacggcaaggagctgaaggtggagggccagattacctactacaacagatacaagagacagaacgtagtcaaggacctgtccgtcgagctggatagactgagcgaagaatctgtgaacaacgacatctcctcctggacaaagggcagaagcggagaagctctgagcctcctgaagaaaagattctcccatagacccgtgcaggagaagttcgtgtgcctgaactgcggcttcgagacacacgcagccgagcaagccgccctgaacatcgccagatcctggctgttcctgcggagccaggagtacaagaaataccagacaaacaagacaaccggcaacaccgataagagagccttcgtcgagacctggcagtccttttaccggaagaagcttaaggaggtgtggaaacctgccgtgcggtctggcggatctggcggaggctccacaagcttccaggaggccgtgaccttcaaggacgtggccgtggtgttcagcgaggaggagctgggcctgctggacagcacccagaggaagctgtacagggacgtgatgctggagaacttcaggaacctggtgagcgtgggccacagcagcagcaagcccgacatgatcagccagctggagagggaggaggagaagctgtacgtgaaggagatctgcaccgagaggggcaggcacagcgacaagaactgcaccagccccaagaaaaagagaaaagtctaagctgccttctgcggggcttgccttctggccatgcccttcttctctcccttgcacctgtacctcttggtctttgaataaagcctgagtaggaaggctagcaaaaaaaaaaaaaaaaaaaaaaaaaaaaaaaaaaaaaaaaaaaaaaaaaaaaaaaaaaaaaaaaaaaaaaaaaaaaaaaa

SEQ ID NO: 2868 - RNA, 5419 nt, synthetic construct
  source 1..5419: mol_type = other RNA
aggaaataagagagaaaagaagagtaagaagaaatataagagccaccatggcccctaagaagaagcgtaaagtgagccgggtgaacggcagcggcagcggcggcggcatgaaccacgaccaggagttcgacccccctaaggtgtaccctcccgtccccgccgagaagagaaagcccatccgggtcctgagcctgttcgatggcatcgccaccggtctgctggtgctgaaggacctgggcatccaggtggataggtacattgcctccgaggtgtgcgaggactccatcaccgtgggaatggtgcgtcatcagggcaagatcatgtacgtgggcgacgtgcggagcgtgacacagaagcatatccaggagtggggccctttcgacctggtgatcggcggcagcccttgcaatgacctgagcatcgtgaacccagcccggaagggcctgtacgagggaaccggcagactgttcttcgagttttacagactgctgcacgacgcccggcctaaggaaggcgacgaccggcccttcttttggctgttcgagaatgtggtggccatgggagtcagcgacaagcgggatattagccggttcctggagagcaaccccgtgatgatcgatgccaaggaagtgagcgccgcccaccgggccagatacttctggggcaatctgcctggcatgaacagacccctggccagcaccgtgaacgacaagctggagctgcaggagtgcctggagcacggccggatcgccaagttcagcaaggtgagaaccatcaccacccgaagcaacagcatcaaacaaggcaaggaccagcactttcctgtgttcatgaacgagaaggaggacatcctgtggtgtaccgagatggagagagtgttcgggttcccagtccactacacagatgtcagcaacatgtctagactggccagacagagactgctgggaagaagctggtccgtccctgtgatcagacacctgttcgcccctctgaaggagtacttcgcctgcgtgagcagcggcaacagcaacgccaacagccggggccccagcttctctagcggcctggtgccactgtccctgagagggagccacatgggccccatggagatctacaaaaccgtgagcgcctggaagcggcagcctgtgcgcgtgctgagcctgtttcggaatatcgataaagtcctgaaaagcctgggattcctggagagcggctctggctccggcggtggcaccctgaagtacgtggaggatgtgacaaacgtggtcagacgggatgtggagaagtggggccccttcgatctggtgtacggcagcacccaacccctgggcagctcttgtgaccggtgccctggctggtacatgtttcagttccaccggatcctgcagtacgccctgccgagacaggagtcccagcggccattcttttggattttcatggacaacttgctgctgaccgaggatgaccaggaaactaccactcggttcctgcagaccgaagccgtgaccctgcaggacgtgagaggccgggactaccagaacgccatgcgggtgtggtccaacatccctggactgaaaagcaagcacgcacctctgacccctaaagaagaggagtacctgcaggcccaggtgcggagcagaagcaagctggacgcccctaaggtggatctgctggtgaagaattgcctcctgcccctgagagagtacttcaagtatttcagccagaatagtctgcccctgggcggcccaagcagcggcgcccctcctcccagcggcggcagcccagccggctccccaacctctaccgaggagggcacctctgagtccgccacccccgagagcggccctggcacctccaccgagcccagcgagggcagcgcacccggcagccctgccggcagccccacctccacagaggagggaaccagcaccgagcccagcgaaggcagcgccccaggcaccagcaccgagcctagtgagggcggctctggcggcggcagcgcccaggagattaaacggatcaacaagatcagaagaagacttgtgaaagacagcaacaccaagaaggccggcaagacaggccccatgaaaaccctgctggttagagtgatgacacccgatctgagagagcggctggaaaacctgagaaagaagcctgaaaatatcccccagcccatcagcaatacatctagagccaacctgaataagctgctgaccgattacaccgaaatgaagaaggcgatcctgcatgtgtactgggaagagttccagaaggaccctgtgggcctgatgagccgggtggcccagcctgccagcaagaagatcgatcagaacaagctgaaacctgagatggacgagaagggcaacctgaccaccgccggctttgcctgctctcagtgtggccagcccctgttcgtgtacaagctggagcaggtgtctgagaagggcaaggcttacaccaactacttcggacggtgcaatgtggccgagcacgaaaagctgatcctgctggcccagctgaagcccgagaaggatagcgacgaagccgtgacatatagcctgggaaagtttgggcagagggccctggatttctacagcattcatgtgaccaaggagtccacccaccccgtgaagcccctggcccagatcgccggaaacagatacgcctccggacctgtgggaaaggccctgagcgacgcatgtatgggcacaatcgcctccttcctgtctaagtaccaggacatcatcatcgaacaccagaaggtggtgaagggcaaccagaagagactggagagcctgcgggagctggccggcaaggaaaacctggaataccctagcgtgaccctgccacctcagcctcacaccaaggagggcgttgatgcctacaacgaagtgatcgcccgggtgcgaatgtgggtgaacctgaacctgtggcagaagctgaagctaagcagagatgatgccaagcctctgctgagactgaagggattcccttcctttcctctggtcgagagacaggccaacgaagtggactggtgggacatggtgtgtaacgtgaagaagctgatcaacgagaaaaaggaggatggcaaggtgttttggcagaatctggctggctacaagagacaggaagccctgagaccatacctgagcagcgaggaagatcggaagaagggaaagaaattcgctcggtaccagctgggcgacctgctgctgcacctggaaaagaagcacggcgaggactggggaaaggtgtacgacgaggcctgggagcggattgacaagaaagtggaaggcctgagcaagcacatcaagctggaagaggaacggagaagcgaggacgcccagagcaaggccgccctgaccgactggctgcgggctaaggccagcttcgtgatcgagggcctgaaggaggccgacaaggacgagttctgcagatgcgagctgaagctgcagaagtggtacggggacctgcggggaaagcccttcgccatcgaagccgagaacagcatcctggacatcagcggcttcagcaagcagtacaactgtgccttcatctggcagaaggacggcgtgaagaagctgaacctgtacctgatcatcaactacttcaagggcggcaagctgcggttcaagaagatcaaacctgaagccttcgaagccaacagattctacaccgtgatcaacaaaaagagcggcgagatcgtgcccatggaggtgaacttcaacttcgacgaccccaacctgatcatcctgcctctggcctttggcaagagacagggcagagaattcatctggaacgacctgctgtccctggaaaccggcagcctgaagctggccaacggaagagtgatcgagaagacactgtacaacagaagaacccggcaggatgagcctgccctgttcgtggccctgaccttcgagcggcgggaggtcctggactcctccaatatcaaaccaatgaacctgatcggcgtggcaagaggcgaaaacatccccgccgtgatcgccctgaccgaccccgagggctgcccactgagccggtttaaggatagcctgggaaacccaacccacatcctgagaatcggcgagagctataaggagaagcagcggaccatccaggccaagaaggaggtggagcagcggagagccggcggctacagccggaagtacgccagcaaagccaagaatctggcagacgatatggtgagaaacaccgctagagatctgctgtactacgccgtgacccaggatgccatgctgatcttcgccaacctgagccggggcttcggccggcagggcaagcggaccttcatggccgagagacagtacacacggatggaggactggctgaccgccaagctggcctacgagggcctgagcaagacctacctgtccaagacactggcccagtacacctccaagacatgcagcaactgtgggtttaccatcaccagcgccgactacgacagggtgctggagaagctgaagaagacagcaacaggctggatgaccacaattaacggcaaggagctgaaggtggagggccagattacctactacaacagatacaagagacagaacgtagtcaaggacctgtccgtcgagctggatagactgagcgaagaatctgtgaacaacgacatctcctcctggacaaagggcagaagcggagaagctctgagcctcctgaagaaaagattctcccatagacccgtgcaggagaagttcgtgtgcctgaactgcggcttcgagacacacgcagccgagcaagccgccctgaacatcgccagatcctggctgttcctgcggagccaggagtacaagaaataccagacaaacaagacaaccggcaacaccgataagagagccttcgtcgagacctggcagtccttttaccggaagaagcttaaggaggtgtggaaacctgccgtgcggtctggcggatctggcggaggctccacaagcgcccaggcccccctgagcttcgaggacgtggccgtgagcttcagcagggaggagtggaggctgctggtgcccgcccagaaggacctgtacagggacgtgatgctggagaactacaggaacctggtgagcgtgggctaccaggccagcgagcccgacagcctgttccagctggagcacggcggccccctgtgggccgtggagggcgccgcccccaggcccccctgccccggcttcgtgctgcagaccagccccaagaaaaagagaaaagtctaagctgccttctgcggggcttgccttctggccatgcccttcttctctcccttgcacctgtacctcttggtctttgaataaagcctgagtaggaaggctagcaaaaaaaaaaaaaaaaaaaaaaaaaaaaaaaaaaaaaaaaaaaaaaaaaaaaaaaaaaaaaaaaaaaaaaaaaaaaaaaa

SEQ ID NO: 2869 - RNA, 5419 nt, synthetic construct
  source 1..5419: mol_type = other RNA
aggaaataagagagaaaagaagagtaagaagaaatataagagccaccatggcccctaagaagaagcgtaaagtgagccgggtgaacggcagcggcagcggcggcggcatgaaccacgaccaggagttcgacccccctaaggtgtaccctcccgtccccgccgagaagagaaagcccatccgggtcctgagcctgttcgatggcatcgccaccggtctgctggtgctgaaggacctgggcatccaggtggataggtacattgcctccgaggtgtgcgaggactccatcaccgtgggaatggtgcgtcatcagggcaagatcatgtacgtgggcgacgtgcggagcgtgacacagaagcatatccaggagtggggccctttcgacctggtgatcggcggcagcccttgcaatgacctgagcatcgtgaacccagcccggaagggcctgtacgagggaaccggcagactgttcttcgagttttacagactgctgcacgacgcccggcctaaggaaggcgacgaccggcccttcttttggctgttcgagaatgtggtggccatgggagtcagcgacaagcgggatattagccggttcctggagagcaaccccgtgatgatcgatgccaaggaagtgagcgccgcccaccgggccagatacttctggggcaatctgcctggcatgaacagacccctggccagcaccgtgaacgacaagctggagctgcaggagtgcctggagcacggccggatcgccaagttcagcaaggtgagaaccatcaccacccgaagcaacagcatcaaacaaggcaaggaccagcactttcctgtgttcatgaacgagaaggaggacatcctgtggtgtaccgagatggagagagtgttcgggttcccagtccactacacagatgtcagcaacatgtctagactggccagacagagactgctgggaagaagctggtccgtccctgtgatcagacacctgttcgcccctctgaaggagtacttcgcctgcgtgagcagcggcaacagcaacgccaacagccggggccccagcttctctagcggcctggtgccactgtccctgagagggagccacatgggccccatggagatctacaaaaccgtgagcgcctggaagcggcagcctgtgcgcgtgctgagcctgtttcggaatatcgataaagtcctgaaaagcctgggattcctggagagcggctctggctccggcggtggcaccctgaagtacgtggaggatgtgacaaacgtggtcagacgggatgtggagaagtggggccccttcgatctggtgtacggcagcacccaacccctgggcagctcttgtgaccggtgccctggctggtacatgtttcagttccaccggatcctgcagtacgccctgccgagacaggagtcccagcggccattcttttggattttcatggacaacttgctgctgaccgaggatgaccaggaaactaccactcggttcctgcagaccgaagccgtgaccctgcaggacgtgagaggccgggactaccagaacgccatgcgggtgtggtccaacatccctggactgaaaagcaagcacgcacctctgacccctaaagaagaggagtacctgcaggcccaggtgcggagcagaagcaagctggacgcccctaaggtggatctgctggtgaagaattgcctcctgcccctgagagagtacttcaagtatttcagccagaatagtctgcccctgggcggcccaagcagcggcgcccctcctcccagcggcggcagcccagccggctccccaacctctaccgaggagggcacctctgagtccgccacccccgagagcggccctggcacctccaccgagcccagcgagggcagcgcacccggcagccctgccggcagccccacctccacagaggagggaaccagcaccgagcccagcgaaggcagcgccccaggcaccagcaccgagcctagtgagggcggctctggcggcggcagcgcccaggagattaaacggatcaacaagatcagaagaagacttgtgaaagacagcaacaccaagaaggccggcaagacaggccccatgaaaaccctgctggttagagtgatgacacccgatctgagagagcggctggaaaacctgagaaagaagcctgaaaatatcccccagcccatcagcaatacatctagagccaacctgaataagctgctgaccgattacaccgaaatgaagaaggcgatcctgcatgtgtactgggaagagttccagaaggaccctgtgggcctgatgagccgggtggcccagcctgccagcaagaagatcgatcagaacaagctgaaacctgagatggacgagaagggcaacctgaccaccgccggctttgcctgctctcagtgtggccagcccctgttcgtgtacaagctggagcaggtgtctgagaagggcaaggcttacaccaactacttcggacggtgcaatgtggccgagcacgaaaagctgatcctgctggcccagctgaagcccgagaaggatagcgacgaagccgtgacatatagcctgggaaagtttgggcagagggccctggatttctacagcattcatgtgaccaaggagtccacccaccccgtgaagcccctggcccagatcgccggaaacagatacgcctccggacctgtgggaaaggccctgagcgacgcatgtatgggcacaatcgcctccttcctgtctaagtaccaggacatcatcatcgaacaccagaaggtggtgaagggcaaccagaagagactggagagcctgcgggagctggccggcaaggaaaacctggaataccctagcgtgaccctgccacctcagcctcacaccaaggagggcgttgatgcctacaacgaagtgatcgcccgggtgcgaatgtgggtgaacctgaacctgtggcagaagctgaagctaagcagagatgatgccaagcctctgctgagactgaagggattcccttcctttcctctggtcgagagacaggccaacgaagtggactggtgggacatggtgtgtaacgtgaagaagctgatcaacgagaaaaaggaggatggcaaggtgttttggcagaatctggctggctacaagagacaggaagccctgagaccatacctgagcagcgaggaagatcggaagaagggaaagaaattcgctcggtaccagctgggcgacctgctgctgcacctggaaaagaagcacggcgaggactggggaaaggtgtacgacgaggcctgggagcggattgacaagaaagtggaaggcctgagcaagcacatcaagctggaagaggaacggagaagcgaggacgcccagagcaaggccgccctgaccgactggctgcgggctaaggccagcttcgtgatcgagggcctgaaggaggccgacaaggacgagttctgcagatgcgagctgaagctgcagaagtggtacggggacctgcggggaaagcccttcgccatcgaagccgagaacagcatcctggacatcagcggcttcagcaagcagtacaactgtgccttcatctggcagaaggacggcgtgaagaagctgaacctgtacctgatcatcaactacttcaagggcggcaagctgcggttcaagaagatcaaacctgaagccttcgaagccaacagattctacaccgtgatcaacaaaaagagcggcgagatcgtgcccatggaggtgaacttcaacttcgacgaccccaacctgatcatcctgcctctggcctttggcaagagacagggcagagaattcatctggaacgacctgctgtccctggaaaccggcagcctgaagctggccaacggaagagtgatcgagaagacactgtacaacagaagaacccggcaggatgagcctgccctgttcgtggccctgaccttcgagcggcgggaggtcctggactcctccaatatcaaaccaatgaacctgatcggcgtggcaagaggcgaaaacatccccgccgtgatcgccctgaccgaccccgagggctgcccactgagccggtttaaggatagcctgggaaacccaacccacatcctgagaatcggcgagagctataaggagaagcagcggaccatccaggccaagaaggaggtggagcagcggagagccggcggctacagccggaagtacgccagcaaagccaagaatctggcagacgatatggtgagaaacaccgctagagatctgctgtactacgccgtgacccaggatgccatgctgatcttcgccaacctgagccggggcttcggccggcagggcaagcggaccttcatggccgagagacagtacacacggatggaggactggctgaccgccaagctggcctacgagggcctgagcaagacctacctgtccaagacactggcccagtacacctccaagacatgcagcaactgtgggtttaccatcaccagcgccgactacgacagggtgctggagaagctgaagaagacagcaacaggctggatgaccacaattaacggcaaggagctgaaggtggagggccagattacctactacaacagatacaagagacagaacgtagtcaaggacctgtccgtcgagctggatagactgagcgaagaatctgtgaacaacgacatctcctcctggacaaagggcagaagcggagaagctctgagcctcctgaagaaaagattctcccatagacccgtgcaggagaagttcgtgtgcctgaactgcggcttcgagacacacgcagccgagcaagccgccctgaacatcgccagatcctggctgttcctgcggagccaggagtacaagaaataccagacaaacaagacaaccggcaacaccgataagagagccttcgtcgagacctggcagtccttttaccggaagaagcttaaggaggtgtggaaacctgccgtgcggtctggcggatctggcggaggctccacaagcttccagggcagcctgaccttcagcgacgtggccatcggcttcagccagcaggagtgggagtgcctggaccccgtgcagaagagcctgtacagggacgtgatgatggagaactacggcaacctggtgagcctgggctacagcatcagcaagcccgacgtgatcaccctgctggagcagggcaaggagccctggatggtgctgagggaggagaccaagaggtgggacaccgacagcttcctgagcaccagccccaagaaaaagagaaaagtctaagctgccttctgcggggcttgccttctggccatgcccttcttctctcccttgcacctgtacctcttggtctttgaataaagcctgagtaggaaggctagcaaaaaaaaaaaaaaaaaaaaaaaaaaaaaaaaaaaaaaaaaaaaaaaaaaaaaaaaaaaaaaaaaaaaaaaaaaaaaaaa

SEQ ID NO: 2870 - RNA, 5419 nt, synthetic construct
  source 1..5419: mol_type = other RNA
aggaaataagagagaaaagaagagtaagaagaaatataagagccaccatggcccctaagaagaagcgtaaagtgagccgggtgaacggcagcggcagcggcggcggcatgaaccacgaccaggagttcgacccccctaaggtgtaccctcccgtccccgccgagaagagaaagcccatccgggtcctgagcctgttcgatggcatcgccaccggtctgctggtgctgaaggacctgggcatccaggtggataggtacattgcctccgaggtgtgcgaggactccatcaccgtgggaatggtgcgtcatcagggcaagatcatgtacgtgggcgacgtgcggagcgtgacacagaagcatatccaggagtggggccctttcgacctggtgatcggcggcagcccttgcaatgacctgagcatcgtgaacccagcccggaagggcctgtacgagggaaccggcagactgttcttcgagttttacagactgctgcacgacgcccggcctaaggaaggcgacgaccggcccttcttttggctgttcgagaatgtggtggccatgggagtcagcgacaagcgggatattagccggttcctggagagcaaccccgtgatgatcgatgccaaggaagtgagcgccgcccaccgggccagatacttctggggcaatctgcctggcatgaacagacccctggccagcaccgtgaacgacaagctggagctgcaggagtgcctggagcacggccggatcgccaagttcagcaaggtgagaaccatcaccacccgaagcaacagcatcaaacaaggcaaggaccagcactttcctgtgttcatgaacgagaaggaggacatcctgtggtgtaccgagatggagagagtgttcgggttcccagtccactacacagatgtcagcaacatgtctagactggccagacagagactgctgggaagaagctggtccgtccctgtgatcagacacctgttcgcccctctgaaggagtacttcgcctgcgtgagcagcggcaacagcaacgccaacagccggggccccagcttctctagcggcctggtgccactgtccctgagagggagccacatgggccccatggagatctacaaaaccgtgagcgcctggaagcggcagcctgtgcgcgtgctgagcctgtttcggaatatcgataaagtcctgaaaagcctgggattcctggagagcggctctggctccggcggtggcaccctgaagtacgtggaggatgtgacaaacgtggtcagacgggatgtggagaagtggggccccttcgatctggtgtacggcagcacccaacccctgggcagctcttgtgaccggtgccctggctggtacatgtttcagttccaccggatcctgcagtacgccctgccgagacaggagtcccagcggccattcttttggattttcatggacaacttgctgctgaccgaggatgaccaggaaactaccactcggttcctgcagaccgaagccgtgaccctgcaggacgtgagaggccgggactaccagaacgccatgcgggtgtggtccaacatccctggactgaaaagcaagcacgcacctctgacccctaaagaagaggagtacctgcaggcccaggtgcggagcagaagcaagctggacgcccctaaggtggatctgctggtgaagaattgcctcctgcccctgagagagtacttcaagtatttcagccagaatagtctgcccctgggcggcccaagcagcggcgcccctcctcccagcggcggcagcccagccggctccccaacctctaccgaggagggcacctctgagtccgccacccccgagagcggccctggcacctccaccgagcccagcgagggcagcgcacccggcagccctgccggcagccccacctccacagaggagggaaccagcaccgagcccagcgaaggcagcgccccaggcaccagcaccgagcctagtgagggcggctctggcggcggcagcgcccaggagattaaacggatcaacaagatcagaagaagacttgtgaaagacagcaacaccaagaaggccggcaagacaggccccatgaaaaccctgctggttagagtgatgacacccgatctgagagagcggctggaaaacctgagaaagaagcctgaaaatatcccccagcccatcagcaatacatctagagccaacctgaataagctgctgaccgattacaccgaaatgaagaaggcgatcctgcatgtgtactgggaagagttccagaaggaccctgtgggcctgatgagccgggtggcccagcctgccagcaagaagatcgatcagaacaagctgaaacctgagatggacgagaagggcaacctgaccaccgccggctttgcctgctctcagtgtggccagcccctgttcgtgtacaagctggagcaggtgtctgagaagggcaaggcttacaccaactacttcggacggtgcaatgtggccgagcacgaaaagctgatcctgctggcccagctgaagcccgagaaggatagcgacgaagccgtgacatatagcctgggaaagtttgggcagagggccctggatttctacagcattcatgtgaccaaggagtccacccaccccgtgaagcccctggcccagatcgccggaaacagatacgcctccggacctgtgggaaaggccctgagcgacgcatgtatgggcacaatcgcctccttcctgtctaagtaccaggacatcatcatcgaacaccagaaggtggtgaagggcaaccagaagagactggagagcctgcgggagctggccggcaaggaaaacctggaataccctagcgtgaccctgccacctcagcctcacaccaaggagggcgttgatgcctacaacgaagtgatcgcccgggtgcgaatgtgggtgaacctgaacctgtggcagaagctgaagctaagcagagatgatgccaagcctctgctgagactgaagggattcccttcctttcctctggtcgagagacaggccaacgaagtggactggtgggacatggtgtgtaacgtgaagaagctgatcaacgagaaaaaggaggatggcaaggtgttttggcagaatctggctggctacaagagacaggaagccctgagaccatacctgagcagcgaggaagatcggaagaagggaaagaaattcgctcggtaccagctgggcgacctgctgctgcacctggaaaagaagcacggcgaggactggggaaaggtgtacgacgaggcctgggagcggattgacaagaaagtggaaggcctgagcaagcacatcaagctggaagaggaacggagaagcgaggacgcccagagcaaggccgccctgaccgactggctgcgggctaaggccagcttcgtgatcgagggcctgaaggaggccgacaaggacgagttctgcagatgcgagctgaagctgcagaagtggtacggggacctgcggggaaagcccttcgccatcgaagccgagaacagcatcctggacatcagcggcttcagcaagcagtacaactgtgccttcatctggcagaaggacggcgtgaagaagctgaacctgtacctgatcatcaactacttcaagggcggcaagctgcggttcaagaagatcaaacctgaagccttcgaagccaacagattctacaccgtgatcaacaaaaagagcggcgagatcgtgcccatggaggtgaacttcaacttcgacgaccccaacctgatcatcctgcctctggcctttggcaagagacagggcagagaattcatctggaacgacctgctgtccctggaaaccggcagcctgaagctggccaacggaagagtgatcgagaagacactgtacaacagaagaacccggcaggatgagcctgccctgttcgtggccctgaccttcgagcggcgggaggtcctggactcctccaatatcaaaccaatgaacctgatcggcgtggcaagaggcgaaaacatccccgccgtgatcgccctgaccgaccccgagggctgcccactgagccggtttaaggatagcctgggaaacccaacccacatcctgagaatcggcgagagctataaggagaagcagcggaccatccaggccaagaaggaggtggagcagcggagagccggcggctacagccggaagtacgccagcaaagccaagaatctggcagacgatatggtgagaaacaccgctagagatctgctgtactacgccgtgacccaggatgccatgctgatcttcgccaacctgagccggggcttcggccggcagggcaagcggaccttcatggccgagagacagtacacacggatggaggactggctgaccgccaagctggcctacgagggcctgagcaagacctacctgtccaagacactggcccagtacacctccaagacatgcagcaactgtgggtttaccatcaccagcgccgactacgacagggtgctggagaagctgaagaagacagcaacaggctggatgaccacaattaacggcaaggagctgaaggtggagggccagattacctactacaacagatacaagagacagaacgtagtcaaggacctgtccgtcgagctggatagactgagcgaagaatctgtgaacaacgacatctcctcctggacaaagggcagaagcggagaagctctgagcctcctgaagaaaagattctcccatagacccgtgcaggagaagttcgtgtgcctgaactgcggcttcgagacacacgcagccgagcaagccgccctgaacatcgccagatcctggctgttcctgcggagccaggagtacaagaaataccagacaaacaagacaaccggcaacaccgataagagagccttcgtcgagacctggcagtccttttaccggaagaagcttaaggaggtgtggaaacctgccgtgcggtctggcggatctggcggaggctccacaagccaggacgtggtgaccttcaaggacgtggccatctacttcagccccgaggagtgggtgaggctgagcgccggccagagggagctgtaccaggaggtgatgctggacaactacgagctggtgaccagcctggacagggagagcaagctgctgtacaagatggaccccgaggaggagagctgcgagggcgtgccctacagcagcgccgacagcggcgcccccgacagcagcagcaccagcgcctgcaccagccccaagaaaaagagaaaagtctaagctgccttctgcggggcttgccttctggccatgcccttcttctctcccttgcacctgtacctcttggtctttgaataaagcctgagtaggaaggctagcaaaaaaaaaaaaaaaaaaaaaaaaaaaaaaaaaaaaaaaaaaaaaaaaaaaaaaaaaaaaaaaaaaaaaaaaaaaaaaaa

SEQ ID NO: 2871 - RNA, 5419 nt, synthetic construct
  source 1..5419: mol_type = other RNA
aggaaataagagagaaaagaagagtaagaagaaatataagagccaccatggcccctaagaagaagcgtaaagtgagccgggtgaacggcagcggcagcggcggcggcatgaaccacgaccaggagttcgacccccctaaggtgtaccctcccgtccccgccgagaagagaaagcccatccgggtcctgagcctgttcgatggcatcgccaccggtctgctggtgctgaaggacctgggcatccaggtggataggtacattgcctccgaggtgtgcgaggactccatcaccgtgggaatggtgcgtcatcagggcaagatcatgtacgtgggcgacgtgcggagcgtgacacagaagcatatccaggagtggggccctttcgacctggtgatcggcggcagcccttgcaatgacctgagcatcgtgaacccagcccggaagggcctgtacgagggaaccggcagactgttcttcgagttttacagactgctgcacgacgcccggcctaaggaaggcgacgaccggcccttcttttggctgttcgagaatgtggtggccatgggagtcagcgacaagcgggatattagccggttcctggagagcaaccccgtgatgatcgatgccaaggaagtgagcgccgcccaccgggccagatacttctggggcaatctgcctggcatgaacagacccctggccagcaccgtgaacgacaagctggagctgcaggagtgcctggagcacggccggatcgccaagttcagcaaggtgagaaccatcaccacccgaagcaacagcatcaaacaaggcaaggaccagcactttcctgtgttcatgaacgagaaggaggacatcctgtggtgtaccgagatggagagagtgttcgggttcccagtccactacacagatgtcagcaacatgtctagactggccagacagagactgctgggaagaagctggtccgtccctgtgatcagacacctgttcgcccctctgaaggagtacttcgcctgcgtgagcagcggcaacagcaacgccaacagccggggccccagcttctctagcggcctggtgccactgtccctgagagggagccacatgggccccatggagatctacaaaaccgtgagcgcctggaagcggcagcctgtgcgcgtgctgagcctgtttcggaatatcgataaagtcctgaaaagcctgggattcctggagagcggctctggctccggcggtggcaccctgaagtacgtggaggatgtgacaaacgtggtcagacgggatgtggagaagtggggccccttcgatctggtgtacggcagcacccaacccctgggcagctcttgtgaccggtgccctggctggtacatgtttcagttccaccggatcctgcagtacgccctgccgagacaggagtcccagcggccattcttttggattttcatggacaacttgctgctgaccgaggatgaccaggaaactaccactcggttcctgcagaccgaagccgtgaccctgcaggacgtgagaggccgggactaccagaacgccatgcgggtgtggtccaacatccctggactgaaaagcaagcacgcacctctgacccctaaagaagaggagtacctgcaggcccaggtgcggagcagaagcaagctggacgcccctaaggtggatctgctggtgaagaattgcctcctgcccctgagagagtacttcaagtatttcagccagaatagtctgcccctgggcggcccaagcagcggcgcccctcctcccagcggcggcagcccagccggctccccaacctctaccgaggagggcacctctgagtccgccacccccgagagcggccctggcacctccaccgagcccagcgagggcagcgcacccggcagccctgccggcagccccacctccacagaggagggaaccagcaccgagcccagcgaaggcagcgccccaggcaccagcaccgagcctagtgagggcggctctggcggcggcagcgcccaggagattaaacggatcaacaagatcagaagaagacttgtgaaagacagcaacaccaagaaggccggcaagacaggccccatgaaaaccctgctggttagagtgatgacacccgatctgagagagcggctggaaaacctgagaaagaagcctgaaaatatcccccagcccatcagcaatacatctagagccaacctgaataagctgctgaccgattacaccgaaatgaagaaggcgatcctgcatgtgtactgggaagagttccagaaggaccctgtgggcctgatgagccgggtggcccagcctgccagcaagaagatcgatcagaacaagctgaaacctgagatggacgagaagggcaacctgaccaccgccggctttgcctgctctcagtgtggccagcccctgttcgtgtacaagctggagcaggtgtctgagaagggcaaggcttacaccaactacttcggacggtgcaatgtggccgagcacgaaaagctgatcctgctggcccagctgaagcccgagaaggatagcgacgaagccgtgacatatagcctgggaaagtttgggcagagggccctggatttctacagcattcatgtgaccaaggagtccacccaccccgtgaagcccctggcccagatcgccggaaacagatacgcctccggacctgtgggaaaggccctgagcgacgcatgtatgggcacaatcgcctccttcctgtctaagtaccaggacatcatcatcgaacaccagaaggtggtgaagggcaaccagaagagactggagagcctgcgggagctggccggcaaggaaaacctggaataccctagcgtgaccctgccacctcagcctcacaccaaggagggcgttgatgcctacaacgaagtgatcgcccgggtgcgaatgtgggtgaacctgaacctgtggcagaagctgaagctaagcagagatgatgccaagcctctgctgagactgaagggattcccttcctttcctctggtcgagagacaggccaacgaagtggactggtgggacatggtgtgtaacgtgaagaagctgatcaacgagaaaaaggaggatggcaaggtgttttggcagaatctggctggctacaagagacaggaagccctgagaccatacctgagcagcgaggaagatcggaagaagggaaagaaattcgctcggtaccagctgggcgacctgctgctgcacctggaaaagaagcacggcgaggactggggaaaggtgtacgacgaggcctgggagcggattgacaagaaagtggaaggcctgagcaagcacatcaagctggaagaggaacggagaagcgaggacgcccagagcaaggccgccctgaccgactggctgcgggctaaggccagcttcgtgatcgagggcctgaaggaggccgacaaggacgagttctgcagatgcgagctgaagctgcagaagtggtacggggacctgcggggaaagcccttcgccatcgaagccgagaacagcatcctggacatcagcggcttcagcaagcagtacaactgtgccttcatctggcagaaggacggcgtgaagaagctgaacctgtacctgatcatcaactacttcaagggcggcaagctgcggttcaagaagatcaaacctgaagccttcgaagccaacagattctacaccgtgatcaacaaaaagagcggcgagatcgtgcccatggaggtgaacttcaacttcgacgaccccaacctgatcatcctgcctctggcctttggcaagagacagggcagagaattcatctggaacgacctgctgtccctggaaaccggcagcctgaagctggccaacggaagagtgatcgagaagacactgtacaacagaagaacccggcaggatgagcctgccctgttcgtggccctgaccttcgagcggcgggaggtcctggactcctccaatatcaaaccaatgaacctgatcggcgtggcaagaggcgaaaacatccccgccgtgatcgccctgaccgaccccgagggctgcccactgagccggtttaaggatagcctgggaaacccaacccacatcctgagaatcggcgagagctataaggagaagcagcggaccatccaggccaagaaggaggtggagcagcggagagccggcggctacagccggaagtacgccagcaaagccaagaatctggcagacgatatggtgagaaacaccgctagagatctgctgtactacgccgtgacccaggatgccatgctgatcttcgccaacctgagccggggcttcggccggcagggcaagcggaccttcatggccgagagacagtacacacggatggaggactggctgaccgccaagctggcctacgagggcctgagcaagacctacctgtccaagacactggcccagtacacctccaagacatgcagcaactgtgggtttaccatcaccagcgccgactacgacagggtgctggagaagctgaagaagacagcaacaggctggatgaccacaattaacggcaaggagctgaaggtggagggccagattacctactacaacagatacaagagacagaacgtagtcaaggacctgtccgtcgagctggatagactgagcgaagaatctgtgaacaacgacatctcctcctggacaaagggcagaagcggagaagctctgagcctcctgaagaaaagattctcccatagacccgtgcaggagaagttcgtgtgcctgaactgcggcttcgagacacacgcagccgagcaagccgccctgaacatcgccagatcctggctgttcctgcggagccaggagtacaagaaataccagacaaacaagacaaccggcaacaccgataagagagccttcgtcgagacctggcagtccttttaccggaagaagcttaaggaggtgtggaaacctgccgtgcggtctggcggatctggcggaggctccacaagcgtggagcccgtgagcttcgaggaggtggccgtgtacttcagcgaggaggagtgggccctgctggaccccggccagagggccctgtactgggacgtgatgcaggagaactacgaggccgtgagctggctggtgaggggcaggggcgtgagcaaggcccacgtgatcagctgggtggagaggggcgaggagctgtggatccccgacaggcagggctgcgaggagggcgagagcatcagcgacatcaccagccccaagaaaaagagaaaagtctaagctgccttctgcggggcttgccttctggccatgcccttcttctctcccttgcacctgtacctcttggtctttgaataaagcctgagtaggaaggctagcaaaaaaaaaaaaaaaaaaaaaaaaaaaaaaaaaaaaaaaaaaaaaaaaaaaaaaaaaaaaaaaaaaaaaaaaaaaaaaaa

SEQ ID NO: 2872 - RNA, 5419 nt, synthetic construct
  source 1..5419: mol_type = other RNA
aggaaataagagagaaaagaagagtaagaagaaatataagagccaccatggcccctaagaagaagcgtaaagtgagccgggtgaacggcagcggcagcggcggcggcatgaaccacgaccaggagttcgacccccctaaggtgtaccctcccgtccccgccgagaagagaaagcccatccgggtcctgagcctgttcgatggcatcgccaccggtctgctggtgctgaaggacctgggcatccaggtggataggtacattgcctccgaggtgtgcgaggactccatcaccgtgggaatggtgcgtcatcagggcaagatcatgtacgtgggcgacgtgcggagcgtgacacagaagcatatccaggagtggggccctttcgacctggtgatcggcggcagcccttgcaatgacctgagcatcgtgaacccagcccggaagggcctgtacgagggaaccggcagactgttcttcgagttttacagactgctgcacgacgcccggcctaaggaaggcgacgaccggcccttcttttggctgttcgagaatgtggtggccatgggagtcagcgacaagcgggatattagccggttcctggagagcaaccccgtgatgatcgatgccaaggaagtgagcgccgcccaccgggccagatacttctggggcaatctgcctggcatgaacagacccctggccagcaccgtgaacgacaagctggagctgcaggagtgcctggagcacggccggatcgccaagttcagcaaggtgagaaccatcaccacccgaagcaacagcatcaaacaaggcaaggaccagcactttcctgtgttcatgaacgagaaggaggacatcctgtggtgtaccgagatggagagagtgttcgggttcccagtccactacacagatgtcagcaacatgtctagactggccagacagagactgctgggaagaagctggtccgtccctgtgatcagacacctgttcgcccctctgaaggagtacttcgcctgcgtgagcagcggcaacagcaacgccaacagccggggccccagcttctctagcggcctggtgccactgtccctgagagggagccacatgggccccatggagatctacaaaaccgtgagcgcctggaagcggcagcctgtgcgcgtgctgagcctgtttcggaatatcgataaagtcctgaaaagcctgggattcctggagagcggctctggctccggcggtggcaccctgaagtacgtggaggatgtgacaaacgtggtcagacgggatgtggagaagtggggccccttcgatctggtgtacggcagcacccaacccctgggcagctcttgtgaccggtgccctggctggtacatgtttcagttccaccggatcctgcagtacgccctgccgagacaggagtcccagcggccattcttttggattttcatggacaacttgctgctgaccgaggatgaccaggaaactaccactcggttcctgcagaccgaagccgtgaccctgcaggacgtgagaggccgggactaccagaacgccatgcgggtgtggtccaacatccctggactgaaaagcaagcacgcacctctgacccctaaagaagaggagtacctgcaggcccaggtgcggagcagaagcaagctggacgcccctaaggtggatctgctggtgaagaattgcctcctgcccctgagagagtacttcaagtatttcagccagaatagtctgcccctgggcggcccaagcagcggcgcccctcctcccagcggcggcagcccagccggctccccaacctctaccgaggagggcacctctgagtccgccacccccgagagcggccctggcacctccaccgagcccagcgagggcagcgcacccggcagccctgccggcagccccacctccacagaggagggaaccagcaccgagcccagcgaaggcagcgccccaggcaccagcaccgagcctagtgagggcggctctggcggcggcagcgcccaggagattaaacggatcaacaagatcagaagaagacttgtgaaagacagcaacaccaagaaggccggcaagacaggccccatgaaaaccctgctggttagagtgatgacacccgatctgagagagcggctggaaaacctgagaaagaagcctgaaaatatcccccagcccatcagcaatacatctagagccaacctgaataagctgctgaccgattacaccgaaatgaagaaggcgatcctgcatgtgtactgggaagagttccagaaggaccctgtgggcctgatgagccgggtggcccagcctgccagcaagaagatcgatcagaacaagctgaaacctgagatggacgagaagggcaacctgaccaccgccggctttgcctgctctcagtgtggccagcccctgttcgtgtacaagctggagcaggtgtctgagaagggcaaggcttacaccaactacttcggacggtgcaatgtggccgagcacgaaaagctgatcctgctggcccagctgaagcccgagaaggatagcgacgaagccgtgacatatagcctgggaaagtttgggcagagggccctggatttctacagcattcatgtgaccaaggagtccacccaccccgtgaagcccctggcccagatcgccggaaacagatacgcctccggacctgtgggaaaggccctgagcgacgcatgtatgggcacaatcgcctccttcctgtctaagtaccaggacatcatcatcgaacaccagaaggtggtgaagggcaaccagaagagactggagagcctgcgggagctggccggcaaggaaaacctggaataccctagcgtgaccctgccacctcagcctcacaccaaggagggcgttgatgcctacaacgaagtgatcgcccgggtgcgaatgtgggtgaacctgaacctgtggcagaagctgaagctaagcagagatgatgccaagcctctgctgagactgaagggattcccttcctttcctctggtcgagagacaggccaacgaagtggactggtgggacatggtgtgtaacgtgaagaagctgatcaacgagaaaaaggaggatggcaaggtgttttggcagaatctggctggctacaagagacaggaagccctgagaccatacctgagcagcgaggaagatcggaagaagggaaagaaattcgctcggtaccagctgggcgacctgctgctgcacctggaaaagaagcacggcgaggactggggaaaggtgtacgacgaggcctgggagcggattgacaagaaagtggaaggcctgagcaagcacatcaagctggaagaggaacggagaagcgaggacgcccagagcaaggccgccctgaccgactggctgcgggctaaggccagcttcgtgatcgagggcctgaaggaggccgacaaggacgagttctgcagatgcgagctgaagctgcagaagtggtacggggacctgcggggaaagcccttcgccatcgaagccgagaacagcatcctggacatcagcggcttcagcaagcagtacaactgtgccttcatctggcagaaggacggcgtgaagaagctgaacctgtacctgatcatcaactacttcaagggcggcaagctgcggttcaagaagatcaaacctgaagccttcgaagccaacagattctacaccgtgatcaacaaaaagagcggcgagatcgtgcccatggaggtgaacttcaacttcgacgaccccaacctgatcatcctgcctctggcctttggcaagagacagggcagagaattcatctggaacgacctgctgtccctggaaaccggcagcctgaagctggccaacggaagagtgatcgagaagacactgtacaacagaagaacccggcaggatgagcctgccctgttcgtggccctgaccttcgagcggcgggaggtcctggactcctccaatatcaaaccaatgaacctgatcggcgtggcaagaggcgaaaacatccccgccgtgatcgccctgaccgaccccgagggctgcccactgagccggtttaaggatagcctgggaaacccaacccacatcctgagaatcggcgagagctataaggagaagcagcggaccatccaggccaagaaggaggtggagcagcggagagccggcggctacagccggaagtacgccagcaaagccaagaatctggcagacgatatggtgagaaacaccgctagagatctgctgtactacgccgtgacccaggatgccatgctgatcttcgccaacctgagccggggcttcggccggcagggcaagcggaccttcatggccgagagacagtacacacggatggaggactggctgaccgccaagctggcctacgagggcctgagcaagacctacctgtccaagacactggcccagtacacctccaagacatgcagcaactgtgggtttaccatcaccagcgccgactacgacagggtgctggagaagctgaagaagacagcaacaggctggatgaccacaattaacggcaaggagctgaaggtggagggccagattacctactacaacagatacaagagacagaacgtagtcaaggacctgtccgtcgagctggatagactgagcgaagaatctgtgaacaacgacatctcctcctggacaaagggcagaagcggagaagctctgagcctcctgaagaaaagattctcccatagacccgtgcaggagaagttcgtgtgcctgaactgcggcttcgagacacacgcagccgagcaagccgccctgaacatcgccagatcctggctgttcctgcggagccaggagtacaagaaataccagacaaacaagacaaccggcaacaccgataagagagccttcgtcgagacctggcagtccttttaccggaagaagcttaaggaggtgtggaaacctgccgtgcggtctggcggatctggcggaggctccacaagcggcagcgtgagcttcgacgaggtgagcgtgaggttcagcaacgaggagtgggccctgctggaccccggccagagggccctgtacgaggaggtgatggaggagatcagggagatgatgaccagcgtgggcgacgtgagcgagttcctgaccgagggcgagcagagcgagctgagcagggagggcgccgaggagcagaaggagcagaggaagcagagggtgcaggtgggcacctacaggaacgagaccagccccaagaaaaagagaaaagtctaagctgccttctgcggggcttgccttctggccatgcccttcttctctcccttgcacctgtacctcttggtctttgaataaagcctgagtaggaaggctagcaaaaaaaaaaaaaaaaaaaaaaaaaaaaaaaaaaaaaaaaaaaaaaaaaaaaaaaaaaaaaaaaaaaaaaaaaaaaaaaa

SEQ ID NO: 2873 - RNA, 5455 nt, synthetic construct
  source 1..5455: mol_type = other RNA
aggaaataagagagaaaagaagagtaagaagaaatataagagccaccatggcccctaagaagaagcgtaaagtgagccgggtgaacggcagcggcagcggcggcggcatgaaccacgaccaggagttcgacccccctaaggtgtaccctcccgtccccgccgagaagagaaagcccatccgggtcctgagcctgttcgatggcatcgccaccggtctgctggtgctgaaggacctgggcatccaggtggataggtacattgcctccgaggtgtgcgaggactccatcaccgtgggaatggtgcgtcatcagggcaagatcatgtacgtgggcgacgtgcggagcgtgacacagaagcatatccaggagtggggccctttcgacctggtgatcggcggcagcccttgcaatgacctgagcatcgtgaacccagcccggaagggcctgtacgagggaaccggcagactgttcttcgagttttacagactgctgcacgacgcccggcctaaggaaggcgacgaccggcccttcttttggctgttcgagaatgtggtggccatgggagtcagcgacaagcgggatattagccggttcctggagagcaaccccgtgatgatcgatgccaaggaagtgagcgccgcccaccgggccagatacttctggggcaatctgcctggcatgaacagacccctggccagcaccgtgaacgacaagctggagctgcaggagtgcctggagcacggccggatcgccaagttcagcaaggtgagaaccatcaccacccgaagcaacagcatcaaacaaggcaaggaccagcactttcctgtgttcatgaacgagaaggaggacatcctgtggtgtaccgagatggagagagtgttcgggttcccagtccactacacagatgtcagcaacatgtctagactggccagacagagactgctgggaagaagctggtccgtccctgtgatcagacacctgttcgcccctctgaaggagtacttcgcctgcgtgagcagcggcaacagcaacgccaacagccggggccccagcttctctagcggcctggtgccactgtccctgagagggagccacatgggccccatggagatctacaaaaccgtgagcgcctggaagcggcagcctgtgcgcgtgctgagcctgtttcggaatatcgataaagtcctgaaaagcctgggattcctggagagcggctctggctccggcggtggcaccctgaagtacgtggaggatgtgacaaacgtggtcagacgggatgtggagaagtggggccccttcgatctggtgtacggcagcacccaacccctgggcagctcttgtgaccggtgccctggctggtacatgtttcagttccaccggatcctgcagtacgccctgccgagacaggagtcccagcggccattcttttggattttcatggacaacttgctgctgaccgaggatgaccaggaaactaccactcggttcctgcagaccgaagccgtgaccctgcaggacgtgagaggccgggactaccagaacgccatgcgggtgtggtccaacatccctggactgaaaagcaagcacgcacctctgacccctaaagaagaggagtacctgcaggcccaggtgcggagcagaagcaagctggacgcccctaaggtggatctgctggtgaagaattgcctcctgcccctgagagagtacttcaagtatttcagccagaatagtctgcccctgggcggcccaagcagcggcgcccctcctcccagcggcggcagcccagccggctccccaacctctaccgaggagggcacctctgagtccgccacccccgagagcggccctggcacctccaccgagcccagcgagggcagcgcacccggcagccctgccggcagccccacctccacagaggagggaaccagcaccgagcccagcgaaggcagcgccccaggcaccagcaccgagcctagtgagggcggctctggcggcggcagcgcccaggagattaaacggatcaacaagatcagaagaagacttgtgaaagacagcaacaccaagaaggccggcaagacaggccccatgaaaaccctgctggttagagtgatgacacccgatctgagagagcggctggaaaacctgagaaagaagcctgaaaatatcccccagcccatcagcaatacatctagagccaacctgaataagctgctgaccgattacaccgaaatgaagaaggcgatcctgcatgtgtactgggaagagttccagaaggaccctgtgggcctgatgagccgggtggcccagcctgccagcaagaagatcgatcagaacaagctgaaacctgagatggacgagaagggcaacctgaccaccgccggctttgcctgctctcagtgtggccagcccctgttcgtgtacaagctggagcaggtgtctgagaagggcaaggcttacaccaactacttcggacggtgcaatgtggccgagcacgaaaagctgatcctgctggcccagctgaagcccgagaaggatagcgacgaagccgtgacatatagcctgggaaagtttgggcagagggccctggatttctacagcattcatgtgaccaaggagtccacccaccccgtgaagcccctggcccagatcgccggaaacagatacgcctccggacctgtgggaaaggccctgagcgacgcatgtatgggcacaatcgcctccttcctgtctaagtaccaggacatcatcatcgaacaccagaaggtggtgaagggcaaccagaagagactggagagcctgcgggagctggccggcaaggaaaacctggaataccctagcgtgaccctgccacctcagcctcacaccaaggagggcgttgatgcctacaacgaagtgatcgcccgggtgcgaatgtgggtgaacctgaacctgtggcagaagctgaagctaagcagagatgatgccaagcctctgctgagactgaagggattcccttcctttcctctggtcgagagacaggccaacgaagtggactggtgggacatggtgtgtaacgtgaagaagctgatcaacgagaaaaaggaggatggcaaggtgttttggcagaatctggctggctacaagagacaggaagccctgagaccatacctgagcagcgaggaagatcggaagaagggaaagaaattcgctcggtaccagctgggcgacctgctgctgcacctggaaaagaagcacggcgaggactggggaaaggtgtacgacgaggcctgggagcggattgacaagaaagtggaaggcctgagcaagcacatcaagctggaagaggaacggagaagcgaggacgcccagagcaaggccgccctgaccgactggctgcgggctaaggccagcttcgtgatcgagggcctgaaggaggccgacaaggacgagttctgcagatgcgagctgaagctgcagaagtggtacggggacctgcggggaaagcccttcgccatcgaagccgagaacagcatcctggacatcagcggcttcagcaagcagtacaactgtgccttcatctggcagaaggacggcgtgaagaagctgaacctgtacctgatcatcaactacttcaagggcggcaagctgcggttcaagaagatcaaacctgaagccttcgaagccaacagattctacaccgtgatcaacaaaaagagcggcgagatcgtgcccatggaggtgaacttcaacttcgacgaccccaacctgatcatcctgcctctggcctttggcaagagacagggcagagaattcatctggaacgacctgctgtccctggaaaccggcagcctgaagctggccaacggaagagtgatcgagaagacactgtacaacagaagaacccggcaggatgagcctgccctgttcgtggccctgaccttcgagcggcgggaggtcctggactcctccaatatcaaaccaatgaacctgatcggcgtggcaagaggcgaaaacatccccgccgtgatcgccctgaccgaccccgagggctgcccactgagccggtttaaggatagcctgggaaacccaacccacatcctgagaatcggcgagagctataaggagaagcagcggaccatccaggccaagaaggaggtggagcagcggagagccggcggctacagccggaagtacgccagcaaagccaagaatctggcagacgatatggtgagaaacaccgctagagatctgctgtactacgccgtgacccaggatgccatgctgatcttcgccaacctgagccggggcttcggccggcagggcaagcggaccttcatggccgagagacagtacacacggatggaggactggctgaccgccaagctggcctacgagggcctgagcaagacctacctgtccaagacactggcccagtacacctccaagacatgcagcaactgtgggtttaccatcaccagcgccgactacgacagggtgctggagaagctgaagaagacagcaacaggctggatgaccacaattaacggcaaggagctgaaggtggagggccagattacctactacaacagatacaagagacagaacgtagtcaaggacctgtccgtcgagctggatagactgagcgaagaatctgtgaacaacgacatctcctcctggacaaagggcagaagcggagaagctctgagcctcctgaagaaaagattctcccatagacccgtgcaggagaagttcgtgtgcctgaactgcggcttcgagacacacgcagccgagcaagccgccctgaacatcgccagatcctggctgttcctgcggagccaggagtacaagaaataccagacaaacaagacaaccggcaacaccgataagagagccttcgtcgagacctggcagtccttttaccggaagaagcttaaggaggtgtggaaacctgccgtgcggtctggcggatctggcggaggctccacaagcgtgacctacgaggacgtgcacgtgaacttcacccaggaggagtgggccctgctggaccccagccagaagaagctgtacaaggacgtgatgctggagacctacaggaacctgaacgccatcggcttcagctgggaggcccagaacatcgaggagcactgccagagcttcggcaggcacaggaggtgcgagaggagccagagggccgagaagcccagcgagtacacccagcccgacaagggcttcgccctgagggcccacagccacgcccagaggcacgagaccagccccaagaaaaagagaaaagtctaagctgccttctgcggggcttgccttctggccatgcccttcttctctcccttgcacctgtacctcttggtctttgaataaagcctgagtaggaaggctagcaaaaaaaaaaaaaaaaaaaaaaaaaaaaaaaaaaaaaaaaaaaaaaaaaaaaaaaaaaaaaaaaaaaaaaaaaaaaaaaa

SEQ ID NO: 2874 - RNA, 5419 nt, synthetic construct
  source 1..5419: mol_type = other RNA
aggaaataagagagaaaagaagagtaagaagaaatataagagccaccatggcccctaagaagaagcgtaaagtgagccgggtgaacggcagcggcagcggcggcggcatgaaccacgaccaggagttcgacccccctaaggtgtaccctcccgtccccgccgagaagagaaagcccatccgggtcctgagcctgttcgatggcatcgccaccggtctgctggtgctgaaggacctgggcatccaggtggataggtacattgcctccgaggtgtgcgaggactccatcaccgtgggaatggtgcgtcatcagggcaagatcatgtacgtgggcgacgtgcggagcgtgacacagaagcatatccaggagtggggccctttcgacctggtgatcggcggcagcccttgcaatgacctgagcatcgtgaacccagcccggaagggcctgtacgagggaaccggcagactgttcttcgagttttacagactgctgcacgacgcccggcctaaggaaggcgacgaccggcccttcttttggctgttcgagaatgtggtggccatgggagtcagcgacaagcgggatattagccggttcctggagagcaaccccgtgatgatcgatgccaaggaagtgagcgccgcccaccgggccagatacttctggggcaatctgcctggcatgaacagacccctggccagcaccgtgaacgacaagctggagctgcaggagtgcctggagcacggccggatcgccaagttcagcaaggtgagaaccatcaccacccgaagcaacagcatcaaacaaggcaaggaccagcactttcctgtgttcatgaacgagaaggaggacatcctgtggtgtaccgagatggagagagtgttcgggttcccagtccactacacagatgtcagcaacatgtctagactggccagacagagactgctgggaagaagctggtccgtccctgtgatcagacacctgttcgcccctctgaaggagtacttcgcctgcgtgagcagcggcaacagcaacgccaacagccggggccccagcttctctagcggcctggtgccactgtccctgagagggagccacatgggccccatggagatctacaaaaccgtgagcgcctggaagcggcagcctgtgcgcgtgctgagcctgtttcggaatatcgataaagtcctgaaaagcctgggattcctggagagcggctctggctccggcggtggcaccctgaagtacgtggaggatgtgacaaacgtggtcagacgggatgtggagaagtggggccccttcgatctggtgtacggcagcacccaacccctgggcagctcttgtgaccggtgccctggctggtacatgtttcagttccaccggatcctgcagtacgccctgccgagacaggagtcccagcggccattcttttggattttcatggacaacttgctgctgaccgaggatgaccaggaaactaccactcggttcctgcagaccgaagccgtgaccctgcaggacgtgagaggccgggactaccagaacgccatgcgggtgtggtccaacatccctggactgaaaagcaagcacgcacctctgacccctaaagaagaggagtacctgcaggcccaggtgcggagcagaagcaagctggacgcccctaaggtggatctgctggtgaagaattgcctcctgcccctgagagagtacttcaagtatttcagccagaatagtctgcccctgggcggcccaagcagcggcgcccctcctcccagcggcggcagcccagccggctccccaacctctaccgaggagggcacctctgagtccgccacccccgagagcggccctggcacctccaccgagcccagcgagggcagcgcacccggcagccctgccggcagccccacctccacagaggagggaaccagcaccgagcccagcgaaggcagcgccccaggcaccagcaccgagcctagtgagggcggctctggcggcggcagcgcccaggagattaaacggatcaacaagatcagaagaagacttgtgaaagacagcaacaccaagaaggccggcaagacaggccccatgaaaaccctgctggttagagtgatgacacccgatctgagagagcggctggaaaacctgagaaagaagcctgaaaatatcccccagcccatcagcaatacatctagagccaacctgaataagctgctgaccgattacaccgaaatgaagaaggcgatcctgcatgtgtactgggaagagttccagaaggaccctgtgggcctgatgagccgggtggcccagcctgccagcaagaagatcgatcagaacaagctgaaacctgagatggacgagaagggcaacctgaccaccgccggctttgcctgctctcagtgtggccagcccctgttcgtgtacaagctggagcaggtgtctgagaagggcaaggcttacaccaactacttcggacggtgcaatgtggccgagcacgaaaagctgatcctgctggcccagctgaagcccgagaaggatagcgacgaagccgtgacatatagcctgggaaagtttgggcagagggccctggatttctacagcattcatgtgaccaaggagtccacccaccccgtgaagcccctggcccagatcgccggaaacagatacgcctccggacctgtgggaaaggccctgagcgacgcatgtatgggcacaatcgcctccttcctgtctaagtaccaggacatcatcatcgaacaccagaaggtggtgaagggcaaccagaagagactggagagcctgcgggagctggccggcaaggaaaacctggaataccctagcgtgaccctgccacctcagcctcacaccaaggagggcgttgatgcctacaacgaagtgatcgcccgggtgcgaatgtgggtgaacctgaacctgtggcagaagctgaagctaagcagagatgatgccaagcctctgctgagactgaagggattcccttcctttcctctggtcgagagacaggccaacgaagtggactggtgggacatggtgtgtaacgtgaagaagctgatcaacgagaaaaaggaggatggcaaggtgttttggcagaatctggctggctacaagagacaggaagccctgagaccatacctgagcagcgaggaagatcggaagaagggaaagaaattcgctcggtaccagctgggcgacctgctgctgcacctggaaaagaagcacggcgaggactggggaaaggtgtacgacgaggcctgggagcggattgacaagaaagtggaaggcctgagcaagcacatcaagctggaagaggaacggagaagcgaggacgcccagagcaaggccgccctgaccgactggctgcgggctaaggccagcttcgtgatcgagggcctgaaggaggccgacaaggacgagttctgcagatgcgagctgaagctgcagaagtggtacggggacctgcggggaaagcccttcgccatcgaagccgagaacagcatcctggacatcagcggcttcagcaagcagtacaactgtgccttcatctggcagaaggacggcgtgaagaagctgaacctgtacctgatcatcaactacttcaagggcggcaagctgcggttcaagaagatcaaacctgaagccttcgaagccaacagattctacaccgtgatcaacaaaaagagcggcgagatcgtgcccatggaggtgaacttcaacttcgacgaccccaacctgatcatcctgcctctggcctttggcaagagacagggcagagaattcatctggaacgacctgctgtccctggaaaccggcagcctgaagctggccaacggaagagtgatcgagaagacactgtacaacagaagaacccggcaggatgagcctgccctgttcgtggccctgaccttcgagcggcgggaggtcctggactcctccaatatcaaaccaatgaacctgatcggcgtggcaagaggcgaaaacatccccgccgtgatcgccctgaccgaccccgagggctgcccactgagccggtttaaggatagcctgggaaacccaacccacatcctgagaatcggcgagagctataaggagaagcagcggaccatccaggccaagaaggaggtggagcagcggagagccggcggctacagccggaagtacgccagcaaagccaagaatctggcagacgatatggtgagaaacaccgctagagatctgctgtactacgccgtgacccaggatgccatgctgatcttcgccaacctgagccggggcttcggccggcagggcaagcggaccttcatggccgagagacagtacacacggatggaggactggctgaccgccaagctggcctacgagggcctgagcaagacctacctgtccaagacactggcccagtacacctccaagacatgcagcaactgtgggtttaccatcaccagcgccgactacgacagggtgctggagaagctgaagaagacagcaacaggctggatgaccacaattaacggcaaggagctgaaggtggagggccagattacctactacaacagatacaagagacagaacgtagtcaaggacctgtccgtcgagctggatagactgagcgaagaatctgtgaacaacgacatctcctcctggacaaagggcagaagcggagaagctctgagcctcctgaagaaaagattctcccatagacccgtgcaggagaagttcgtgtgcctgaactgcggcttcgagacacacgcagccgagcaagccgccctgaacatcgccagatcctggctgttcctgcggagccaggagtacaagaaataccagacaaacaagacaaccggcaacaccgataagagagccttcgtcgagacctggcagtccttttaccggaagaagcttaaggaggtgtggaaacctgccgtgcggtctggcggatctggcggaggctccacaagcatggccggcgaggccgaggcccagctggaccccagcctgcagggcctggtgatgttcgaggacgtgaccgtgtacttcagcagggaggagtggggcctgctgaacgtgacccagaagggcctgtacagggacgtgatgctggagaacttcgccctggtgagcagcctgggcctggcccccagcaggagccccgtgttcacccagctggaggacgacgagcagagctgggtgcccaactgggtgaccagccccaagaaaaagagaaaagtctaagctgccttctgcggggcttgccttctggccatgcccttcttctctcccttgcacctgtacctcttggtctttgaataaagcctgagtaggaaggctagcaaaaaaaaaaaaaaaaaaaaaaaaaaaaaaaaaaaaaaaaaaaaaaaaaaaaaaaaaaaaaaaaaaaaaaaaaaaaaaaa

SEQ ID NO: 2875 - RNA, 5419 nt, synthetic construct
  source 1..5419: mol_type = other RNA
aggaaataagagagaaaagaagagtaagaagaaatataagagccaccatggcccctaagaagaagcgtaaagtgagccgggtgaacggcagcggcagcggcggcggcatgaaccacgaccaggagttcgacccccctaaggtgtaccctcccgtccccgccgagaagagaaagcccatccgggtcctgagcctgttcgatggcatcgccaccggtctgctggtgctgaaggacctgggcatccaggtggataggtacattgcctccgaggtgtgcgaggactccatcaccgtgggaatggtgcgtcatcagggcaagatcatgtacgtgggcgacgtgcggagcgtgacacagaagcatatccaggagtggggccctttcgacctggtgatcggcggcagcccttgcaatgacctgagcatcgtgaacccagcccggaagggcctgtacgagggaaccggcagactgttcttcgagttttacagactgctgcacgacgcccggcctaaggaaggcgacgaccggcccttcttttggctgttcgagaatgtggtggccatgggagtcagcgacaagcgggatattagccggttcctggagagcaaccccgtgatgatcgatgccaaggaagtgagcgccgcccaccgggccagatacttctggggcaatctgcctggcatgaacagacccctggccagcaccgtgaacgacaagctggagctgcaggagtgcctggagcacggccggatcgccaagttcagcaaggtgagaaccatcaccacccgaagcaacagcatcaaacaaggcaaggaccagcactttcctgtgttcatgaacgagaaggaggacatcctgtggtgtaccgagatggagagagtgttcgggttcccagtccactacacagatgtcagcaacatgtctagactggccagacagagactgctgggaagaagctggtccgtccctgtgatcagacacctgttcgcccctctgaaggagtacttcgcctgcgtgagcagcggcaacagcaacgccaacagccggggccccagcttctctagcggcctggtgccactgtccctgagagggagccacatgggccccatggagatctacaaaaccgtgagcgcctggaagcggcagcctgtgcgcgtgctgagcctgtttcggaatatcgataaagtcctgaaaagcctgggattcctggagagcggctctggctccggcggtggcaccctgaagtacgtggaggatgtgacaaacgtggtcagacgggatgtggagaagtggggccccttcgatctggtgtacggcagcacccaacccctgggcagctcttgtgaccggtgccctggctggtacatgtttcagttccaccggatcctgcagtacgccctgccgagacaggagtcccagcggccattcttttggattttcatggacaacttgctgctgaccgaggatgaccaggaaactaccactcggttcctgcagaccgaagccgtgaccctgcaggacgtgagaggccgggactaccagaacgccatgcgggtgtggtccaacatccctggactgaaaagcaagcacgcacctctgacccctaaagaagaggagtacctgcaggcccaggtgcggagcagaagcaagctggacgcccctaaggtggatctgctggtgaagaattgcctcctgcccctgagagagtacttcaagtatttcagccagaatagtctgcccctgggcggcccaagcagcggcgcccctcctcccagcggcggcagcccagccggctccccaacctctaccgaggagggcacctctgagtccgccacccccgagagcggccctggcacctccaccgagcccagcgagggcagcgcacccggcagccctgccggcagccccacctccacagaggagggaaccagcaccgagcccagcgaaggcagcgccccaggcaccagcaccgagcctagtgagggcggctctggcggcggcagcgcccaggagattaaacggatcaacaagatcagaagaagacttgtgaaagacagcaacaccaagaaggccggcaagacaggccccatgaaaaccctgctggttagagtgatgacacccgatctgagagagcggctggaaaacctgagaaagaagcctgaaaatatcccccagcccatcagcaatacatctagagccaacctgaataagctgctgaccgattacaccgaaatgaagaaggcgatcctgcatgtgtactgggaagagttccagaaggaccctgtgggcctgatgagccgggtggcccagcctgccagcaagaagatcgatcagaacaagctgaaacctgagatggacgagaagggcaacctgaccaccgccggctttgcctgctctcagtgtggccagcccctgttcgtgtacaagctggagcaggtgtctgagaagggcaaggcttacaccaactacttcggacggtgcaatgtggccgagcacgaaaagctgatcctgctggcccagctgaagcccgagaaggatagcgacgaagccgtgacatatagcctgggaaagtttgggcagagggccctggatttctacagcattcatgtgaccaaggagtccacccaccccgtgaagcccctggcccagatcgccggaaacagatacgcctccggacctgtgggaaaggccctgagcgacgcatgtatgggcacaatcgcctccttcctgtctaagtaccaggacatcatcatcgaacaccagaaggtggtgaagggcaaccagaagagactggagagcctgcgggagctggccggcaaggaaaacctggaataccctagcgtgaccctgccacctcagcctcacaccaaggagggcgttgatgcctacaacgaagtgatcgcccgggtgcgaatgtgggtgaacctgaacctgtggcagaagctgaagctaagcagagatgatgccaagcctctgctgagactgaagggattcccttcctttcctctggtcgagagacaggccaacgaagtggactggtgggacatggtgtgtaacgtgaagaagctgatcaacgagaaaaaggaggatggcaaggtgttttggcagaatctggctggctacaagagacaggaagccctgagaccatacctgagcagcgaggaagatcggaagaagggaaagaaattcgctcggtaccagctgggcgacctgctgctgcacctggaaaagaagcacggcgaggactggggaaaggtgtacgacgaggcctgggagcggattgacaagaaagtggaaggcctgagcaagcacatcaagctggaagaggaacggagaagcgaggacgcccagagcaaggccgccctgaccgactggctgcgggctaaggccagcttcgtgatcgagggcctgaaggaggccgacaaggacgagttctgcagatgcgagctgaagctgcagaagtggtacggggacctgcggggaaagcccttcgccatcgaagccgagaacagcatcctggacatcagcggcttcagcaagcagtacaactgtgccttcatctggcagaaggacggcgtgaagaagctgaacctgtacctgatcatcaactacttcaagggcggcaagctgcggttcaagaagatcaaacctgaagccttcgaagccaacagattctacaccgtgatcaacaaaaagagcggcgagatcgtgcccatggaggtgaacttcaacttcgacgaccccaacctgatcatcctgcctctggcctttggcaagagacagggcagagaattcatctggaacgacctgctgtccctggaaaccggcagcctgaagctggccaacggaagagtgatcgagaagacactgtacaacagaagaacccggcaggatgagcctgccctgttcgtggccctgaccttcgagcggcgggaggtcctggactcctccaatatcaaaccaatgaacctgatcggcgtggcaagaggcgaaaacatccccgccgtgatcgccctgaccgaccccgagggctgcccactgagccggtttaaggatagcctgggaaacccaacccacatcctgagaatcggcgagagctataaggagaagcagcggaccatccaggccaagaaggaggtggagcagcggagagccggcggctacagccggaagtacgccagcaaagccaagaatctggcagacgatatggtgagaaacaccgctagagatctgctgtactacgccgtgacccaggatgccatgctgatcttcgccaacctgagccggggcttcggccggcagggcaagcggaccttcatggccgagagacagtacacacggatggaggactggctgaccgccaagctggcctacgagggcctgagcaagacctacctgtccaagacactggcccagtacacctccaagacatgcagcaactgtgggtttaccatcaccagcgccgactacgacagggtgctggagaagctgaagaagacagcaacaggctggatgaccacaattaacggcaaggagctgaaggtggagggccagattacctactacaacagatacaagagacagaacgtagtcaaggacctgtccgtcgagctggatagactgagcgaagaatctgtgaacaacgacatctcctcctggacaaagggcagaagcggagaagctctgagcctcctgaagaaaagattctcccatagacccgtgcaggagaagttcgtgtgcctgaactgcggcttcgagacacacgcagccgagcaagccgccctgaacatcgccagatcctggctgttcctgcggagccaggagtacaagaaataccagacaaacaagacaaccggcaacaccgataagagagccttcgtcgagacctggcagtccttttaccggaagaagcttaaggaggtgtggaaacctgccgtgcggtctggcggatctggcggaggctccacaagccaggagcccgtgaccttcgaggacgtggccgtgtacttcacccagaaccagtgggccaagctggaccccacccagagggccctgtacagggaggtgatgctggagaactacgccaacgtggccagcctgggcgtggccttccccttccccaagcccgacctggtgagccagctggagaggggcgaggtgccctggggccccgacccctgggaggccgaggtgctgaggggcatctgccccggcaccagccccaagaaaaagagaaaagtctaagctgccttctgcggggcttgccttctggccatgcccttcttctctcccttgcacctgtacctcttggtctttgaataaagcctgagtaggaaggctagcaaaaaaaaaaaaaaaaaaaaaaaaaaaaaaaaaaaaaaaaaaaaaaaaaaaaaaaaaaaaaaaaaaaaaaaaaaaaaaaa

SEQ ID NO: 2876 - RNA, 5419 nt, synthetic construct
  source 1..5419: mol_type = other RNA
aggaaataagagagaaaagaagagtaagaagaaatataagagccaccatggcccctaagaagaagcgtaaagtgagccgggtgaacggcagcggcagcggcggcggcatgaaccacgaccaggagttcgacccccctaaggtgtaccctcccgtccccgccgagaagagaaagcccatccgggtcctgagcctgttcgatggcatcgccaccggtctgctggtgctgaaggacctgggcatccaggtggataggtacattgcctccgaggtgtgcgaggactccatcaccgtgggaatggtgcgtcatcagggcaagatcatgtacgtgggcgacgtgcggagcgtgacacagaagcatatccaggagtggggccctttcgacctggtgatcggcggcagcccttgcaatgacctgagcatcgtgaacccagcccggaagggcctgtacgagggaaccggcagactgttcttcgagttttacagactgctgcacgacgcccggcctaaggaaggcgacgaccggcccttcttttggctgttcgagaatgtggtggccatgggagtcagcgacaagcgggatattagccggttcctggagagcaaccccgtgatgatcgatgccaaggaagtgagcgccgcccaccgggccagatacttctggggcaatctgcctggcatgaacagacccctggccagcaccgtgaacgacaagctggagctgcaggagtgcctggagcacggccggatcgccaagttcagcaaggtgagaaccatcaccacccgaagcaacagcatcaaacaaggcaaggaccagcactttcctgtgttcatgaacgagaaggaggacatcctgtggtgtaccgagatggagagagtgttcgggttcccagtccactacacagatgtcagcaacatgtctagactggccagacagagactgctgggaagaagctggtccgtccctgtgatcagacacctgttcgcccctctgaaggagtacttcgcctgcgtgagcagcggcaacagcaacgccaacagccggggccccagcttctctagcggcctggtgccactgtccctgagagggagccacatgggccccatggagatctacaaaaccgtgagcgcctggaagcggcagcctgtgcgcgtgctgagcctgtttcggaatatcgataaagtcctgaaaagcctgggattcctggagagcggctctggctccggcggtggcaccctgaagtacgtggaggatgtgacaaacgtggtcagacgggatgtggagaagtggggccccttcgatctggtgtacggcagcacccaacccctgggcagctcttgtgaccggtgccctggctggtacatgtttcagttccaccggatcctgcagtacgccctgccgagacaggagtcccagcggccattcttttggattttcatggacaacttgctgctgaccgaggatgaccaggaaactaccactcggttcctgcagaccgaagccgtgaccctgcaggacgtgagaggccgggactaccagaacgccatgcgggtgtggtccaacatccctggactgaaaagcaagcacgcacctctgacccctaaagaagaggagtacctgcaggcccaggtgcggagcagaagcaagctggacgcccctaaggtggatctgctggtgaagaattgcctcctgcccctgagagagtacttcaagtatttcagccagaatagtctgcccctgggcggcccaagcagcggcgcccctcctcccagcggcggcagcccagccggctccccaacctctaccgaggagggcacctctgagtccgccacccccgagagcggccctggcacctccaccgagcccagcgagggcagcgcacccggcagccctgccggcagccccacctccacagaggagggaaccagcaccgagcccagcgaaggcagcgccccaggcaccagcaccgagcctagtgagggcggctctggcggcggcagcgcccaggagattaaacggatcaacaagatcagaagaagacttgtgaaagacagcaacaccaagaaggccggcaagacaggccccatgaaaaccctgctggttagagtgatgacacccgatctgagagagcggctggaaaacctgagaaagaagcctgaaaatatcccccagcccatcagcaatacatctagagccaacctgaataagctgctgaccgattacaccgaaatgaagaaggcgatcctgcatgtgtactgggaagagttccagaaggaccctgtgggcctgatgagccgggtggcccagcctgccagcaagaagatcgatcagaacaagctgaaacctgagatggacgagaagggcaacctgaccaccgccggctttgcctgctctcagtgtggccagcccctgttcgtgtacaagctggagcaggtgtctgagaagggcaaggcttacaccaactacttcggacggtgcaatgtggccgagcacgaaaagctgatcctgctggcccagctgaagcccgagaaggatagcgacgaagccgtgacatatagcctgggaaagtttgggcagagggccctggatttctacagcattcatgtgaccaaggagtccacccaccccgtgaagcccctggcccagatcgccggaaacagatacgcctccggacctgtgggaaaggccctgagcgacgcatgtatgggcacaatcgcctccttcctgtctaagtaccaggacatcatcatcgaacaccagaaggtggtgaagggcaaccagaagagactggagagcctgcgggagctggccggcaaggaaaacctggaataccctagcgtgaccctgccacctcagcctcacaccaaggagggcgttgatgcctacaacgaagtgatcgcccgggtgcgaatgtgggtgaacctgaacctgtggcagaagctgaagctaagcagagatgatgccaagcctctgctgagactgaagggattcccttcctttcctctggtcgagagacaggccaacgaagtggactggtgggacatggtgtgtaacgtgaagaagctgatcaacgagaaaaaggaggatggcaaggtgttttggcagaatctggctggctacaagagacaggaagccctgagaccatacctgagcagcgaggaagatcggaagaagggaaagaaattcgctcggtaccagctgggcgacctgctgctgcacctggaaaagaagcacggcgaggactggggaaaggtgtacgacgaggcctgggagcggattgacaagaaagtggaaggcctgagcaagcacatcaagctggaagaggaacggagaagcgaggacgcccagagcaaggccgccctgaccgactggctgcgggctaaggccagcttcgtgatcgagggcctgaaggaggccgacaaggacgagttctgcagatgcgagctgaagctgcagaagtggtacggggacctgcggggaaagcccttcgccatcgaagccgagaacagcatcctggacatcagcggcttcagcaagcagtacaactgtgccttcatctggcagaaggacggcgtgaagaagctgaacctgtacctgatcatcaactacttcaagggcggcaagctgcggttcaagaagatcaaacctgaagccttcgaagccaacagattctacaccgtgatcaacaaaaagagcggcgagatcgtgcccatggaggtgaacttcaacttcgacgaccccaacctgatcatcctgcctctggcctttggcaagagacagggcagagaattcatctggaacgacctgctgtccctggaaaccggcagcctgaagctggccaacggaagagtgatcgagaagacactgtacaacagaagaacccggcaggatgagcctgccctgttcgtggccctgaccttcgagcggcgggaggtcctggactcctccaatatcaaaccaatgaacctgatcggcgtggcaagaggcgaaaacatccccgccgtgatcgccctgaccgaccccgagggctgcccactgagccggtttaaggatagcctgggaaacccaacccacatcctgagaatcggcgagagctataaggagaagcagcggaccatccaggccaagaaggaggtggagcagcggagagccggcggctacagccggaagtacgccagcaaagccaagaatctggcagacgatatggtgagaaacaccgctagagatctgctgtactacgccgtgacccaggatgccatgctgatcttcgccaacctgagccggggcttcggccggcagggcaagcggaccttcatggccgagagacagtacacacggatggaggactggctgaccgccaagctggcctacgagggcctgagcaagacctacctgtccaagacactggcccagtacacctccaagacatgcagcaactgtgggtttaccatcaccagcgccgactacgacagggtgctggagaagctgaagaagacagcaacaggctggatgaccacaattaacggcaaggagctgaaggtggagggccagattacctactacaacagatacaagagacagaacgtagtcaaggacctgtccgtcgagctggatagactgagcgaagaatctgtgaacaacgacatctcctcctggacaaagggcagaagcggagaagctctgagcctcctgaagaaaagattctcccatagacccgtgcaggagaagttcgtgtgcctgaactgcggcttcgagacacacgcagccgagcaagccgccctgaacatcgccagatcctggctgttcctgcggagccaggagtacaagaaataccagacaaacaagacaaccggcaacaccgataagagagccttcgtcgagacctggcagtccttttaccggaagaagcttaaggaggtgtggaaacctgccgtgcggtctggcggatctggcggaggctccacaagcatgaccaagttccaggaggccgtgaccttcaaggacgtggccgtggccttcaccgaggaggagctgggcctgctggacagcgcccagaggaagctgtacagggacgtgatgctggagaacttcaggaacctggtgagcgtgggccaccagagcttcaagcccgacgtgatcagccagctggagagggaggagaagctgtggatgaaggagctgcagacccagaggggcaagcacagcgagaccaccagccccaagaaaaagagaaaagtctaagctgccttctgcggggcttgccttctggccatgcccttcttctctcccttgcacctgtacctcttggtctttgaataaagcctgagtaggaaggctagcaaaaaaaaaaaaaaaaaaaaaaaaaaaaaaaaaaaaaaaaaaaaaaaaaaaaaaaaaaaaaaaaaaaaaaaaaaaaaaaa

SEQ ID NO: 2877 - RNA, 5419 nt, synthetic construct
  source 1..5419: mol_type = other RNA
aggaaataagagagaaaagaagagtaagaagaaatataagagccaccatggcccctaagaagaagcgtaaagtgagccgggtgaacggcagcggcagcggcggcggcatgaaccacgaccaggagttcgacccccctaaggtgtaccctcccgtccccgccgagaagagaaagcccatccgggtcctgagcctgttcgatggcatcgccaccggtctgctggtgctgaaggacctgggcatccaggtggataggtacattgcctccgaggtgtgcgaggactccatcaccgtgggaatggtgcgtcatcagggcaagatcatgtacgtgggcgacgtgcggagcgtgacacagaagcatatccaggagtggggccctttcgacctggtgatcggcggcagcccttgcaatgacctgagcatcgtgaacccagcccggaagggcctgtacgagggaaccggcagactgttcttcgagttttacagactgctgcacgacgcccggcctaaggaaggcgacgaccggcccttcttttggctgttcgagaatgtggtggccatgggagtcagcgacaagcgggatattagccggttcctggagagcaaccccgtgatgatcgatgccaaggaagtgagcgccgcccaccgggccagatacttctggggcaatctgcctggcatgaacagacccctggccagcaccgtgaacgacaagctggagctgcaggagtgcctggagcacggccggatcgccaagttcagcaaggtgagaaccatcaccacccgaagcaacagcatcaaacaaggcaaggaccagcactttcctgtgttcatgaacgagaaggaggacatcctgtggtgtaccgagatggagagagtgttcgggttcccagtccactacacagatgtcagcaacatgtctagactggccagacagagactgctgggaagaagctggtccgtccctgtgatcagacacctgttcgcccctctgaaggagtacttcgcctgcgtgagcagcggcaacagcaacgccaacagccggggccccagcttctctagcggcctggtgccactgtccctgagagggagccacatgggccccatggagatctacaaaaccgtgagcgcctggaagcggcagcctgtgcgcgtgctgagcctgtttcggaatatcgataaagtcctgaaaagcctgggattcctggagagcggctctggctccggcggtggcaccctgaagtacgtggaggatgtgacaaacgtggtcagacgggatgtggagaagtggggccccttcgatctggtgtacggcagcacccaacccctgggcagctcttgtgaccggtgccctggctggtacatgtttcagttccaccggatcctgcagtacgccctgccgagacaggagtcccagcggccattcttttggattttcatggacaacttgctgctgaccgaggatgaccaggaaactaccactcggttcctgcagaccgaagccgtgaccctgcaggacgtgagaggccgggactaccagaacgccatgcgggtgtggtccaacatccctggactgaaaagcaagcacgcacctctgacccctaaagaagaggagtacctgcaggcccaggtgcggagcagaagcaagctggacgcccctaaggtggatctgctggtgaagaattgcctcctgcccctgagagagtacttcaagtatttcagccagaatagtctgcccctgggcggcccaagcagcggcgcccctcctcccagcggcggcagcccagccggctccccaacctctaccgaggagggcacctctgagtccgccacccccgagagcggccctggcacctccaccgagcccagcgagggcagcgcacccggcagccctgccggcagccccacctccacagaggagggaaccagcaccgagcccagcgaaggcagcgccccaggcaccagcaccgagcctagtgagggcggctctggcggcggcagcgcccaggagattaaacggatcaacaagatcagaagaagacttgtgaaagacagcaacaccaagaaggccggcaagacaggccccatgaaaaccctgctggttagagtgatgacacccgatctgagagagcggctggaaaacctgagaaagaagcctgaaaatatcccccagcccatcagcaatacatctagagccaacctgaataagctgctgaccgattacaccgaaatgaagaaggcgatcctgcatgtgtactgggaagagttccagaaggaccctgtgggcctgatgagccgggtggcccagcctgccagcaagaagatcgatcagaacaagctgaaacctgagatggacgagaagggcaacctgaccaccgccggctttgcctgctctcagtgtggccagcccctgttcgtgtacaagctggagcaggtgtctgagaagggcaaggcttacaccaactacttcggacggtgcaatgtggccgagcacgaaaagctgatcctgctggcccagctgaagcccgagaaggatagcgacgaagccgtgacatatagcctgggaaagtttgggcagagggccctggatttctacagcattcatgtgaccaaggagtccacccaccccgtgaagcccctggcccagatcgccggaaacagatacgcctccggacctgtgggaaaggccctgagcgacgcatgtatgggcacaatcgcctccttcctgtctaagtaccaggacatcatcatcgaacaccagaaggtggtgaagggcaaccagaagagactggagagcctgcgggagctggccggcaaggaaaacctggaataccctagcgtgaccctgccacctcagcctcacaccaaggagggcgttgatgcctacaacgaagtgatcgcccgggtgcgaatgtgggtgaacctgaacctgtggcagaagctgaagctaagcagagatgatgccaagcctctgctgagactgaagggattcccttcctttcctctggtcgagagacaggccaacgaagtggactggtgggacatggtgtgtaacgtgaagaagctgatcaacgagaaaaaggaggatggcaaggtgttttggcagaatctggctggctacaagagacaggaagccctgagaccatacctgagcagcgaggaagatcggaagaagggaaagaaattcgctcggtaccagctgggcgacctgctgctgcacctggaaaagaagcacggcgaggactggggaaaggtgtacgacgaggcctgggagcggattgacaagaaagtggaaggcctgagcaagcacatcaagctggaagaggaacggagaagcgaggacgcccagagcaaggccgccctgaccgactggctgcgggctaaggccagcttcgtgatcgagggcctgaaggaggccgacaaggacgagttctgcagatgcgagctgaagctgcagaagtggtacggggacctgcggggaaagcccttcgccatcgaagccgagaacagcatcctggacatcagcggcttcagcaagcagtacaactgtgccttcatctggcagaaggacggcgtgaagaagctgaacctgtacctgatcatcaactacttcaagggcggcaagctgcggttcaagaagatcaaacctgaagccttcgaagccaacagattctacaccgtgatcaacaaaaagagcggcgagatcgtgcccatggaggtgaacttcaacttcgacgaccccaacctgatcatcctgcctctggcctttggcaagagacagggcagagaattcatctggaacgacctgctgtccctggaaaccggcagcctgaagctggccaacggaagagtgatcgagaagacactgtacaacagaagaacccggcaggatgagcctgccctgttcgtggccctgaccttcgagcggcgggaggtcctggactcctccaatatcaaaccaatgaacctgatcggcgtggcaagaggcgaaaacatccccgccgtgatcgccctgaccgaccccgagggctgcccactgagccggtttaaggatagcctgggaaacccaacccacatcctgagaatcggcgagagctataaggagaagcagcggaccatccaggccaagaaggaggtggagcagcggagagccggcggctacagccggaagtacgccagcaaagccaagaatctggcagacgatatggtgagaaacaccgctagagatctgctgtactacgccgtgacccaggatgccatgctgatcttcgccaacctgagccggggcttcggccggcagggcaagcggaccttcatggccgagagacagtacacacggatggaggactggctgaccgccaagctggcctacgagggcctgagcaagacctacctgtccaagacactggcccagtacacctccaagacatgcagcaactgtgggtttaccatcaccagcgccgactacgacagggtgctggagaagctgaagaagacagcaacaggctggatgaccacaattaacggcaaggagctgaaggtggagggccagattacctactacaacagatacaagagacagaacgtagtcaaggacctgtccgtcgagctggatagactgagcgaagaatctgtgaacaacgacatctcctcctggacaaagggcagaagcggagaagctctgagcctcctgaagaaaagattctcccatagacccgtgcaggagaagttcgtgtgcctgaactgcggcttcgagacacacgcagccgagcaagccgccctgaacatcgccagatcctggctgttcctgcggagccaggagtacaagaaataccagacaaacaagacaaccggcaacaccgataagagagccttcgtcgagacctggcagtccttttaccggaagaagcttaaggaggtgtggaaacctgccgtgcggtctggcggatctggcggaggctccacaagcatgaacgccgtgacctacgaggacgtgcacgtgaacttcacccaggaggagtgggccctgctggaccccagccagaagaagctgtacaaggacgtgatgctggagacctacaggaacctgaacgccatcggcttcaactgggacagcaagatcttcaagaacatcgtgcaggtgctggaggacaccgagggcatgaaggaggtgagggtgcagaggaagaggctgaacatcctgaacgtgatcaccagccccaagaaaaagagaaaagtctaagctgccttctgcggggcttgccttctggccatgcccttcttctctcccttgcacctgtacctcttggtctttgaataaagcctgagtaggaaggctagcaaaaaaaaaaaaaaaaaaaaaaaaaaaaaaaaaaaaaaaaaaaaaaaaaaaaaaaaaaaaaaaaaaaaaaaaaaaaaaaa

SEQ ID NO: 2878 - RNA, 5419 nt, synthetic construct
  source 1..5419: mol_type = other RNA
aggaaataagagagaaaagaagagtaagaagaaatataagagccaccatggcccctaagaagaagcgtaaagtgagccgggtgaacggcagcggcagcggcggcggcatgaaccacgaccaggagttcgacccccctaaggtgtaccctcccgtccccgccgagaagagaaagcccatccgggtcctgagcctgttcgatggcatcgccaccggtctgctggtgctgaaggacctgggcatccaggtggataggtacattgcctccgaggtgtgcgaggactccatcaccgtgggaatggtgcgtcatcagggcaagatcatgtacgtgggcgacgtgcggagcgtgacacagaagcatatccaggagtggggccctttcgacctggtgatcggcggcagcccttgcaatgacctgagcatcgtgaacccagcccggaagggcctgtacgagggaaccggcagactgttcttcgagttttacagactgctgcacgacgcccggcctaaggaaggcgacgaccggcccttcttttggctgttcgagaatgtggtggccatgggagtcagcgacaagcgggatattagccggttcctggagagcaaccccgtgatgatcgatgccaaggaagtgagcgccgcccaccgggccagatacttctggggcaatctgcctggcatgaacagacccctggccagcaccgtgaacgacaagctggagctgcaggagtgcctggagcacggccggatcgccaagttcagcaaggtgagaaccatcaccacccgaagcaacagcatcaaacaaggcaaggaccagcactttcctgtgttcatgaacgagaaggaggacatcctgtggtgtaccgagatggagagagtgttcgggttcccagtccactacacagatgtcagcaacatgtctagactggccagacagagactgctgggaagaagctggtccgtccctgtgatcagacacctgttcgcccctctgaaggagtacttcgcctgcgtgagcagcggcaacagcaacgccaacagccggggccccagcttctctagcggcctggtgccactgtccctgagagggagccacatgggccccatggagatctacaaaaccgtgagcgcctggaagcggcagcctgtgcgcgtgctgagcctgtttcggaatatcgataaagtcctgaaaagcctgggattcctggagagcggctctggctccggcggtggcaccctgaagtacgtggaggatgtgacaaacgtggtcagacgggatgtggagaagtggggccccttcgatctggtgtacggcagcacccaacccctgggcagctcttgtgaccggtgccctggctggtacatgtttcagttccaccggatcctgcagtacgccctgccgagacaggagtcccagcggccattcttttggattttcatggacaacttgctgctgaccgaggatgaccaggaaactaccactcggttcctgcagaccgaagccgtgaccctgcaggacgtgagaggccgggactaccagaacgccatgcgggtgtggtccaacatccctggactgaaaagcaagcacgcacctctgacccctaaagaagaggagtacctgcaggcccaggtgcggagcagaagcaagctggacgcccctaaggtggatctgctggtgaagaattgcctcctgcccctgagagagtacttcaagtatttcagccagaatagtctgcccctgggcggcccaagcagcggcgcccctcctcccagcggcggcagcccagccggctccccaacctctaccgaggagggcacctctgagtccgccacccccgagagcggccctggcacctccaccgagcccagcgagggcagcgcacccggcagccctgccggcagccccacctccacagaggagggaaccagcaccgagcccagcgaaggcagcgccccaggcaccagcaccgagcctagtgagggcggctctggcggcggcagcgcccaggagattaaacggatcaacaagatcagaagaagacttgtgaaagacagcaacaccaagaaggccggcaagacaggccccatgaaaaccctgctggttagagtgatgacacccgatctgagagagcggctggaaaacctgagaaagaagcctgaaaatatcccccagcccatcagcaatacatctagagccaacctgaataagctgctgaccgattacaccgaaatgaagaaggcgatcctgcatgtgtactgggaagagttccagaaggaccctgtgggcctgatgagccgggtggcccagcctgccagcaagaagatcgatcagaacaagctgaaacctgagatggacgagaagggcaacctgaccaccgccggctttgcctgctctcagtgtggccagcccctgttcgtgtacaagctggagcaggtgtctgagaagggcaaggcttacaccaactacttcggacggtgcaatgtggccgagcacgaaaagctgatcctgctggcccagctgaagcccgagaaggatagcgacgaagccgtgacatatagcctgggaaagtttgggcagagggccctggatttctacagcattcatgtgaccaaggagtccacccaccccgtgaagcccctggcccagatcgccggaaacagatacgcctccggacctgtgggaaaggccctgagcgacgcatgtatgggcacaatcgcctccttcctgtctaagtaccaggacatcatcatcgaacaccagaaggtggtgaagggcaaccagaagagactggagagcctgcgggagctggccggcaaggaaaacctggaataccctagcgtgaccctgccacctcagcctcacaccaaggagggcgttgatgcctacaacgaagtgatcgcccgggtgcgaatgtgggtgaacctgaacctgtggcagaagctgaagctaagcagagatgatgccaagcctctgctgagactgaagggattcccttcctttcctctggtcgagagacaggccaacgaagtggactggtgggacatggtgtgtaacgtgaagaagctgatcaacgagaaaaaggaggatggcaaggtgttttggcagaatctggctggctacaagagacaggaagccctgagaccatacctgagcagcgaggaagatcggaagaagggaaagaaattcgctcggtaccagctgggcgacctgctgctgcacctggaaaagaagcacggcgaggactggggaaaggtgtacgacgaggcctgggagcggattgacaagaaagtggaaggcctgagcaagcacatcaagctggaagaggaacggagaagcgaggacgcccagagcaaggccgccctgaccgactggctgcgggctaaggccagcttcgtgatcgagggcctgaaggaggccgacaaggacgagttctgcagatgcgagctgaagctgcagaagtggtacggggacctgcggggaaagcccttcgccatcgaagccgagaacagcatcctggacatcagcggcttcagcaagcagtacaactgtgccttcatctggcagaaggacggcgtgaagaagctgaacctgtacctgatcatcaactacttcaagggcggcaagctgcggttcaagaagatcaaacctgaagccttcgaagccaacagattctacaccgtgatcaacaaaaagagcggcgagatcgtgcccatggaggtgaacttcaacttcgacgaccccaacctgatcatcctgcctctggcctttggcaagagacagggcagagaattcatctggaacgacctgctgtccctggaaaccggcagcctgaagctggccaacggaagagtgatcgagaagacactgtacaacagaagaacccggcaggatgagcctgccctgttcgtggccctgaccttcgagcggcgggaggtcctggactcctccaatatcaaaccaatgaacctgatcggcgtggcaagaggcgaaaacatccccgccgtgatcgccctgaccgaccccgagggctgcccactgagccggtttaaggatagcctgggaaacccaacccacatcctgagaatcggcgagagctataaggagaagcagcggaccatccaggccaagaaggaggtggagcagcggagagccggcggctacagccggaagtacgccagcaaagccaagaatctggcagacgatatggtgagaaacaccgctagagatctgctgtactacgccgtgacccaggatgccatgctgatcttcgccaacctgagccggggcttcggccggcagggcaagcggaccttcatggccgagagacagtacacacggatggaggactggctgaccgccaagctggcctacgagggcctgagcaagacctacctgtccaagacactggcccagtacacctccaagacatgcagcaactgtgggtttaccatcaccagcgccgactacgacagggtgctggagaagctgaagaagacagcaacaggctggatgaccacaattaacggcaaggagctgaaggtggagggccagattacctactacaacagatacaagagacagaacgtagtcaaggacctgtccgtcgagctggatagactgagcgaagaatctgtgaacaacgacatctcctcctggacaaagggcagaagcggagaagctctgagcctcctgaagaaaagattctcccatagacccgtgcaggagaagttcgtgtgcctgaactgcggcttcgagacacacgcagccgagcaagccgccctgaacatcgccagatcctggctgttcctgcggagccaggagtacaagaaataccagacaaacaagacaaccggcaacaccgataagagagccttcgtcgagacctggcagtccttttaccggaagaagcttaaggaggtgtggaaacctgccgtgcggtctggcggatctggcggaggctccacaagcatggtgaccttcgaggacgtggccgtgcacttcaccaagaccgagtggaccggcctgagccccgcccagagggccctgtacaggagcgtgatgctggagaacttcggcaacctgaccgccctgggctaccccgtgcccaagcccgccctgatcagcctgctggagggcggcgacatggcctggggcctggaggcccaggacgacccccccgccgagaccaccaagaacgtgaggaaggacgtgaccagccccaagaaaaagagaaaagtctaagctgccttctgcggggcttgccttctggccatgcccttcttctctcccttgcacctgtacctcttggtctttgaataaagcctgagtaggaaggctagcaaaaaaaaaaaaaaaaaaaaaaaaaaaaaaaaaaaaaaaaaaaaaaaaaaaaaaaaaaaaaaaaaaaaaaaaaaaaaaaa

SEQ ID NO: 2879 - RNA, 5419 nt, synthetic construct
  source 1..5419: mol_type = other RNA
aggaaataagagagaaaagaagagtaagaagaaatataagagccaccatggcccctaagaagaagcgtaaagtgagccgggtgaacggcagcggcagcggcggcggcatgaaccacgaccaggagttcgacccccctaaggtgtaccctcccgtccccgccgagaagagaaagcccatccgggtcctgagcctgttcgatggcatcgccaccggtctgctggtgctgaaggacctgggcatccaggtggataggtacattgcctccgaggtgtgcgaggactccatcaccgtgggaatggtgcgtcatcagggcaagatcatgtacgtgggcgacgtgcggagcgtgacacagaagcatatccaggagtggggccctttcgacctggtgatcggcggcagcccttgcaatgacctgagcatcgtgaacccagcccggaagggcctgtacgagggaaccggcagactgttcttcgagttttacagactgctgcacgacgcccggcctaaggaaggcgacgaccggcccttcttttggctgttcgagaatgtggtggccatgggagtcagcgacaagcgggatattagccggttcctggagagcaaccccgtgatgatcgatgccaaggaagtgagcgccgcccaccgggccagatacttctggggcaatctgcctggcatgaacagacccctggccagcaccgtgaacgacaagctggagctgcaggagtgcctggagcacggccggatcgccaagttcagcaaggtgagaaccatcaccacccgaagcaacagcatcaaacaaggcaaggaccagcactttcctgtgttcatgaacgagaaggaggacatcctgtggtgtaccgagatggagagagtgttcgggttcccagtccactacacagatgtcagcaacatgtctagactggccagacagagactgctgggaagaagctggtccgtccctgtgatcagacacctgttcgcccctctgaaggagtacttcgcctgcgtgagcagcggcaacagcaacgccaacagccggggccccagcttctctagcggcctggtgccactgtccctgagagggagccacatgggccccatggagatctacaaaaccgtgagcgcctggaagcggcagcctgtgcgcgtgctgagcctgtttcggaatatcgataaagtcctgaaaagcctgggattcctggagagcggctctggctccggcggtggcaccctgaagtacgtggaggatgtgacaaacgtggtcagacgggatgtggagaagtggggccccttcgatctggtgtacggcagcacccaacccctgggcagctcttgtgaccggtgccctggctggtacatgtttcagttccaccggatcctgcagtacgccctgccgagacaggagtcccagcggccattcttttggattttcatggacaacttgctgctgaccgaggatgaccaggaaactaccactcggttcctgcagaccgaagccgtgaccctgcaggacgtgagaggccgggactaccagaacgccatgcgggtgtggtccaacatccctggactgaaaagcaagcacgcacctctgacccctaaagaagaggagtacctgcaggcccaggtgcggagcagaagcaagctggacgcccctaaggtggatctgctggtgaagaattgcctcctgcccctgagagagtacttcaagtatttcagccagaatagtctgcccctgggcggcccaagcagcggcgcccctcctcccagcggcggcagcccagccggctccccaacctctaccgaggagggcacctctgagtccgccacccccgagagcggccctggcacctccaccgagcccagcgagggcagcgcacccggcagccctgccggcagccccacctccacagaggagggaaccagcaccgagcccagcgaaggcagcgccccaggcaccagcaccgagcctagtgagggcggctctggcggcggcagcgcccaggagattaaacggatcaacaagatcagaagaagacttgtgaaagacagcaacaccaagaaggccggcaagacaggccccatgaaaaccctgctggttagagtgatgacacccgatctgagagagcggctggaaaacctgagaaagaagcctgaaaatatcccccagcccatcagcaatacatctagagccaacctgaataagctgctgaccgattacaccgaaatgaagaaggcgatcctgcatgtgtactgggaagagttccagaaggaccctgtgggcctgatgagccgggtggcccagcctgccagcaagaagatcgatcagaacaagctgaaacctgagatggacgagaagggcaacctgaccaccgccggctttgcctgctctcagtgtggccagcccctgttcgtgtacaagctggagcaggtgtctgagaagggcaaggcttacaccaactacttcggacggtgcaatgtggccgagcacgaaaagctgatcctgctggcccagctgaagcccgagaaggatagcgacgaagccgtgacatatagcctgggaaagtttgggcagagggccctggatttctacagcattcatgtgaccaaggagtccacccaccccgtgaagcccctggcccagatcgccggaaacagatacgcctccggacctgtgggaaaggccctgagcgacgcatgtatgggcacaatcgcctccttcctgtctaagtaccaggacatcatcatcgaacaccagaaggtggtgaagggcaaccagaagagactggagagcctgcgggagctggccggcaaggaaaacctggaataccctagcgtgaccctgccacctcagcctcacaccaaggagggcgttgatgcctacaacgaagtgatcgcccgggtgcgaatgtgggtgaacctgaacctgtggcagaagctgaagctaagcagagatgatgccaagcctctgctgagactgaagggattcccttcctttcctctggtcgagagacaggccaacgaagtggactggtgggacatggtgtgtaacgtgaagaagctgatcaacgagaaaaaggaggatggcaaggtgttttggcagaatctggctggctacaagagacaggaagccctgagaccatacctgagcagcgaggaagatcggaagaagggaaagaaattcgctcggtaccagctgggcgacctgctgctgcacctggaaaagaagcacggcgaggactggggaaaggtgtacgacgaggcctgggagcggattgacaagaaagtggaaggcctgagcaagcacatcaagctggaagaggaacggagaagcgaggacgcccagagcaaggccgccctgaccgactggctgcgggctaaggccagcttcgtgatcgagggcctgaaggaggccgacaaggacgagttctgcagatgcgagctgaagctgcagaagtggtacggggacctgcggggaaagcccttcgccatcgaagccgagaacagcatcctggacatcagcggcttcagcaagcagtacaactgtgccttcatctggcagaaggacggcgtgaagaagctgaacctgtacctgatcatcaactacttcaagggcggcaagctgcggttcaagaagatcaaacctgaagccttcgaagccaacagattctacaccgtgatcaacaaaaagagcggcgagatcgtgcccatggaggtgaacttcaacttcgacgaccccaacctgatcatcctgcctctggcctttggcaagagacagggcagagaattcatctggaacgacctgctgtccctggaaaccggcagcctgaagctggccaacggaagagtgatcgagaagacactgtacaacagaagaacccggcaggatgagcctgccctgttcgtggccctgaccttcgagcggcgggaggtcctggactcctccaatatcaaaccaatgaacctgatcggcgtggcaagaggcgaaaacatccccgccgtgatcgccctgaccgaccccgagggctgcccactgagccggtttaaggatagcctgggaaacccaacccacatcctgagaatcggcgagagctataaggagaagcagcggaccatccaggccaagaaggaggtggagcagcggagagccggcggctacagccggaagtacgccagcaaagccaagaatctggcagacgatatggtgagaaacaccgctagagatctgctgtactacgccgtgacccaggatgccatgctgatcttcgccaacctgagccggggcttcggccggcagggcaagcggaccttcatggccgagagacagtacacacggatggaggactggctgaccgccaagctggcctacgagggcctgagcaagacctacctgtccaagacactggcccagtacacctccaagacatgcagcaactgtgggtttaccatcaccagcgccgactacgacagggtgctggagaagctgaagaagacagcaacaggctggatgaccacaattaacggcaaggagctgaaggtggagggccagattacctactacaacagatacaagagacagaacgtagtcaaggacctgtccgtcgagctggatagactgagcgaagaatctgtgaacaacgacatctcctcctggacaaagggcagaagcggagaagctctgagcctcctgaagaaaagattctcccatagacccgtgcaggagaagttcgtgtgcctgaactgcggcttcgagacacacgcagccgagcaagccgccctgaacatcgccagatcctggctgttcctgcggagccaggagtacaagaaataccagacaaacaagacaaccggcaacaccgataagagagccttcgtcgagacctggcagtccttttaccggaagaagcttaaggaggtgtggaaacctgccgtgcggtctggcggatctggcggaggctccacaagcgtgcaggtgcccgtgaccttcgaggacgtggccgtgtacttcagcgaggacgagtggggcatgctggccggctggcagaaggagctgtacaaggagaccatgaaggagaactacgagaccctgaccctgctgggctgcctgagcgagaagcccagcctgatcagcaagatcgagagggaggaggacccctgcgtgagggaccagcaggaccccagggacaggaggaagctgaggagcagctggaccagccccaagaaaaagagaaaagtctaagctgccttctgcggggcttgccttctggccatgcccttcttctctcccttgcacctgtacctcttggtctttgaataaagcctgagtaggaaggctagcaaaaaaaaaaaaaaaaaaaaaaaaaaaaaaaaaaaaaaaaaaaaaaaaaaaaaaaaaaaaaaaaaaaaaaaaaaaaaaaa

SEQ ID NO: 2880 - RNA, 5419 nt, synthetic construct
  source 1..5419: mol_type = other RNA
aggaaataagagagaaaagaagagtaagaagaaatataagagccaccatggcccctaagaagaagcgtaaagtgagccgggtgaacggcagcggcagcggcggcggcatgaaccacgaccaggagttcgacccccctaaggtgtaccctcccgtccccgccgagaagagaaagcccatccgggtcctgagcctgttcgatggcatcgccaccggtctgctggtgctgaaggacctgggcatccaggtggataggtacattgcctccgaggtgtgcgaggactccatcaccgtgggaatggtgcgtcatcagggcaagatcatgtacgtgggcgacgtgcggagcgtgacacagaagcatatccaggagtggggccctttcgacctggtgatcggcggcagcccttgcaatgacctgagcatcgtgaacccagcccggaagggcctgtacgagggaaccggcagactgttcttcgagttttacagactgctgcacgacgcccggcctaaggaaggcgacgaccggcccttcttttggctgttcgagaatgtggtggccatgggagtcagcgacaagcgggatattagccggttcctggagagcaaccccgtgatgatcgatgccaaggaagtgagcgccgcccaccgggccagatacttctggggcaatctgcctggcatgaacagacccctggccagcaccgtgaacgacaagctggagctgcaggagtgcctggagcacggccggatcgccaagttcagcaaggtgagaaccatcaccacccgaagcaacagcatcaaacaaggcaaggaccagcactttcctgtgttcatgaacgagaaggaggacatcctgtggtgtaccgagatggagagagtgttcgggttcccagtccactacacagatgtcagcaacatgtctagactggccagacagagactgctgggaagaagctggtccgtccctgtgatcagacacctgttcgcccctctgaaggagtacttcgcctgcgtgagcagcggcaacagcaacgccaacagccggggccccagcttctctagcggcctggtgccactgtccctgagagggagccacatgggccccatggagatctacaaaaccgtgagcgcctggaagcggcagcctgtgcgcgtgctgagcctgtttcggaatatcgataaagtcctgaaaagcctgggattcctggagagcggctctggctccggcggtggcaccctgaagtacgtggaggatgtgacaaacgtggtcagacgggatgtggagaagtggggccccttcgatctggtgtacggcagcacccaacccctgggcagctcttgtgaccggtgccctggctggtacatgtttcagttccaccggatcctgcagtacgccctgccgagacaggagtcccagcggccattcttttggattttcatggacaacttgctgctgaccgaggatgaccaggaaactaccactcggttcctgcagaccgaagccgtgaccctgcaggacgtgagaggccgggactaccagaacgccatgcgggtgtggtccaacatccctggactgaaaagcaagcacgcacctctgacccctaaagaagaggagtacctgcaggcccaggtgcggagcagaagcaagctggacgcccctaaggtggatctgctggtgaagaattgcctcctgcccctgagagagtacttcaagtatttcagccagaatagtctgcccctgggcggcccaagcagcggcgcccctcctcccagcggcggcagcccagccggctccccaacctctaccgaggagggcacctctgagtccgccacccccgagagcggccctggcacctccaccgagcccagcgagggcagcgcacccggcagccctgccggcagccccacctccacagaggagggaaccagcaccgagcccagcgaaggcagcgccccaggcaccagcaccgagcctagtgagggcggctctggcggcggcagcgcccaggagattaaacggatcaacaagatcagaagaagacttgtgaaagacagcaacaccaagaaggccggcaagacaggccccatgaaaaccctgctggttagagtgatgacacccgatctgagagagcggctggaaaacctgagaaagaagcctgaaaatatcccccagcccatcagcaatacatctagagccaacctgaataagctgctgaccgattacaccgaaatgaagaaggcgatcctgcatgtgtactgggaagagttccagaaggaccctgtgggcctgatgagccgggtggcccagcctgccagcaagaagatcgatcagaacaagctgaaacctgagatggacgagaagggcaacctgaccaccgccggctttgcctgctctcagtgtggccagcccctgttcgtgtacaagctggagcaggtgtctgagaagggcaaggcttacaccaactacttcggacggtgcaatgtggccgagcacgaaaagctgatcctgctggcccagctgaagcccgagaaggatagcgacgaagccgtgacatatagcctgggaaagtttgggcagagggccctggatttctacagcattcatgtgaccaaggagtccacccaccccgtgaagcccctggcccagatcgccggaaacagatacgcctccggacctgtgggaaaggccctgagcgacgcatgtatgggcacaatcgcctccttcctgtctaagtaccaggacatcatcatcgaacaccagaaggtggtgaagggcaaccagaagagactggagagcctgcgggagctggccggcaaggaaaacctggaataccctagcgtgaccctgccacctcagcctcacaccaaggagggcgttgatgcctacaacgaagtgatcgcccgggtgcgaatgtgggtgaacctgaacctgtggcagaagctgaagctaagcagagatgatgccaagcctctgctgagactgaagggattcccttcctttcctctggtcgagagacaggccaacgaagtggactggtgggacatggtgtgtaacgtgaagaagctgatcaacgagaaaaaggaggatggcaaggtgttttggcagaatctggctggctacaagagacaggaagccctgagaccatacctgagcagcgaggaagatcggaagaagggaaagaaattcgctcggtaccagctgggcgacctgctgctgcacctggaaaagaagcacggcgaggactggggaaaggtgtacgacgaggcctgggagcggattgacaagaaagtggaaggcctgagcaagcacatcaagctggaagaggaacggagaagcgaggacgcccagagcaaggccgccctgaccgactggctgcgggctaaggccagcttcgtgatcgagggcctgaaggaggccgacaaggacgagttctgcagatgcgagctgaagctgcagaagtggtacggggacctgcggggaaagcccttcgccatcgaagccgagaacagcatcctggacatcagcggcttcagcaagcagtacaactgtgccttcatctggcagaaggacggcgtgaagaagctgaacctgtacctgatcatcaactacttcaagggcggcaagctgcggttcaagaagatcaaacctgaagccttcgaagccaacagattctacaccgtgatcaacaaaaagagcggcgagatcgtgcccatggaggtgaacttcaacttcgacgaccccaacctgatcatcctgcctctggcctttggcaagagacagggcagagaattcatctggaacgacctgctgtccctggaaaccggcagcctgaagctggccaacggaagagtgatcgagaagacactgtacaacagaagaacccggcaggatgagcctgccctgttcgtggccctgaccttcgagcggcgggaggtcctggactcctccaatatcaaaccaatgaacctgatcggcgtggcaagaggcgaaaacatccccgccgtgatcgccctgaccgaccccgagggctgcccactgagccggtttaaggatagcctgggaaacccaacccacatcctgagaatcggcgagagctataaggagaagcagcggaccatccaggccaagaaggaggtggagcagcggagagccggcggctacagccggaagtacgccagcaaagccaagaatctggcagacgatatggtgagaaacaccgctagagatctgctgtactacgccgtgacccaggatgccatgctgatcttcgccaacctgagccggggcttcggccggcagggcaagcggaccttcatggccgagagacagtacacacggatggaggactggctgaccgccaagctggcctacgagggcctgagcaagacctacctgtccaagacactggcccagtacacctccaagacatgcagcaactgtgggtttaccatcaccagcgccgactacgacagggtgctggagaagctgaagaagacagcaacaggctggatgaccacaattaacggcaaggagctgaaggtggagggccagattacctactacaacagatacaagagacagaacgtagtcaaggacctgtccgtcgagctggatagactgagcgaagaatctgtgaacaacgacatctcctcctggacaaagggcagaagcggagaagctctgagcctcctgaagaaaagattctcccatagacccgtgcaggagaagttcgtgtgcctgaactgcggcttcgagacacacgcagccgagcaagccgccctgaacatcgccagatcctggctgttcctgcggagccaggagtacaagaaataccagacaaacaagacaaccggcaacaccgataagagagccttcgtcgagacctggcagtccttttaccggaagaagcttaaggaggtgtggaaacctgccgtgcggtctggcggatctggcggaggctccacaagcgacagcgtggccttcgaggacgtggccgtgaacttcacccaggaggagtgggccctgctggaccccagccagaagaacctgtacagggaggtgatgcaggagaccctgaggaacctgaccagcatcggcaagaagtggaacaaccagtacatcgaggacgagcaccagaaccccaagaggaacctgaggaggctgatcggcgagaggctgagcgagagcaaggagagccaccagcacggcgagaccagccccaagaaaaagagaaaagtctaagctgccttctgcggggcttgccttctggccatgcccttcttctctcccttgcacctgtacctcttggtctttgaataaagcctgagtaggaaggctagcaaaaaaaaaaaaaaaaaaaaaaaaaaaaaaaaaaaaaaaaaaaaaaaaaaaaaaaaaaaaaaaaaaaaaaaaaaaaaaaa

SEQ ID NO: 2881 - RNA, 5419 nt, synthetic construct
  source 1..5419: mol_type = other RNA
aggaaataagagagaaaagaagagtaagaagaaatataagagccaccatggcccctaagaagaagcgtaaagtgagccgggtgaacggcagcggcagcggcggcggcatgaaccacgaccaggagttcgacccccctaaggtgtaccctcccgtccccgccgagaagagaaagcccatccgggtcctgagcctgttcgatggcatcgccaccggtctgctggtgctgaaggacctgggcatccaggtggataggtacattgcctccgaggtgtgcgaggactccatcaccgtgggaatggtgcgtcatcagggcaagatcatgtacgtgggcgacgtgcggagcgtgacacagaagcatatccaggagtggggccctttcgacctggtgatcggcggcagcccttgcaatgacctgagcatcgtgaacccagcccggaagggcctgtacgagggaaccggcagactgttcttcgagttttacagactgctgcacgacgcccggcctaaggaaggcgacgaccggcccttcttttggctgttcgagaatgtggtggccatgggagtcagcgacaagcgggatattagccggttcctggagagcaaccccgtgatgatcgatgccaaggaagtgagcgccgcccaccgggccagatacttctggggcaatctgcctggcatgaacagacccctggccagcaccgtgaacgacaagctggagctgcaggagtgcctggagcacggccggatcgccaagttcagcaaggtgagaaccatcaccacccgaagcaacagcatcaaacaaggcaaggaccagcactttcctgtgttcatgaacgagaaggaggacatcctgtggtgtaccgagatggagagagtgttcgggttcccagtccactacacagatgtcagcaacatgtctagactggccagacagagactgctgggaagaagctggtccgtccctgtgatcagacacctgttcgcccctctgaaggagtacttcgcctgcgtgagcagcggcaacagcaacgccaacagccggggccccagcttctctagcggcctggtgccactgtccctgagagggagccacatgggccccatggagatctacaaaaccgtgagcgcctggaagcggcagcctgtgcgcgtgctgagcctgtttcggaatatcgataaagtcctgaaaagcctgggattcctggagagcggctctggctccggcggtggcaccctgaagtacgtggaggatgtgacaaacgtggtcagacgggatgtggagaagtggggccccttcgatctggtgtacggcagcacccaacccctgggcagctcttgtgaccggtgccctggctggtacatgtttcagttccaccggatcctgcagtacgccctgccgagacaggagtcccagcggccattcttttggattttcatggacaacttgctgctgaccgaggatgaccaggaaactaccactcggttcctgcagaccgaagccgtgaccctgcaggacgtgagaggccgggactaccagaacgccatgcgggtgtggtccaacatccctggactgaaaagcaagcacgcacctctgacccctaaagaagaggagtacctgcaggcccaggtgcggagcagaagcaagctggacgcccctaaggtggatctgctggtgaagaattgcctcctgcccctgagagagtacttcaagtatttcagccagaatagtctgcccctgggcggcccaagcagcggcgcccctcctcccagcggcggcagcccagccggctccccaacctctaccgaggagggcacctctgagtccgccacccccgagagcggccctggcacctccaccgagcccagcgagggcagcgcacccggcagccctgccggcagccccacctccacagaggagggaaccagcaccgagcccagcgaaggcagcgccccaggcaccagcaccgagcctagtgagggcggctctggcggcggcagcgcccaggagattaaacggatcaacaagatcagaagaagacttgtgaaagacagcaacaccaagaaggccggcaagacaggccccatgaaaaccctgctggttagagtgatgacacccgatctgagagagcggctggaaaacctgagaaagaagcctgaaaatatcccccagcccatcagcaatacatctagagccaacctgaataagctgctgaccgattacaccgaaatgaagaaggcgatcctgcatgtgtactgggaagagttccagaaggaccctgtgggcctgatgagccgggtggcccagcctgccagcaagaagatcgatcagaacaagctgaaacctgagatggacgagaagggcaacctgaccaccgccggctttgcctgctctcagtgtggccagcccctgttcgtgtacaagctggagcaggtgtctgagaagggcaaggcttacaccaactacttcggacggtgcaatgtggccgagcacgaaaagctgatcctgctggcccagctgaagcccgagaaggatagcgacgaagccgtgacatatagcctgggaaagtttgggcagagggccctggatttctacagcattcatgtgaccaaggagtccacccaccccgtgaagcccctggcccagatcgccggaaacagatacgcctccggacctgtgggaaaggccctgagcgacgcatgtatgggcacaatcgcctccttcctgtctaagtaccaggacatcatcatcgaacaccagaaggtggtgaagggcaaccagaagagactggagagcctgcgggagctggccggcaaggaaaacctggaataccctagcgtgaccctgccacctcagcctcacaccaaggagggcgttgatgcctacaacgaagtgatcgcccgggtgcgaatgtgggtgaacctgaacctgtggcagaagctgaagctaagcagagatgatgccaagcctctgctgagactgaagggattcccttcctttcctctggtcgagagacaggccaacgaagtggactggtgggacatggtgtgtaacgtgaagaagctgatcaacgagaaaaaggaggatggcaaggtgttttggcagaatctggctggctacaagagacaggaagccctgagaccatacctgagcagcgaggaagatcggaagaagggaaagaaattcgctcggtaccagctgggcgacctgctgctgcacctggaaaagaagcacggcgaggactggggaaaggtgtacgacgaggcctgggagcggattgacaagaaagtggaaggcctgagcaagcacatcaagctggaagaggaacggagaagcgaggacgcccagagcaaggccgccctgaccgactggctgcgggctaaggccagcttcgtgatcgagggcctgaaggaggccgacaaggacgagttctgcagatgcgagctgaagctgcagaagtggtacggggacctgcggggaaagcccttcgccatcgaagccgagaacagcatcctggacatcagcggcttcagcaagcagtacaactgtgccttcatctggcagaaggacggcgtgaagaagctgaacctgtacctgatcatcaactacttcaagggcggcaagctgcggttcaagaagatcaaacctgaagccttcgaagccaacagattctacaccgtgatcaacaaaaagagcggcgagatcgtgcccatggaggtgaacttcaacttcgacgaccccaacctgatcatcctgcctctggcctttggcaagagacagggcagagaattcatctggaacgacctgctgtccctggaaaccggcagcctgaagctggccaacggaagagtgatcgagaagacactgtacaacagaagaacccggcaggatgagcctgccctgttcgtggccctgaccttcgagcggcgggaggtcctggactcctccaatatcaaaccaatgaacctgatcggcgtggcaagaggcgaaaacatccccgccgtgatcgccctgaccgaccccgagggctgcccactgagccggtttaaggatagcctgggaaacccaacccacatcctgagaatcggcgagagctataaggagaagcagcggaccatccaggccaagaaggaggtggagcagcggagagccggcggctacagccggaagtacgccagcaaagccaagaatctggcagacgatatggtgagaaacaccgctagagatctgctgtactacgccgtgacccaggatgccatgctgatcttcgccaacctgagccggggcttcggccggcagggcaagcggaccttcatggccgagagacagtacacacggatggaggactggctgaccgccaagctggcctacgagggcctgagcaagacctacctgtccaagacactggcccagtacacctccaagacatgcagcaactgtgggtttaccatcaccagcgccgactacgacagggtgctggagaagctgaagaagacagcaacaggctggatgaccacaattaacggcaaggagctgaaggtggagggccagattacctactacaacagatacaagagacagaacgtagtcaaggacctgtccgtcgagctggatagactgagcgaagaatctgtgaacaacgacatctcctcctggacaaagggcagaagcggagaagctctgagcctcctgaagaaaagattctcccatagacccgtgcaggagaagttcgtgtgcctgaactgcggcttcgagacacacgcagccgagcaagccgccctgaacatcgccagatcctggctgttcctgcggagccaggagtacaagaaataccagacaaacaagacaaccggcaacaccgataagagagccttcgtcgagacctggcagtccttttaccggaagaagcttaaggaggtgtggaaacctgccgtgcggtctggcggatctggcggaggctccacaagcgtgcaggagcccgtgaccttcaaggacgtggccgtggacttcacccaggaggagtggggccagctggacctggtgcagaggaccctgtacagggacgtgatgctggagacctacggccacctgctgagcgtgggcaaccagatcgccaagcccgaggtgatcagcctgctggagcagggcgaggagccctggagcgtggagcaggcctgcccccagaggaccggccccgagtgggtgaggaacaccagccccaagaaaaagagaaaagtctaagctgccttctgcggggcttgccttctggccatgcccttcttctctcccttgcacctgtacctcttggtctttgaataaagcctgagtaggaaggctagcaaaaaaaaaaaaaaaaaaaaaaaaaaaaaaaaaaaaaaaaaaaaaaaaaaaaaaaaaaaaaaaaaaaaaaaaaaaaaaaa

SEQ ID NO: 2882 - RNA, 5419 nt, synthetic construct
  source 1..5419: mol_type = other RNA
aggaaataagagagaaaagaagagtaagaagaaatataagagccaccatggcccctaagaagaagcgtaaagtgagccgggtgaacggcagcggcagcggcggcggcatgaaccacgaccaggagttcgacccccctaaggtgtaccctcccgtccccgccgagaagagaaagcccatccgggtcctgagcctgttcgatggcatcgccaccggtctgctggtgctgaaggacctgggcatccaggtggataggtacattgcctccgaggtgtgcgaggactccatcaccgtgggaatggtgcgtcatcagggcaagatcatgtacgtgggcgacgtgcggagcgtgacacagaagcatatccaggagtggggccctttcgacctggtgatcggcggcagcccttgcaatgacctgagcatcgtgaacccagcccggaagggcctgtacgagggaaccggcagactgttcttcgagttttacagactgctgcacgacgcccggcctaaggaaggcgacgaccggcccttcttttggctgttcgagaatgtggtggccatgggagtcagcgacaagcgggatattagccggttcctggagagcaaccccgtgatgatcgatgccaaggaagtgagcgccgcccaccgggccagatacttctggggcaatctgcctggcatgaacagacccctggccagcaccgtgaacgacaagctggagctgcaggagtgcctggagcacggccggatcgccaagttcagcaaggtgagaaccatcaccacccgaagcaacagcatcaaacaaggcaaggaccagcactttcctgtgttcatgaacgagaaggaggacatcctgtggtgtaccgagatggagagagtgttcgggttcccagtccactacacagatgtcagcaacatgtctagactggccagacagagactgctgggaagaagctggtccgtccctgtgatcagacacctgttcgcccctctgaaggagtacttcgcctgcgtgagcagcggcaacagcaacgccaacagccggggccccagcttctctagcggcctggtgccactgtccctgagagggagccacatgggccccatggagatctacaaaaccgtgagcgcctggaagcggcagcctgtgcgcgtgctgagcctgtttcggaatatcgataaagtcctgaaaagcctgggattcctggagagcggctctggctccggcggtggcaccctgaagtacgtggaggatgtgacaaacgtggtcagacgggatgtggagaagtggggccccttcgatctggtgtacggcagcacccaacccctgggcagctcttgtgaccggtgccctggctggtacatgtttcagttccaccggatcctgcagtacgccctgccgagacaggagtcccagcggccattcttttggattttcatggacaacttgctgctgaccgaggatgaccaggaaactaccactcggttcctgcagaccgaagccgtgaccctgcaggacgtgagaggccgggactaccagaacgccatgcgggtgtggtccaacatccctggactgaaaagcaagcacgcacctctgacccctaaagaagaggagtacctgcaggcccaggtgcggagcagaagcaagctggacgcccctaaggtggatctgctggtgaagaattgcctcctgcccctgagagagtacttcaagtatttcagccagaatagtctgcccctgggcggcccaagcagcggcgcccctcctcccagcggcggcagcccagccggctccccaacctctaccgaggagggcacctctgagtccgccacccccgagagcggccctggcacctccaccgagcccagcgagggcagcgcacccggcagccctgccggcagccccacctccacagaggagggaaccagcaccgagcccagcgaaggcagcgccccaggcaccagcaccgagcctagtgagggcggctctggcggcggcagcgcccaggagattaaacggatcaacaagatcagaagaagacttgtgaaagacagcaacaccaagaaggccggcaagacaggccccatgaaaaccctgctggttagagtgatgacacccgatctgagagagcggctggaaaacctgagaaagaagcctgaaaatatcccccagcccatcagcaatacatctagagccaacctgaataagctgctgaccgattacaccgaaatgaagaaggcgatcctgcatgtgtactgggaagagttccagaaggaccctgtgggcctgatgagccgggtggcccagcctgccagcaagaagatcgatcagaacaagctgaaacctgagatggacgagaagggcaacctgaccaccgccggctttgcctgctctcagtgtggccagcccctgttcgtgtacaagctggagcaggtgtctgagaagggcaaggcttacaccaactacttcggacggtgcaatgtggccgagcacgaaaagctgatcctgctggcccagctgaagcccgagaaggatagcgacgaagccgtgacatatagcctgggaaagtttgggcagagggccctggatttctacagcattcatgtgaccaaggagtccacccaccccgtgaagcccctggcccagatcgccggaaacagatacgcctccggacctgtgggaaaggccctgagcgacgcatgtatgggcacaatcgcctccttcctgtctaagtaccaggacatcatcatcgaacaccagaaggtggtgaagggcaaccagaagagactggagagcctgcgggagctggccggcaaggaaaacctggaataccctagcgtgaccctgccacctcagcctcacaccaaggagggcgttgatgcctacaacgaagtgatcgcccgggtgcgaatgtgggtgaacctgaacctgtggcagaagctgaagctaagcagagatgatgccaagcctctgctgagactgaagggattcccttcctttcctctggtcgagagacaggccaacgaagtggactggtgggacatggtgtgtaacgtgaagaagctgatcaacgagaaaaaggaggatggcaaggtgttttggcagaatctggctggctacaagagacaggaagccctgagaccatacctgagcagcgaggaagatcggaagaagggaaagaaattcgctcggtaccagctgggcgacctgctgctgcacctggaaaagaagcacggcgaggactggggaaaggtgtacgacgaggcctgggagcggattgacaagaaagtggaaggcctgagcaagcacatcaagctggaagaggaacggagaagcgaggacgcccagagcaaggccgccctgaccgactggctgcgggctaaggccagcttcgtgatcgagggcctgaaggaggccgacaaggacgagttctgcagatgcgagctgaagctgcagaagtggtacggggacctgcggggaaagcccttcgccatcgaagccgagaacagcatcctggacatcagcggcttcagcaagcagtacaactgtgccttcatctggcagaaggacggcgtgaagaagctgaacctgtacctgatcatcaactacttcaagggcggcaagctgcggttcaagaagatcaaacctgaagccttcgaagccaacagattctacaccgtgatcaacaaaaagagcggcgagatcgtgcccatggaggtgaacttcaacttcgacgaccccaacctgatcatcctgcctctggcctttggcaagagacagggcagagaattcatctggaacgacctgctgtccctggaaaccggcagcctgaagctggccaacggaagagtgatcgagaagacactgtacaacagaagaacccggcaggatgagcctgccctgttcgtggccctgaccttcgagcggcgggaggtcctggactcctccaatatcaaaccaatgaacctgatcggcgtggcaagaggcgaaaacatccccgccgtgatcgccctgaccgaccccgagggctgcccactgagccggtttaaggatagcctgggaaacccaacccacatcctgagaatcggcgagagctataaggagaagcagcggaccatccaggccaagaaggaggtggagcagcggagagccggcggctacagccggaagtacgccagcaaagccaagaatctggcagacgatatggtgagaaacaccgctagagatctgctgtactacgccgtgacccaggatgccatgctgatcttcgccaacctgagccggggcttcggccggcagggcaagcggaccttcatggccgagagacagtacacacggatggaggactggctgaccgccaagctggcctacgagggcctgagcaagacctacctgtccaagacactggcccagtacacctccaagacatgcagcaactgtgggtttaccatcaccagcgccgactacgacagggtgctggagaagctgaagaagacagcaacaggctggatgaccacaattaacggcaaggagctgaaggtggagggccagattacctactacaacagatacaagagacagaacgtagtcaaggacctgtccgtcgagctggatagactgagcgaagaatctgtgaacaacgacatctcctcctggacaaagggcagaagcggagaagctctgagcctcctgaagaaaagattctcccatagacccgtgcaggagaagttcgtgtgcctgaactgcggcttcgagacacacgcagccgagcaagccgccctgaacatcgccagatcctggctgttcctgcggagccaggagtacaagaaataccagacaaacaagacaaccggcaacaccgataagagagccttcgtcgagacctggcagtccttttaccggaagaagcttaaggaggtgtggaaacctgccgtgcggtctggcggatctggcggaggctccacaagcttccaggagagcgtggccttcgaggacgtggccgtgtacttcacccagaaccagtggggcagcctggaccccgcccagagggccctgtacagcgaggtgatgctggagaactacgccaacgtggccagcctggccttccccttccccaagcccgccctgatcagccacctggagaagggcgaggccccctggggccccgacccctgggacgccgagatccccagcggcatcaaccagggcggcaccagccccaagaaaaagagaaaagtctaagctgccttctgcggggcttgccttctggccatgcccttcttctctcccttgcacctgtacctcttggtctttgaataaagcctgagtaggaaggctagcaaaaaaaaaaaaaaaaaaaaaaaaaaaaaaaaaaaaaaaaaaaaaaaaaaaaaaaaaaaaaaaaaaaaaaaaaaaaaaaa

SEQ ID NO: 2883 - RNA, 5419 nt, synthetic construct
  source 1..5419: mol_type = other RNA
aggaaataagagagaaaagaagagtaagaagaaatataagagccaccatggcccctaagaagaagcgtaaagtgagccgggtgaacggcagcggcagcggcggcggcatgaaccacgaccaggagttcgacccccctaaggtgtaccctcccgtccccgccgagaagagaaagcccatccgggtcctgagcctgttcgatggcatcgccaccggtctgctggtgctgaaggacctgggcatccaggtggataggtacattgcctccgaggtgtgcgaggactccatcaccgtgggaatggtgcgtcatcagggcaagatcatgtacgtgggcgacgtgcggagcgtgacacagaagcatatccaggagtggggccctttcgacctggtgatcggcggcagcccttgcaatgacctgagcatcgtgaacccagcccggaagggcctgtacgagggaaccggcagactgttcttcgagttttacagactgctgcacgacgcccggcctaaggaaggcgacgaccggcccttcttttggctgttcgagaatgtggtggccatgggagtcagcgacaagcgggatattagccggttcctggagagcaaccccgtgatgatcgatgccaaggaagtgagcgccgcccaccgggccagatacttctggggcaatctgcctggcatgaacagacccctggccagcaccgtgaacgacaagctggagctgcaggagtgcctggagcacggccggatcgccaagttcagcaaggtgagaaccatcaccacccgaagcaacagcatcaaacaaggcaaggaccagcactttcctgtgttcatgaacgagaaggaggacatcctgtggtgtaccgagatggagagagtgttcgggttcccagtccactacacagatgtcagcaacatgtctagactggccagacagagactgctgggaagaagctggtccgtccctgtgatcagacacctgttcgcccctctgaaggagtacttcgcctgcgtgagcagcggcaacagcaacgccaacagccggggccccagcttctctagcggcctggtgccactgtccctgagagggagccacatgggccccatggagatctacaaaaccgtgagcgcctggaagcggcagcctgtgcgcgtgctgagcctgtttcggaatatcgataaagtcctgaaaagcctgggattcctggagagcggctctggctccggcggtggcaccctgaagtacgtggaggatgtgacaaacgtggtcagacgggatgtggagaagtggggccccttcgatctggtgtacggcagcacccaacccctgggcagctcttgtgaccggtgccctggctggtacatgtttcagttccaccggatcctgcagtacgccctgccgagacaggagtcccagcggccattcttttggattttcatggacaacttgctgctgaccgaggatgaccaggaaactaccactcggttcctgcagaccgaagccgtgaccctgcaggacgtgagaggccgggactaccagaacgccatgcgggtgtggtccaacatccctggactgaaaagcaagcacgcacctctgacccctaaagaagaggagtacctgcaggcccaggtgcggagcagaagcaagctggacgcccctaaggtggatctgctggtgaagaattgcctcctgcccctgagagagtacttcaagtatttcagccagaatagtctgcccctgggcggcccaagcagcggcgcccctcctcccagcggcggcagcccagccggctccccaacctctaccgaggagggcacctctgagtccgccacccccgagagcggccctggcacctccaccgagcccagcgagggcagcgcacccggcagccctgccggcagccccacctccacagaggagggaaccagcaccgagcccagcgaaggcagcgccccaggcaccagcaccgagcctagtgagggcggctctggcggcggcagcgcccaggagattaaacggatcaacaagatcagaagaagacttgtgaaagacagcaacaccaagaaggccggcaagacaggccccatgaaaaccctgctggttagagtgatgacacccgatctgagagagcggctggaaaacctgagaaagaagcctgaaaatatcccccagcccatcagcaatacatctagagccaacctgaataagctgctgaccgattacaccgaaatgaagaaggcgatcctgcatgtgtactgggaagagttccagaaggaccctgtgggcctgatgagccgggtggcccagcctgccagcaagaagatcgatcagaacaagctgaaacctgagatggacgagaagggcaacctgaccaccgccggctttgcctgctctcagtgtggccagcccctgttcgtgtacaagctggagcaggtgtctgagaagggcaaggcttacaccaactacttcggacggtgcaatgtggccgagcacgaaaagctgatcctgctggcccagctgaagcccgagaaggatagcgacgaagccgtgacatatagcctgggaaagtttgggcagagggccctggatttctacagcattcatgtgaccaaggagtccacccaccccgtgaagcccctggcccagatcgccggaaacagatacgcctccggacctgtgggaaaggccctgagcgacgcatgtatgggcacaatcgcctccttcctgtctaagtaccaggacatcatcatcgaacaccagaaggtggtgaagggcaaccagaagagactggagagcctgcgggagctggccggcaaggaaaacctggaataccctagcgtgaccctgccacctcagcctcacaccaaggagggcgttgatgcctacaacgaagtgatcgcccgggtgcgaatgtgggtgaacctgaacctgtggcagaagctgaagctaagcagagatgatgccaagcctctgctgagactgaagggattcccttcctttcctctggtcgagagacaggccaacgaagtggactggtgggacatggtgtgtaacgtgaagaagctgatcaacgagaaaaaggaggatggcaaggtgttttggcagaatctggctggctacaagagacaggaagccctgagaccatacctgagcagcgaggaagatcggaagaagggaaagaaattcgctcggtaccagctgggcgacctgctgctgcacctggaaaagaagcacggcgaggactggggaaaggtgtacgacgaggcctgggagcggattgacaagaaagtggaaggcctgagcaagcacatcaagctggaagaggaacggagaagcgaggacgcccagagcaaggccgccctgaccgactggctgcgggctaaggccagcttcgtgatcgagggcctgaaggaggccgacaaggacgagttctgcagatgcgagctgaagctgcagaagtggtacggggacctgcggggaaagcccttcgccatcgaagccgagaacagcatcctggacatcagcggcttcagcaagcagtacaactgtgccttcatctggcagaaggacggcgtgaagaagctgaacctgtacctgatcatcaactacttcaagggcggcaagctgcggttcaagaagatcaaacctgaagccttcgaagccaacagattctacaccgtgatcaacaaaaagagcggcgagatcgtgcccatggaggtgaacttcaacttcgacgaccccaacctgatcatcctgcctctggcctttggcaagagacagggcagagaattcatctggaacgacctgctgtccctggaaaccggcagcctgaagctggccaacggaagagtgatcgagaagacactgtacaacagaagaacccggcaggatgagcctgccctgttcgtggccctgaccttcgagcggcgggaggtcctggactcctccaatatcaaaccaatgaacctgatcggcgtggcaagaggcgaaaacatccccgccgtgatcgccctgaccgaccccgagggctgcccactgagccggtttaaggatagcctgggaaacccaacccacatcctgagaatcggcgagagctataaggagaagcagcggaccatccaggccaagaaggaggtggagcagcggagagccggcggctacagccggaagtacgccagcaaagccaagaatctggcagacgatatggtgagaaacaccgctagagatctgctgtactacgccgtgacccaggatgccatgctgatcttcgccaacctgagccggggcttcggccggcagggcaagcggaccttcatggccgagagacagtacacacggatggaggactggctgaccgccaagctggcctacgagggcctgagcaagacctacctgtccaagacactggcccagtacacctccaagacatgcagcaactgtgggtttaccatcaccagcgccgactacgacagggtgctggagaagctgaagaagacagcaacaggctggatgaccacaattaacggcaaggagctgaaggtggagggccagattacctactacaacagatacaagagacagaacgtagtcaaggacctgtccgtcgagctggatagactgagcgaagaatctgtgaacaacgacatctcctcctggacaaagggcagaagcggagaagctctgagcctcctgaagaaaagattctcccatagacccgtgcaggagaagttcgtgtgcctgaactgcggcttcgagacacacgcagccgagcaagccgccctgaacatcgccagatcctggctgttcctgcggagccaggagtacaagaaataccagacaaacaagacaaccggcaacaccgataagagagccttcgtcgagacctggcagtccttttaccggaagaagcttaaggaggtgtggaaacctgccgtgcggtctggcggatctggcggaggctccacaagcatggacgccgtgacctacgacgacgtgcacatcaacttcaccctggaggagtgggccctgctgaaccccagccagaagagcctgtacaaggacgtgatgctggacacctacaggaacctgaccgccatcggctacagctgggacgaccacaacatcgaggagatctgccagagcagcaggagccacaggaggcacctgcagaggcacgccaagatcaacaccggcgagaagccctacggcagcaccagccccaagaaaaagagaaaagtctaagctgccttctgcggggcttgccttctggccatgcccttcttctctcccttgcacctgtacctcttggtctttgaataaagcctgagtaggaaggctagcaaaaaaaaaaaaaaaaaaaaaaaaaaaaaaaaaaaaaaaaaaaaaaaaaaaaaaaaaaaaaaaaaaaaaaaaaaaaaaaa

SEQ ID NO: 2884 - RNA, 5419 nt, synthetic construct
  source 1..5419: mol_type = other RNA
aggaaataagagagaaaagaagagtaagaagaaatataagagccaccatggcccctaagaagaagcgtaaagtgagccgggtgaacggcagcggcagcggcggcggcatgaaccacgaccaggagttcgacccccctaaggtgtaccctcccgtccccgccgagaagagaaagcccatccgggtcctgagcctgttcgatggcatcgccaccggtctgctggtgctgaaggacctgggcatccaggtggataggtacattgcctccgaggtgtgcgaggactccatcaccgtgggaatggtgcgtcatcagggcaagatcatgtacgtgggcgacgtgcggagcgtgacacagaagcatatccaggagtggggccctttcgacctggtgatcggcggcagcccttgcaatgacctgagcatcgtgaacccagcccggaagggcctgtacgagggaaccggcagactgttcttcgagttttacagactgctgcacgacgcccggcctaaggaaggcgacgaccggcccttcttttggctgttcgagaatgtggtggccatgggagtcagcgacaagcgggatattagccggttcctggagagcaaccccgtgatgatcgatgccaaggaagtgagcgccgcccaccgggccagatacttctggggcaatctgcctggcatgaacagacccctggccagcaccgtgaacgacaagctggagctgcaggagtgcctggagcacggccggatcgccaagttcagcaaggtgagaaccatcaccacccgaagcaacagcatcaaacaaggcaaggaccagcactttcctgtgttcatgaacgagaaggaggacatcctgtggtgtaccgagatggagagagtgttcgggttcccagtccactacacagatgtcagcaacatgtctagactggccagacagagactgctgggaagaagctggtccgtccctgtgatcagacacctgttcgcccctctgaaggagtacttcgcctgcgtgagcagcggcaacagcaacgccaacagccggggccccagcttctctagcggcctggtgccactgtccctgagagggagccacatgggccccatggagatctacaaaaccgtgagcgcctggaagcggcagcctgtgcgcgtgctgagcctgtttcggaatatcgataaagtcctgaaaagcctgggattcctggagagcggctctggctccggcggtggcaccctgaagtacgtggaggatgtgacaaacgtggtcagacgggatgtggagaagtggggccccttcgatctggtgtacggcagcacccaacccctgggcagctcttgtgaccggtgccctggctggtacatgtttcagttccaccggatcctgcagtacgccctgccgagacaggagtcccagcggccattcttttggattttcatggacaacttgctgctgaccgaggatgaccaggaaactaccactcggttcctgcagaccgaagccgtgaccctgcaggacgtgagaggccgggactaccagaacgccatgcgggtgtggtccaacatccctggactgaaaagcaagcacgcacctctgacccctaaagaagaggagtacctgcaggcccaggtgcggagcagaagcaagctggacgcccctaaggtggatctgctggtgaagaattgcctcctgcccctgagagagtacttcaagtatttcagccagaatagtctgcccctgggcggcccaagcagcggcgcccctcctcccagcggcggcagcccagccggctccccaacctctaccgaggagggcacctctgagtccgccacccccgagagcggccctggcacctccaccgagcccagcgagggcagcgcacccggcagccctgccggcagccccacctccacagaggagggaaccagcaccgagcccagcgaaggcagcgccccaggcaccagcaccgagcctagtgagggcggctctggcggcggcagcgcccaggagattaaacggatcaacaagatcagaagaagacttgtgaaagacagcaacaccaagaaggccggcaagacaggccccatgaaaaccctgctggttagagtgatgacacccgatctgagagagcggctggaaaacctgagaaagaagcctgaaaatatcccccagcccatcagcaatacatctagagccaacctgaataagctgctgaccgattacaccgaaatgaagaaggcgatcctgcatgtgtactgggaagagttccagaaggaccctgtgggcctgatgagccgggtggcccagcctgccagcaagaagatcgatcagaacaagctgaaacctgagatggacgagaagggcaacctgaccaccgccggctttgcctgctctcagtgtggccagcccctgttcgtgtacaagctggagcaggtgtctgagaagggcaaggcttacaccaactacttcggacggtgcaatgtggccgagcacgaaaagctgatcctgctggcccagctgaagcccgagaaggatagcgacgaagccgtgacatatagcctgggaaagtttgggcagagggccctggatttctacagcattcatgtgaccaaggagtccacccaccccgtgaagcccctggcccagatcgccggaaacagatacgcctccggacctgtgggaaaggccctgagcgacgcatgtatgggcacaatcgcctccttcctgtctaagtaccaggacatcatcatcgaacaccagaaggtggtgaagggcaaccagaagagactggagagcctgcgggagctggccggcaaggaaaacctggaataccctagcgtgaccctgccacctcagcctcacaccaaggagggcgttgatgcctacaacgaagtgatcgcccgggtgcgaatgtgggtgaacctgaacctgtggcagaagctgaagctaagcagagatgatgccaagcctctgctgagactgaagggattcccttcctttcctctggtcgagagacaggccaacgaagtggactggtgggacatggtgtgtaacgtgaagaagctgatcaacgagaaaaaggaggatggcaaggtgttttggcagaatctggctggctacaagagacaggaagccctgagaccatacctgagcagcgaggaagatcggaagaagggaaagaaattcgctcggtaccagctgggcgacctgctgctgcacctggaaaagaagcacggcgaggactggggaaaggtgtacgacgaggcctgggagcggattgacaagaaagtggaaggcctgagcaagcacatcaagctggaagaggaacggagaagcgaggacgcccagagcaaggccgccctgaccgactggctgcgggctaaggccagcttcgtgatcgagggcctgaaggaggccgacaaggacgagttctgcagatgcgagctgaagctgcagaagtggtacggggacctgcggggaaagcccttcgccatcgaagccgagaacagcatcctggacatcagcggcttcagcaagcagtacaactgtgccttcatctggcagaaggacggcgtgaagaagctgaacctgtacctgatcatcaactacttcaagggcggcaagctgcggttcaagaagatcaaacctgaagccttcgaagccaacagattctacaccgtgatcaacaaaaagagcggcgagatcgtgcccatggaggtgaacttcaacttcgacgaccccaacctgatcatcctgcctctggcctttggcaagagacagggcagagaattcatctggaacgacctgctgtccctggaaaccggcagcctgaagctggccaacggaagagtgatcgagaagacactgtacaacagaagaacccggcaggatgagcctgccctgttcgtggccctgaccttcgagcggcgggaggtcctggactcctccaatatcaaaccaatgaacctgatcggcgtggcaagaggcgaaaacatccccgccgtgatcgccctgaccgaccccgagggctgcccactgagccggtttaaggatagcctgggaaacccaacccacatcctgagaatcggcgagagctataaggagaagcagcggaccatccaggccaagaaggaggtggagcagcggagagccggcggctacagccggaagtacgccagcaaagccaagaatctggcagacgatatggtgagaaacaccgctagagatctgctgtactacgccgtgacccaggatgccatgctgatcttcgccaacctgagccggggcttcggccggcagggcaagcggaccttcatggccgagagacagtacacacggatggaggactggctgaccgccaagctggcctacgagggcctgagcaagacctacctgtccaagacactggcccagtacacctccaagacatgcagcaactgtgggtttaccatcaccagcgccgactacgacagggtgctggagaagctgaagaagacagcaacaggctggatgaccacaattaacggcaaggagctgaaggtggagggccagattacctactacaacagatacaagagacagaacgtagtcaaggacctgtccgtcgagctggatagactgagcgaagaatctgtgaacaacgacatctcctcctggacaaagggcagaagcggagaagctctgagcctcctgaagaaaagattctcccatagacccgtgcaggagaagttcgtgtgcctgaactgcggcttcgagacacacgcagccgagcaagccgccctgaacatcgccagatcctggctgttcctgcggagccaggagtacaagaaataccagacaaacaagacaaccggcaacaccgataagagagccttcgtcgagacctggcagtccttttaccggaagaagcttaaggaggtgtggaaacctgccgtgcggtctggcggatctggcggaggctccacaagcagccaggaggccgtgaccttcgaggacgtggccgtgtacttcacccagaaccagtgggccagcctggagcccgcccagaaggccctgtaccaggaggtgatgctggagaactacgccaacatcaccagcctggccgccctgcccttccccaagcccgacctgatcttccagctggagctgggcgaggccccctgggtgcccgacagctggaggcccgtgggcgaggaggccctgggcggcaggaccagccccaagaaaaagagaaaagtctaagctgccttctgcggggcttgccttctggccatgcccttcttctctcccttgcacctgtacctcttggtctttgaataaagcctgagtaggaaggctagcaaaaaaaaaaaaaaaaaaaaaaaaaaaaaaaaaaaaaaaaaaaaaaaaaaaaaaaaaaaaaaaaaaaaaaaaaaaaaaaa

SEQ ID NO: 2885 - RNA, 5419 nt, synthetic construct
  source 1..5419: mol_type = other RNA
aggaaataagagagaaaagaagagtaagaagaaatataagagccaccatggcccctaagaagaagcgtaaagtgagccgggtgaacggcagcggcagcggcggcggcatgaaccacgaccaggagttcgacccccctaaggtgtaccctcccgtccccgccgagaagagaaagcccatccgggtcctgagcctgttcgatggcatcgccaccggtctgctggtgctgaaggacctgggcatccaggtggataggtacattgcctccgaggtgtgcgaggactccatcaccgtgggaatggtgcgtcatcagggcaagatcatgtacgtgggcgacgtgcggagcgtgacacagaagcatatccaggagtggggccctttcgacctggtgatcggcggcagcccttgcaatgacctgagcatcgtgaacccagcccggaagggcctgtacgagggaaccggcagactgttcttcgagttttacagactgctgcacgacgcccggcctaaggaaggcgacgaccggcccttcttttggctgttcgagaatgtggtggccatgggagtcagcgacaagcgggatattagccggttcctggagagcaaccccgtgatgatcgatgccaaggaagtgagcgccgcccaccgggccagatacttctggggcaatctgcctggcatgaacagacccctggccagcaccgtgaacgacaagctggagctgcaggagtgcctggagcacggccggatcgccaagttcagcaaggtgagaaccatcaccacccgaagcaacagcatcaaacaaggcaaggaccagcactttcctgtgttcatgaacgagaaggaggacatcctgtggtgtaccgagatggagagagtgttcgggttcccagtccactacacagatgtcagcaacatgtctagactggccagacagagactgctgggaagaagctggtccgtccctgtgatcagacacctgttcgcccctctgaaggagtacttcgcctgcgtgagcagcggcaacagcaacgccaacagccggggccccagcttctctagcggcctggtgccactgtccctgagagggagccacatgggccccatggagatctacaaaaccgtgagcgcctggaagcggcagcctgtgcgcgtgctgagcctgtttcggaatatcgataaagtcctgaaaagcctgggattcctggagagcggctctggctccggcggtggcaccctgaagtacgtggaggatgtgacaaacgtggtcagacgggatgtggagaagtggggccccttcgatctggtgtacggcagcacccaacccctgggcagctcttgtgaccggtgccctggctggtacatgtttcagttccaccggatcctgcagtacgccctgccgagacaggagtcccagcggccattcttttggattttcatggacaacttgctgctgaccgaggatgaccaggaaactaccactcggttcctgcagaccgaagccgtgaccctgcaggacgtgagaggccgggactaccagaacgccatgcgggtgtggtccaacatccctggactgaaaagcaagcacgcacctctgacccctaaagaagaggagtacctgcaggcccaggtgcggagcagaagcaagctggacgcccctaaggtggatctgctggtgaagaattgcctcctgcccctgagagagtacttcaagtatttcagccagaatagtctgcccctgggcggcccaagcagcggcgcccctcctcccagcggcggcagcccagccggctccccaacctctaccgaggagggcacctctgagtccgccacccccgagagcggccctggcacctccaccgagcccagcgagggcagcgcacccggcagccctgccggcagccccacctccacagaggagggaaccagcaccgagcccagcgaaggcagcgccccaggcaccagcaccgagcctagtgagggcggctctggcggcggcagcgcccaggagattaaacggatcaacaagatcagaagaagacttgtgaaagacagcaacaccaagaaggccggcaagacaggccccatgaaaaccctgctggttagagtgatgacacccgatctgagagagcggctggaaaacctgagaaagaagcctgaaaatatcccccagcccatcagcaatacatctagagccaacctgaataagctgctgaccgattacaccgaaatgaagaaggcgatcctgcatgtgtactgggaagagttccagaaggaccctgtgggcctgatgagccgggtggcccagcctgccagcaagaagatcgatcagaacaagctgaaacctgagatggacgagaagggcaacctgaccaccgccggctttgcctgctctcagtgtggccagcccctgttcgtgtacaagctggagcaggtgtctgagaagggcaaggcttacaccaactacttcggacggtgcaatgtggccgagcacgaaaagctgatcctgctggcccagctgaagcccgagaaggatagcgacgaagccgtgacatatagcctgggaaagtttgggcagagggccctggatttctacagcattcatgtgaccaaggagtccacccaccccgtgaagcccctggcccagatcgccggaaacagatacgcctccggacctgtgggaaaggccctgagcgacgcatgtatgggcacaatcgcctccttcctgtctaagtaccaggacatcatcatcgaacaccagaaggtggtgaagggcaaccagaagagactggagagcctgcgggagctggccggcaaggaaaacctggaataccctagcgtgaccctgccacctcagcctcacaccaaggagggcgttgatgcctacaacgaagtgatcgcccgggtgcgaatgtgggtgaacctgaacctgtggcagaagctgaagctaagcagagatgatgccaagcctctgctgagactgaagggattcccttcctttcctctggtcgagagacaggccaacgaagtggactggtgggacatggtgtgtaacgtgaagaagctgatcaacgagaaaaaggaggatggcaaggtgttttggcagaatctggctggctacaagagacaggaagccctgagaccatacctgagcagcgaggaagatcggaagaagggaaagaaattcgctcggtaccagctgggcgacctgctgctgcacctggaaaagaagcacggcgaggactggggaaaggtgtacgacgaggcctgggagcggattgacaagaaagtggaaggcctgagcaagcacatcaagctggaagaggaacggagaagcgaggacgcccagagcaaggccgccctgaccgactggctgcgggctaaggccagcttcgtgatcgagggcctgaaggaggccgacaaggacgagttctgcagatgcgagctgaagctgcagaagtggtacggggacctgcggggaaagcccttcgccatcgaagccgagaacagcatcctggacatcagcggcttcagcaagcagtacaactgtgccttcatctggcagaaggacggcgtgaagaagctgaacctgtacctgatcatcaactacttcaagggcggcaagctgcggttcaagaagatcaaacctgaagccttcgaagccaacagattctacaccgtgatcaacaaaaagagcggcgagatcgtgcccatggaggtgaacttcaacttcgacgaccccaacctgatcatcctgcctctggcctttggcaagagacagggcagagaattcatctggaacgacctgctgtccctggaaaccggcagcctgaagctggccaacggaagagtgatcgagaagacactgtacaacagaagaacccggcaggatgagcctgccctgttcgtggccctgaccttcgagcggcgggaggtcctggactcctccaatatcaaaccaatgaacctgatcggcgtggcaagaggcgaaaacatccccgccgtgatcgccctgaccgaccccgagggctgcccactgagccggtttaaggatagcctgggaaacccaacccacatcctgagaatcggcgagagctataaggagaagcagcggaccatccaggccaagaaggaggtggagcagcggagagccggcggctacagccggaagtacgccagcaaagccaagaatctggcagacgatatggtgagaaacaccgctagagatctgctgtactacgccgtgacccaggatgccatgctgatcttcgccaacctgagccggggcttcggccggcagggcaagcggaccttcatggccgagagacagtacacacggatggaggactggctgaccgccaagctggcctacgagggcctgagcaagacctacctgtccaagacactggcccagtacacctccaagacatgcagcaactgtgggtttaccatcaccagcgccgactacgacagggtgctggagaagctgaagaagacagcaacaggctggatgaccacaattaacggcaaggagctgaaggtggagggccagattacctactacaacagatacaagagacagaacgtagtcaaggacctgtccgtcgagctggatagactgagcgaagaatctgtgaacaacgacatctcctcctggacaaagggcagaagcggagaagctctgagcctcctgaagaaaagattctcccatagacccgtgcaggagaagttcgtgtgcctgaactgcggcttcgagacacacgcagccgagcaagccgccctgaacatcgccagatcctggctgttcctgcggagccaggagtacaagaaataccagacaaacaagacaaccggcaacaccgataagagagccttcgtcgagacctggcagtccttttaccggaagaagcttaaggaggtgtggaaacctgccgtgcggtctggcggatctggcggaggctccacaagccagatgcccgtgaagttcgaggacatcgccgtgagcttcagccaggaggagtgggagtacctgaacgaggagcagaaggagctgtacagggaggtgatggaggagaactaccagaccctgatcagcctgggcatcggcagccccagcgtgacccccgacatcatcagccacatcgagggcggcgaggagccctacatcagggaggagcccggcagcgaggagagggagcccggcaggagcagcaccagccccaagaaaaagagaaaagtctaagctgccttctgcggggcttgccttctggccatgcccttcttctctcccttgcacctgtacctcttggtctttgaataaagcctgagtaggaaggctagcaaaaaaaaaaaaaaaaaaaaaaaaaaaaaaaaaaaaaaaaaaaaaaaaaaaaaaaaaaaaaaaaaaaaaaaaaaaaaaaa

SEQ ID NO: 2886 - RNA, 5419 nt, synthetic construct
  source 1..5419: mol_type = other RNA
aggaaataagagagaaaagaagagtaagaagaaatataagagccaccatggcccctaagaagaagcgtaaagtgagccgggtgaacggcagcggcagcggcggcggcatgaaccacgaccaggagttcgacccccctaaggtgtaccctcccgtccccgccgagaagagaaagcccatccgggtcctgagcctgttcgatggcatcgccaccggtctgctggtgctgaaggacctgggcatccaggtggataggtacattgcctccgaggtgtgcgaggactccatcaccgtgggaatggtgcgtcatcagggcaagatcatgtacgtgggcgacgtgcggagcgtgacacagaagcatatccaggagtggggccctttcgacctggtgatcggcggcagcccttgcaatgacctgagcatcgtgaacccagcccggaagggcctgtacgagggaaccggcagactgttcttcgagttttacagactgctgcacgacgcccggcctaaggaaggcgacgaccggcccttcttttggctgttcgagaatgtggtggccatgggagtcagcgacaagcgggatattagccggttcctggagagcaaccccgtgatgatcgatgccaaggaagtgagcgccgcccaccgggccagatacttctggggcaatctgcctggcatgaacagacccctggccagcaccgtgaacgacaagctggagctgcaggagtgcctggagcacggccggatcgccaagttcagcaaggtgagaaccatcaccacccgaagcaacagcatcaaacaaggcaaggaccagcactttcctgtgttcatgaacgagaaggaggacatcctgtggtgtaccgagatggagagagtgttcgggttcccagtccactacacagatgtcagcaacatgtctagactggccagacagagactgctgggaagaagctggtccgtccctgtgatcagacacctgttcgcccctctgaaggagtacttcgcctgcgtgagcagcggcaacagcaacgccaacagccggggccccagcttctctagcggcctggtgccactgtccctgagagggagccacatgggccccatggagatctacaaaaccgtgagcgcctggaagcggcagcctgtgcgcgtgctgagcctgtttcggaatatcgataaagtcctgaaaagcctgggattcctggagagcggctctggctccggcggtggcaccctgaagtacgtggaggatgtgacaaacgtggtcagacgggatgtggagaagtggggccccttcgatctggtgtacggcagcacccaacccctgggcagctcttgtgaccggtgccctggctggtacatgtttcagttccaccggatcctgcagtacgccctgccgagacaggagtcccagcggccattcttttggattttcatggacaacttgctgctgaccgaggatgaccaggaaactaccactcggttcctgcagaccgaagccgtgaccctgcaggacgtgagaggccgggactaccagaacgccatgcgggtgtggtccaacatccctggactgaaaagcaagcacgcacctctgacccctaaagaagaggagtacctgcaggcccaggtgcggagcagaagcaagctggacgcccctaaggtggatctgctggtgaagaattgcctcctgcccctgagagagtacttcaagtatttcagccagaatagtctgcccctgggcggcccaagcagcggcgcccctcctcccagcggcggcagcccagccggctccccaacctctaccgaggagggcacctctgagtccgccacccccgagagcggccctggcacctccaccgagcccagcgagggcagcgcacccggcagccctgccggcagccccacctccacagaggagggaaccagcaccgagcccagcgaaggcagcgccccaggcaccagcaccgagcctagtgagggcggctctggcggcggcagcgcccaggagattaaacggatcaacaagatcagaagaagacttgtgaaagacagcaacaccaagaaggccggcaagacaggccccatgaaaaccctgctggttagagtgatgacacccgatctgagagagcggctggaaaacctgagaaagaagcctgaaaatatcccccagcccatcagcaatacatctagagccaacctgaataagctgctgaccgattacaccgaaatgaagaaggcgatcctgcatgtgtactgggaagagttccagaaggaccctgtgggcctgatgagccgggtggcccagcctgccagcaagaagatcgatcagaacaagctgaaacctgagatggacgagaagggcaacctgaccaccgccggctttgcctgctctcagtgtggccagcccctgttcgtgtacaagctggagcaggtgtctgagaagggcaaggcttacaccaactacttcggacggtgcaatgtggccgagcacgaaaagctgatcctgctggcccagctgaagcccgagaaggatagcgacgaagccgtgacatatagcctgggaaagtttgggcagagggccctggatttctacagcattcatgtgaccaaggagtccacccaccccgtgaagcccctggcccagatcgccggaaacagatacgcctccggacctgtgggaaaggccctgagcgacgcatgtatgggcacaatcgcctccttcctgtctaagtaccaggacatcatcatcgaacaccagaaggtggtgaagggcaaccagaagagactggagagcctgcgggagctggccggcaaggaaaacctggaataccctagcgtgaccctgccacctcagcctcacaccaaggagggcgttgatgcctacaacgaagtgatcgcccgggtgcgaatgtgggtgaacctgaacctgtggcagaagctgaagctaagcagagatgatgccaagcctctgctgagactgaagggattcccttcctttcctctggtcgagagacaggccaacgaagtggactggtgggacatggtgtgtaacgtgaagaagctgatcaacgagaaaaaggaggatggcaaggtgttttggcagaatctggctggctacaagagacaggaagccctgagaccatacctgagcagcgaggaagatcggaagaagggaaagaaattcgctcggtaccagctgggcgacctgctgctgcacctggaaaagaagcacggcgaggactggggaaaggtgtacgacgaggcctgggagcggattgacaagaaagtggaaggcctgagcaagcacatcaagctggaagaggaacggagaagcgaggacgcccagagcaaggccgccctgaccgactggctgcgggctaaggccagcttcgtgatcgagggcctgaaggaggccgacaaggacgagttctgcagatgcgagctgaagctgcagaagtggtacggggacctgcggggaaagcccttcgccatcgaagccgagaacagcatcctggacatcagcggcttcagcaagcagtacaactgtgccttcatctggcagaaggacggcgtgaagaagctgaacctgtacctgatcatcaactacttcaagggcggcaagctgcggttcaagaagatcaaacctgaagccttcgaagccaacagattctacaccgtgatcaacaaaaagagcggcgagatcgtgcccatggaggtgaacttcaacttcgacgaccccaacctgatcatcctgcctctggcctttggcaagagacagggcagagaattcatctggaacgacctgctgtccctggaaaccggcagcctgaagctggccaacggaagagtgatcgagaagacactgtacaacagaagaacccggcaggatgagcctgccctgttcgtggccctgaccttcgagcggcgggaggtcctggactcctccaatatcaaaccaatgaacctgatcggcgtggcaagaggcgaaaacatccccgccgtgatcgccctgaccgaccccgagggctgcccactgagccggtttaaggatagcctgggaaacccaacccacatcctgagaatcggcgagagctataaggagaagcagcggaccatccaggccaagaaggaggtggagcagcggagagccggcggctacagccggaagtacgccagcaaagccaagaatctggcagacgatatggtgagaaacaccgctagagatctgctgtactacgccgtgacccaggatgccatgctgatcttcgccaacctgagccggggcttcggccggcagggcaagcggaccttcatggccgagagacagtacacacggatggaggactggctgaccgccaagctggcctacgagggcctgagcaagacctacctgtccaagacactggcccagtacacctccaagacatgcagcaactgtgggtttaccatcaccagcgccgactacgacagggtgctggagaagctgaagaagacagcaacaggctggatgaccacaattaacggcaaggagctgaaggtggagggccagattacctactacaacagatacaagagacagaacgtagtcaaggacctgtccgtcgagctggatagactgagcgaagaatctgtgaacaacgacatctcctcctggacaaagggcagaagcggagaagctctgagcctcctgaagaaaagattctcccatagacccgtgcaggagaagttcgtgtgcctgaactgcggcttcgagacacacgcagccgagcaagccgccctgaacatcgccagatcctggctgttcctgcggagccaggagtacaagaaataccagacaaacaagacaaccggcaacaccgataagagagccttcgtcgagacctggcagtccttttaccggaagaagcttaaggaggtgtggaaacctgccgtgcggtctggcggatctggcggaggctccacaagcatggacagcgtgaccatcgaggacgtggccgtggacttcaccctggaggagtgggccctgctgggccccagccagaggaagctgtacagggacgtgatgcaggagaccctgaggaacctggccgccgtgggcgccaagagggagtaccacgccatcgaggaccagtacaagaaccagggcaggaagctgaggaccttcatggtggagaggttctgcaagagcaaggacatcagcctgtgcggcaccagccccaagaaaaagagaaaagtctaagctgccttctgcggggcttgccttctggccatgcccttcttctctcccttgcacctgtacctcttggtctttgaataaagcctgagtaggaaggctagcaaaaaaaaaaaaaaaaaaaaaaaaaaaaaaaaaaaaaaaaaaaaaaaaaaaaaaaaaaaaaaaaaaaaaaaaaaaaaaaa

SEQ ID NO: 2887 - RNA, 5419 nt, synthetic construct
  source 1..5419: mol_type = other RNA
aggaaataagagagaaaagaagagtaagaagaaatataagagccaccatggcccctaagaagaagcgtaaagtgagccgggtgaacggcagcggcagcggcggcggcatgaaccacgaccaggagttcgacccccctaaggtgtaccctcccgtccccgccgagaagagaaagcccatccgggtcctgagcctgttcgatggcatcgccaccggtctgctggtgctgaaggacctgggcatccaggtggataggtacattgcctccgaggtgtgcgaggactccatcaccgtgggaatggtgcgtcatcagggcaagatcatgtacgtgggcgacgtgcggagcgtgacacagaagcatatccaggagtggggccctttcgacctggtgatcggcggcagcccttgcaatgacctgagcatcgtgaacccagcccggaagggcctgtacgagggaaccggcagactgttcttcgagttttacagactgctgcacgacgcccggcctaaggaaggcgacgaccggcccttcttttggctgttcgagaatgtggtggccatgggagtcagcgacaagcgggatattagccggttcctggagagcaaccccgtgatgatcgatgccaaggaagtgagcgccgcccaccgggccagatacttctggggcaatctgcctggcatgaacagacccctggccagcaccgtgaacgacaagctggagctgcaggagtgcctggagcacggccggatcgccaagttcagcaaggtgagaaccatcaccacccgaagcaacagcatcaaacaaggcaaggaccagcactttcctgtgttcatgaacgagaaggaggacatcctgtggtgtaccgagatggagagagtgttcgggttcccagtccactacacagatgtcagcaacatgtctagactggccagacagagactgctgggaagaagctggtccgtccctgtgatcagacacctgttcgcccctctgaaggagtacttcgcctgcgtgagcagcggcaacagcaacgccaacagccggggccccagcttctctagcggcctggtgccactgtccctgagagggagccacatgggccccatggagatctacaaaaccgtgagcgcctggaagcggcagcctgtgcgcgtgctgagcctgtttcggaatatcgataaagtcctgaaaagcctgggattcctggagagcggctctggctccggcggtggcaccctgaagtacgtggaggatgtgacaaacgtggtcagacgggatgtggagaagtggggccccttcgatctggtgtacggcagcacccaacccctgggcagctcttgtgaccggtgccctggctggtacatgtttcagttccaccggatcctgcagtacgccctgccgagacaggagtcccagcggccattcttttggattttcatggacaacttgctgctgaccgaggatgaccaggaaactaccactcggttcctgcagaccgaagccgtgaccctgcaggacgtgagaggccgggactaccagaacgccatgcgggtgtggtccaacatccctggactgaaaagcaagcacgcacctctgacccctaaagaagaggagtacctgcaggcccaggtgcggagcagaagcaagctggacgcccctaaggtggatctgctggtgaagaattgcctcctgcccctgagagagtacttcaagtatttcagccagaatagtctgcccctgggcggcccaagcagcggcgcccctcctcccagcggcggcagcccagccggctccccaacctctaccgaggagggcacctctgagtccgccacccccgagagcggccctggcacctccaccgagcccagcgagggcagcgcacccggcagccctgccggcagccccacctccacagaggagggaaccagcaccgagcccagcgaaggcagcgccccaggcaccagcaccgagcctagtgagggcggctctggcggcggcagcgcccaggagattaaacggatcaacaagatcagaagaagacttgtgaaagacagcaacaccaagaaggccggcaagacaggccccatgaaaaccctgctggttagagtgatgacacccgatctgagagagcggctggaaaacctgagaaagaagcctgaaaatatcccccagcccatcagcaatacatctagagccaacctgaataagctgctgaccgattacaccgaaatgaagaaggcgatcctgcatgtgtactgggaagagttccagaaggaccctgtgggcctgatgagccgggtggcccagcctgccagcaagaagatcgatcagaacaagctgaaacctgagatggacgagaagggcaacctgaccaccgccggctttgcctgctctcagtgtggccagcccctgttcgtgtacaagctggagcaggtgtctgagaagggcaaggcttacaccaactacttcggacggtgcaatgtggccgagcacgaaaagctgatcctgctggcccagctgaagcccgagaaggatagcgacgaagccgtgacatatagcctgggaaagtttgggcagagggccctggatttctacagcattcatgtgaccaaggagtccacccaccccgtgaagcccctggcccagatcgccggaaacagatacgcctccggacctgtgggaaaggccctgagcgacgcatgtatgggcacaatcgcctccttcctgtctaagtaccaggacatcatcatcgaacaccagaaggtggtgaagggcaaccagaagagactggagagcctgcgggagctggccggcaaggaaaacctggaataccctagcgtgaccctgccacctcagcctcacaccaaggagggcgttgatgcctacaacgaagtgatcgcccgggtgcgaatgtgggtgaacctgaacctgtggcagaagctgaagctaagcagagatgatgccaagcctctgctgagactgaagggattcccttcctttcctctggtcgagagacaggccaacgaagtggactggtgggacatggtgtgtaacgtgaagaagctgatcaacgagaaaaaggaggatggcaaggtgttttggcagaatctggctggctacaagagacaggaagccctgagaccatacctgagcagcgaggaagatcggaagaagggaaagaaattcgctcggtaccagctgggcgacctgctgctgcacctggaaaagaagcacggcgaggactggggaaaggtgtacgacgaggcctgggagcggattgacaagaaagtggaaggcctgagcaagcacatcaagctggaagaggaacggagaagcgaggacgcccagagcaaggccgccctgaccgactggctgcgggctaaggccagcttcgtgatcgagggcctgaaggaggccgacaaggacgagttctgcagatgcgagctgaagctgcagaagtggtacggggacctgcggggaaagcccttcgccatcgaagccgagaacagcatcctggacatcagcggcttcagcaagcagtacaactgtgccttcatctggcagaaggacggcgtgaagaagctgaacctgtacctgatcatcaactacttcaagggcggcaagctgcggttcaagaagatcaaacctgaagccttcgaagccaacagattctacaccgtgatcaacaaaaagagcggcgagatcgtgcccatggaggtgaacttcaacttcgacgaccccaacctgatcatcctgcctctggcctttggcaagagacagggcagagaattcatctggaacgacctgctgtccctggaaaccggcagcctgaagctggccaacggaagagtgatcgagaagacactgtacaacagaagaacccggcaggatgagcctgccctgttcgtggccctgaccttcgagcggcgggaggtcctggactcctccaatatcaaaccaatgaacctgatcggcgtggcaagaggcgaaaacatccccgccgtgatcgccctgaccgaccccgagggctgcccactgagccggtttaaggatagcctgggaaacccaacccacatcctgagaatcggcgagagctataaggagaagcagcggaccatccaggccaagaaggaggtggagcagcggagagccggcggctacagccggaagtacgccagcaaagccaagaatctggcagacgatatggtgagaaacaccgctagagatctgctgtactacgccgtgacccaggatgccatgctgatcttcgccaacctgagccggggcttcggccggcagggcaagcggaccttcatggccgagagacagtacacacggatggaggactggctgaccgccaagctggcctacgagggcctgagcaagacctacctgtccaagacactggcccagtacacctccaagacatgcagcaactgtgggtttaccatcaccagcgccgactacgacagggtgctggagaagctgaagaagacagcaacaggctggatgaccacaattaacggcaaggagctgaaggtggagggccagattacctactacaacagatacaagagacagaacgtagtcaaggacctgtccgtcgagctggatagactgagcgaagaatctgtgaacaacgacatctcctcctggacaaagggcagaagcggagaagctctgagcctcctgaagaaaagattctcccatagacccgtgcaggagaagttcgtgtgcctgaactgcggcttcgagacacacgcagccgagcaagccgccctgaacatcgccagatcctggctgttcctgcggagccaggagtacaagaaataccagacaaacaagacaaccggcaacaccgataagagagccttcgtcgagacctggcagtccttttaccggaagaagcttaaggaggtgtggaaacctgccgtgcggtctggcggatctggcggaggctccacaagcttccaggagcccgtgaccttcgaggacgtggccgtgtacttcacccagaacgagtggaccagcctgcagcccagccagagggccctgttcagggaggtgatgctggagaactacgccaccgtgaccagcctgagcgccttccccttccccaagcccgacctgatcttcaggctggagcagggcgaggccgcctggggccccgacccctggaccctggccggcgaggaggccctgaggggcctgaccagccccaagaaaaagagaaaagtctaagctgccttctgcggggcttgccttctggccatgcccttcttctctcccttgcacctgtacctcttggtctttgaataaagcctgagtaggaaggctagcaaaaaaaaaaaaaaaaaaaaaaaaaaaaaaaaaaaaaaaaaaaaaaaaaaaaaaaaaaaaaaaaaaaaaaaaaaaaaaaa

SEQ ID NO: 2888 - RNA, 5419 nt, synthetic construct
  source 1..5419: mol_type = other RNA
aggaaataagagagaaaagaagagtaagaagaaatataagagccaccatggcccctaagaagaagcgtaaagtgagccgggtgaacggcagcggcagcggcggcggcatgaaccacgaccaggagttcgacccccctaaggtgtaccctcccgtccccgccgagaagagaaagcccatccgggtcctgagcctgttcgatggcatcgccaccggtctgctggtgctgaaggacctgggcatccaggtggataggtacattgcctccgaggtgtgcgaggactccatcaccgtgggaatggtgcgtcatcagggcaagatcatgtacgtgggcgacgtgcggagcgtgacacagaagcatatccaggagtggggccctttcgacctggtgatcggcggcagcccttgcaatgacctgagcatcgtgaacccagcccggaagggcctgtacgagggaaccggcagactgttcttcgagttttacagactgctgcacgacgcccggcctaaggaaggcgacgaccggcccttcttttggctgttcgagaatgtggtggccatgggagtcagcgacaagcgggatattagccggttcctggagagcaaccccgtgatgatcgatgccaaggaagtgagcgccgcccaccgggccagatacttctggggcaatctgcctggcatgaacagacccctggccagcaccgtgaacgacaagctggagctgcaggagtgcctggagcacggccggatcgccaagttcagcaaggtgagaaccatcaccacccgaagcaacagcatcaaacaaggcaaggaccagcactttcctgtgttcatgaacgagaaggaggacatcctgtggtgtaccgagatggagagagtgttcgggttcccagtccactacacagatgtcagcaacatgtctagactggccagacagagactgctgggaagaagctggtccgtccctgtgatcagacacctgttcgcccctctgaaggagtacttcgcctgcgtgagcagcggcaacagcaacgccaacagccggggccccagcttctctagcggcctggtgccactgtccctgagagggagccacatgggccccatggagatctacaaaaccgtgagcgcctggaagcggcagcctgtgcgcgtgctgagcctgtttcggaatatcgataaagtcctgaaaagcctgggattcctggagagcggctctggctccggcggtggcaccctgaagtacgtggaggatgtgacaaacgtggtcagacgggatgtggagaagtggggccccttcgatctggtgtacggcagcacccaacccctgggcagctcttgtgaccggtgccctggctggtacatgtttcagttccaccggatcctgcagtacgccctgccgagacaggagtcccagcggccattcttttggattttcatggacaacttgctgctgaccgaggatgaccaggaaactaccactcggttcctgcagaccgaagccgtgaccctgcaggacgtgagaggccgggactaccagaacgccatgcgggtgtggtccaacatccctggactgaaaagcaagcacgcacctctgacccctaaagaagaggagtacctgcaggcccaggtgcggagcagaagcaagctggacgcccctaaggtggatctgctggtgaagaattgcctcctgcccctgagagagtacttcaagtatttcagccagaatagtctgcccctgggcggcccaagcagcggcgcccctcctcccagcggcggcagcccagccggctccccaacctctaccgaggagggcacctctgagtccgccacccccgagagcggccctggcacctccaccgagcccagcgagggcagcgcacccggcagccctgccggcagccccacctccacagaggagggaaccagcaccgagcccagcgaaggcagcgccccaggcaccagcaccgagcctagtgagggcggctctggcggcggcagcgcccaggagattaaacggatcaacaagatcagaagaagacttgtgaaagacagcaacaccaagaaggccggcaagacaggccccatgaaaaccctgctggttagagtgatgacacccgatctgagagagcggctggaaaacctgagaaagaagcctgaaaatatcccccagcccatcagcaatacatctagagccaacctgaataagctgctgaccgattacaccgaaatgaagaaggcgatcctgcatgtgtactgggaagagttccagaaggaccctgtgggcctgatgagccgggtggcccagcctgccagcaagaagatcgatcagaacaagctgaaacctgagatggacgagaagggcaacctgaccaccgccggctttgcctgctctcagtgtggccagcccctgttcgtgtacaagctggagcaggtgtctgagaagggcaaggcttacaccaactacttcggacggtgcaatgtggccgagcacgaaaagctgatcctgctggcccagctgaagcccgagaaggatagcgacgaagccgtgacatatagcctgggaaagtttgggcagagggccctggatttctacagcattcatgtgaccaaggagtccacccaccccgtgaagcccctggcccagatcgccggaaacagatacgcctccggacctgtgggaaaggccctgagcgacgcatgtatgggcacaatcgcctccttcctgtctaagtaccaggacatcatcatcgaacaccagaaggtggtgaagggcaaccagaagagactggagagcctgcgggagctggccggcaaggaaaacctggaataccctagcgtgaccctgccacctcagcctcacaccaaggagggcgttgatgcctacaacgaagtgatcgcccgggtgcgaatgtgggtgaacctgaacctgtggcagaagctgaagctaagcagagatgatgccaagcctctgctgagactgaagggattcccttcctttcctctggtcgagagacaggccaacgaagtggactggtgggacatggtgtgtaacgtgaagaagctgatcaacgagaaaaaggaggatggcaaggtgttttggcagaatctggctggctacaagagacaggaagccctgagaccatacctgagcagcgaggaagatcggaagaagggaaagaaattcgctcggtaccagctgggcgacctgctgctgcacctggaaaagaagcacggcgaggactggggaaaggtgtacgacgaggcctgggagcggattgacaagaaagtggaaggcctgagcaagcacatcaagctggaagaggaacggagaagcgaggacgcccagagcaaggccgccctgaccgactggctgcgggctaaggccagcttcgtgatcgagggcctgaaggaggccgacaaggacgagttctgcagatgcgagctgaagctgcagaagtggtacggggacctgcggggaaagcccttcgccatcgaagccgagaacagcatcctggacatcagcggcttcagcaagcagtacaactgtgccttcatctggcagaaggacggcgtgaagaagctgaacctgtacctgatcatcaactacttcaagggcggcaagctgcggttcaagaagatcaaacctgaagccttcgaagccaacagattctacaccgtgatcaacaaaaagagcggcgagatcgtgcccatggaggtgaacttcaacttcgacgaccccaacctgatcatcctgcctctggcctttggcaagagacagggcagagaattcatctggaacgacctgctgtccctggaaaccggcagcctgaagctggccaacggaagagtgatcgagaagacactgtacaacagaagaacccggcaggatgagcctgccctgttcgtggccctgaccttcgagcggcgggaggtcctggactcctccaatatcaaaccaatgaacctgatcggcgtggcaagaggcgaaaacatccccgccgtgatcgccctgaccgaccccgagggctgcccactgagccggtttaaggatagcctgggaaacccaacccacatcctgagaatcggcgagagctataaggagaagcagcggaccatccaggccaagaaggaggtggagcagcggagagccggcggctacagccggaagtacgccagcaaagccaagaatctggcagacgatatggtgagaaacaccgctagagatctgctgtactacgccgtgacccaggatgccatgctgatcttcgccaacctgagccggggcttcggccggcagggcaagcggaccttcatggccgagagacagtacacacggatggaggactggctgaccgccaagctggcctacgagggcctgagcaagacctacctgtccaagacactggcccagtacacctccaagacatgcagcaactgtgggtttaccatcaccagcgccgactacgacagggtgctggagaagctgaagaagacagcaacaggctggatgaccacaattaacggcaaggagctgaaggtggagggccagattacctactacaacagatacaagagacagaacgtagtcaaggacctgtccgtcgagctggatagactgagcgaagaatctgtgaacaacgacatctcctcctggacaaagggcagaagcggagaagctctgagcctcctgaagaaaagattctcccatagacccgtgcaggagaagttcgtgtgcctgaactgcggcttcgagacacacgcagccgagcaagccgccctgaacatcgccagatcctggctgttcctgcggagccaggagtacaagaaataccagacaaacaagacaaccggcaacaccgataagagagccttcgtcgagacctggcagtccttttaccggaagaagcttaaggaggtgtggaaacctgccgtgcggtctggcggatctggcggaggctccacaagcatgatcgagtaccagatccccgtgagcttcaaggacgtggtggtgggcttcacccaggaggagtggcaccagctgagccccgcccagagggccctgtacagggacgtgatgctggagacctacagcaacctggtgagcgtgggctacgagggcaccaagcccgacgtgatcctgaggctggagcaggaggaggccccctggatcggcgaggccgcctgccccggctgccactgctgggaggacaccagccccaagaaaaagagaaaagtctaagctgccttctgcggggcttgccttctggccatgcccttcttctctcccttgcacctgtacctcttggtctttgaataaagcctgagtaggaaggctagcaaaaaaaaaaaaaaaaaaaaaaaaaaaaaaaaaaaaaaaaaaaaaaaaaaaaaaaaaaaaaaaaaaaaaaaaaaaaaaaa

SEQ ID NO: 2889 - RNA, 5419 nt, synthetic construct
  source 1..5419: mol_type = other RNA
aggaaataagagagaaaagaagagtaagaagaaatataagagccaccatggcccctaagaagaagcgtaaagtgagccgggtgaacggcagcggcagcggcggcggcatgaaccacgaccaggagttcgacccccctaaggtgtaccctcccgtccccgccgagaagagaaagcccatccgggtcctgagcctgttcgatggcatcgccaccggtctgctggtgctgaaggacctgggcatccaggtggataggtacattgcctccgaggtgtgcgaggactccatcaccgtgggaatggtgcgtcatcagggcaagatcatgtacgtgggcgacgtgcggagcgtgacacagaagcatatccaggagtggggccctttcgacctggtgatcggcggcagcccttgcaatgacctgagcatcgtgaacccagcccggaagggcctgtacgagggaaccggcagactgttcttcgagttttacagactgctgcacgacgcccggcctaaggaaggcgacgaccggcccttcttttggctgttcgagaatgtggtggccatgggagtcagcgacaagcgggatattagccggttcctggagagcaaccccgtgatgatcgatgccaaggaagtgagcgccgcccaccgggccagatacttctggggcaatctgcctggcatgaacagacccctggccagcaccgtgaacgacaagctggagctgcaggagtgcctggagcacggccggatcgccaagttcagcaaggtgagaaccatcaccacccgaagcaacagcatcaaacaaggcaaggaccagcactttcctgtgttcatgaacgagaaggaggacatcctgtggtgtaccgagatggagagagtgttcgggttcccagtccactacacagatgtcagcaacatgtctagactggccagacagagactgctgggaagaagctggtccgtccctgtgatcagacacctgttcgcccctctgaaggagtacttcgcctgcgtgagcagcggcaacagcaacgccaacagccggggccccagcttctctagcggcctggtgccactgtccctgagagggagccacatgggccccatggagatctacaaaaccgtgagcgcctggaagcggcagcctgtgcgcgtgctgagcctgtttcggaatatcgataaagtcctgaaaagcctgggattcctggagagcggctctggctccggcggtggcaccctgaagtacgtggaggatgtgacaaacgtggtcagacgggatgtggagaagtggggccccttcgatctggtgtacggcagcacccaacccctgggcagctcttgtgaccggtgccctggctggtacatgtttcagttccaccggatcctgcagtacgccctgccgagacaggagtcccagcggccattcttttggattttcatggacaacttgctgctgaccgaggatgaccaggaaactaccactcggttcctgcagaccgaagccgtgaccctgcaggacgtgagaggccgggactaccagaacgccatgcgggtgtggtccaacatccctggactgaaaagcaagcacgcacctctgacccctaaagaagaggagtacctgcaggcccaggtgcggagcagaagcaagctggacgcccctaaggtggatctgctggtgaagaattgcctcctgcccctgagagagtacttcaagtatttcagccagaatagtctgcccctgggcggcccaagcagcggcgcccctcctcccagcggcggcagcccagccggctccccaacctctaccgaggagggcacctctgagtccgccacccccgagagcggccctggcacctccaccgagcccagcgagggcagcgcacccggcagccctgccggcagccccacctccacagaggagggaaccagcaccgagcccagcgaaggcagcgccccaggcaccagcaccgagcctagtgagggcggctctggcggcggcagcgcccaggagattaaacggatcaacaagatcagaagaagacttgtgaaagacagcaacaccaagaaggccggcaagacaggccccatgaaaaccctgctggttagagtgatgacacccgatctgagagagcggctggaaaacctgagaaagaagcctgaaaatatcccccagcccatcagcaatacatctagagccaacctgaataagctgctgaccgattacaccgaaatgaagaaggcgatcctgcatgtgtactgggaagagttccagaaggaccctgtgggcctgatgagccgggtggcccagcctgccagcaagaagatcgatcagaacaagctgaaacctgagatggacgagaagggcaacctgaccaccgccggctttgcctgctctcagtgtggccagcccctgttcgtgtacaagctggagcaggtgtctgagaagggcaaggcttacaccaactacttcggacggtgcaatgtggccgagcacgaaaagctgatcctgctggcccagctgaagcccgagaaggatagcgacgaagccgtgacatatagcctgggaaagtttgggcagagggccctggatttctacagcattcatgtgaccaaggagtccacccaccccgtgaagcccctggcccagatcgccggaaacagatacgcctccggacctgtgggaaaggccctgagcgacgcatgtatgggcacaatcgcctccttcctgtctaagtaccaggacatcatcatcgaacaccagaaggtggtgaagggcaaccagaagagactggagagcctgcgggagctggccggcaaggaaaacctggaataccctagcgtgaccctgccacctcagcctcacaccaaggagggcgttgatgcctacaacgaagtgatcgcccgggtgcgaatgtgggtgaacctgaacctgtggcagaagctgaagctaagcagagatgatgccaagcctctgctgagactgaagggattcccttcctttcctctggtcgagagacaggccaacgaagtggactggtgggacatggtgtgtaacgtgaagaagctgatcaacgagaaaaaggaggatggcaaggtgttttggcagaatctggctggctacaagagacaggaagccctgagaccatacctgagcagcgaggaagatcggaagaagggaaagaaattcgctcggtaccagctgggcgacctgctgctgcacctggaaaagaagcacggcgaggactggggaaaggtgtacgacgaggcctgggagcggattgacaagaaagtggaaggcctgagcaagcacatcaagctggaagaggaacggagaagcgaggacgcccagagcaaggccgccctgaccgactggctgcgggctaaggccagcttcgtgatcgagggcctgaaggaggccgacaaggacgagttctgcagatgcgagctgaagctgcagaagtggtacggggacctgcggggaaagcccttcgccatcgaagccgagaacagcatcctggacatcagcggcttcagcaagcagtacaactgtgccttcatctggcagaaggacggcgtgaagaagctgaacctgtacctgatcatcaactacttcaagggcggcaagctgcggttcaagaagatcaaacctgaagccttcgaagccaacagattctacaccgtgatcaacaaaaagagcggcgagatcgtgcccatggaggtgaacttcaacttcgacgaccccaacctgatcatcctgcctctggcctttggcaagagacagggcagagaattcatctggaacgacctgctgtccctggaaaccggcagcctgaagctggccaacggaagagtgatcgagaagacactgtacaacagaagaacccggcaggatgagcctgccctgttcgtggccctgaccttcgagcggcgggaggtcctggactcctccaatatcaaaccaatgaacctgatcggcgtggcaagaggcgaaaacatccccgccgtgatcgccctgaccgaccccgagggctgcccactgagccggtttaaggatagcctgggaaacccaacccacatcctgagaatcggcgagagctataaggagaagcagcggaccatccaggccaagaaggaggtggagcagcggagagccggcggctacagccggaagtacgccagcaaagccaagaatctggcagacgatatggtgagaaacaccgctagagatctgctgtactacgccgtgacccaggatgccatgctgatcttcgccaacctgagccggggcttcggccggcagggcaagcggaccttcatggccgagagacagtacacacggatggaggactggctgaccgccaagctggcctacgagggcctgagcaagacctacctgtccaagacactggcccagtacacctccaagacatgcagcaactgtgggtttaccatcaccagcgccgactacgacagggtgctggagaagctgaagaagacagcaacaggctggatgaccacaattaacggcaaggagctgaaggtggagggccagattacctactacaacagatacaagagacagaacgtagtcaaggacctgtccgtcgagctggatagactgagcgaagaatctgtgaacaacgacatctcctcctggacaaagggcagaagcggagaagctctgagcctcctgaagaaaagattctcccatagacccgtgcaggagaagttcgtgtgcctgaactgcggcttcgagacacacgcagccgagcaagccgccctgaacatcgccagatcctggctgttcctgcggagccaggagtacaagaaataccagacaaacaagacaaccggcaacaccgataagagagccttcgtcgagacctggcagtccttttaccggaagaagcttaaggaggtgtggaaacctgccgtgcggtctggcggatctggcggaggctccacaagcccccaggagctggtgaccttcgaggacgtggccgtgtacctgagcaaggaggagtggggcctgctggaccccgcccagaggaggctgtacagggacgtgatgctggagaactacggcaacgtggccagcctgggcctgcccgtgagcaagcccgacctgatcagccagctggagaggaccgacctgcccctggtgcccaggctgccccagaccgagatcgaggacctgttcgacgagaagctgaccagccccaagaaaaagagaaaagtctaagctgccttctgcggggcttgccttctggccatgcccttcttctctcccttgcacctgtacctcttggtctttgaataaagcctgagtaggaaggctagcaaaaaaaaaaaaaaaaaaaaaaaaaaaaaaaaaaaaaaaaaaaaaaaaaaaaaaaaaaaaaaaaaaaaaaaaaaaaaaaa

SEQ ID NO: 2890 - RNA, 5419 nt, synthetic construct
  source 1..5419: mol_type = other RNA
aggaaataagagagaaaagaagagtaagaagaaatataagagccaccatggcccctaagaagaagcgtaaagtgagccgggtgaacggcagcggcagcggcggcggcatgaaccacgaccaggagttcgacccccctaaggtgtaccctcccgtccccgccgagaagagaaagcccatccgggtcctgagcctgttcgatggcatcgccaccggtctgctggtgctgaaggacctgggcatccaggtggataggtacattgcctccgaggtgtgcgaggactccatcaccgtgggaatggtgcgtcatcagggcaagatcatgtacgtgggcgacgtgcggagcgtgacacagaagcatatccaggagtggggccctttcgacctggtgatcggcggcagcccttgcaatgacctgagcatcgtgaacccagcccggaagggcctgtacgagggaaccggcagactgttcttcgagttttacagactgctgcacgacgcccggcctaaggaaggcgacgaccggcccttcttttggctgttcgagaatgtggtggccatgggagtcagcgacaagcgggatattagccggttcctggagagcaaccccgtgatgatcgatgccaaggaagtgagcgccgcccaccgggccagatacttctggggcaatctgcctggcatgaacagacccctggccagcaccgtgaacgacaagctggagctgcaggagtgcctggagcacggccggatcgccaagttcagcaaggtgagaaccatcaccacccgaagcaacagcatcaaacaaggcaaggaccagcactttcctgtgttcatgaacgagaaggaggacatcctgtggtgtaccgagatggagagagtgttcgggttcccagtccactacacagatgtcagcaacatgtctagactggccagacagagactgctgggaagaagctggtccgtccctgtgatcagacacctgttcgcccctctgaaggagtacttcgcctgcgtgagcagcggcaacagcaacgccaacagccggggccccagcttctctagcggcctggtgccactgtccctgagagggagccacatgggccccatggagatctacaaaaccgtgagcgcctggaagcggcagcctgtgcgcgtgctgagcctgtttcggaatatcgataaagtcctgaaaagcctgggattcctggagagcggctctggctccggcggtggcaccctgaagtacgtggaggatgtgacaaacgtggtcagacgggatgtggagaagtggggccccttcgatctggtgtacggcagcacccaacccctgggcagctcttgtgaccggtgccctggctggtacatgtttcagttccaccggatcctgcagtacgccctgccgagacaggagtcccagcggccattcttttggattttcatggacaacttgctgctgaccgaggatgaccaggaaactaccactcggttcctgcagaccgaagccgtgaccctgcaggacgtgagaggccgggactaccagaacgccatgcgggtgtggtccaacatccctggactgaaaagcaagcacgcacctctgacccctaaagaagaggagtacctgcaggcccaggtgcggagcagaagcaagctggacgcccctaaggtggatctgctggtgaagaattgcctcctgcccctgagagagtacttcaagtatttcagccagaatagtctgcccctgggcggcccaagcagcggcgcccctcctcccagcggcggcagcccagccggctccccaacctctaccgaggagggcacctctgagtccgccacccccgagagcggccctggcacctccaccgagcccagcgagggcagcgcacccggcagccctgccggcagccccacctccacagaggagggaaccagcaccgagcccagcgaaggcagcgccccaggcaccagcaccgagcctagtgagggcggctctggcggcggcagcgcccaggagattaaacggatcaacaagatcagaagaagacttgtgaaagacagcaacaccaagaaggccggcaagacaggccccatgaaaaccctgctggttagagtgatgacacccgatctgagagagcggctggaaaacctgagaaagaagcctgaaaatatcccccagcccatcagcaatacatctagagccaacctgaataagctgctgaccgattacaccgaaatgaagaaggcgatcctgcatgtgtactgggaagagttccagaaggaccctgtgggcctgatgagccgggtggcccagcctgccagcaagaagatcgatcagaacaagctgaaacctgagatggacgagaagggcaacctgaccaccgccggctttgcctgctctcagtgtggccagcccctgttcgtgtacaagctggagcaggtgtctgagaagggcaaggcttacaccaactacttcggacggtgcaatgtggccgagcacgaaaagctgatcctgctggcccagctgaagcccgagaaggatagcgacgaagccgtgacatatagcctgggaaagtttgggcagagggccctggatttctacagcattcatgtgaccaaggagtccacccaccccgtgaagcccctggcccagatcgccggaaacagatacgcctccggacctgtgggaaaggccctgagcgacgcatgtatgggcacaatcgcctccttcctgtctaagtaccaggacatcatcatcgaacaccagaaggtggtgaagggcaaccagaagagactggagagcctgcgggagctggccggcaaggaaaacctggaataccctagcgtgaccctgccacctcagcctcacaccaaggagggcgttgatgcctacaacgaagtgatcgcccgggtgcgaatgtgggtgaacctgaacctgtggcagaagctgaagctaagcagagatgatgccaagcctctgctgagactgaagggattcccttcctttcctctggtcgagagacaggccaacgaagtggactggtgggacatggtgtgtaacgtgaagaagctgatcaacgagaaaaaggaggatggcaaggtgttttggcagaatctggctggctacaagagacaggaagccctgagaccatacctgagcagcgaggaagatcggaagaagggaaagaaattcgctcggtaccagctgggcgacctgctgctgcacctggaaaagaagcacggcgaggactggggaaaggtgtacgacgaggcctgggagcggattgacaagaaagtggaaggcctgagcaagcacatcaagctggaagaggaacggagaagcgaggacgcccagagcaaggccgccctgaccgactggctgcgggctaaggccagcttcgtgatcgagggcctgaaggaggccgacaaggacgagttctgcagatgcgagctgaagctgcagaagtggtacggggacctgcggggaaagcccttcgccatcgaagccgagaacagcatcctggacatcagcggcttcagcaagcagtacaactgtgccttcatctggcagaaggacggcgtgaagaagctgaacctgtacctgatcatcaactacttcaagggcggcaagctgcggttcaagaagatcaaacctgaagccttcgaagccaacagattctacaccgtgatcaacaaaaagagcggcgagatcgtgcccatggaggtgaacttcaacttcgacgaccccaacctgatcatcctgcctctggcctttggcaagagacagggcagagaattcatctggaacgacctgctgtccctggaaaccggcagcctgaagctggccaacggaagagtgatcgagaagacactgtacaacagaagaacccggcaggatgagcctgccctgttcgtggccctgaccttcgagcggcgggaggtcctggactcctccaatatcaaaccaatgaacctgatcggcgtggcaagaggcgaaaacatccccgccgtgatcgccctgaccgaccccgagggctgcccactgagccggtttaaggatagcctgggaaacccaacccacatcctgagaatcggcgagagctataaggagaagcagcggaccatccaggccaagaaggaggtggagcagcggagagccggcggctacagccggaagtacgccagcaaagccaagaatctggcagacgatatggtgagaaacaccgctagagatctgctgtactacgccgtgacccaggatgccatgctgatcttcgccaacctgagccggggcttcggccggcagggcaagcggaccttcatggccgagagacagtacacacggatggaggactggctgaccgccaagctggcctacgagggcctgagcaagacctacctgtccaagacactggcccagtacacctccaagacatgcagcaactgtgggtttaccatcaccagcgccgactacgacagggtgctggagaagctgaagaagacagcaacaggctggatgaccacaattaacggcaaggagctgaaggtggagggccagattacctactacaacagatacaagagacagaacgtagtcaaggacctgtccgtcgagctggatagactgagcgaagaatctgtgaacaacgacatctcctcctggacaaagggcagaagcggagaagctctgagcctcctgaagaaaagattctcccatagacccgtgcaggagaagttcgtgtgcctgaactgcggcttcgagacacacgcagccgagcaagccgccctgaacatcgccagatcctggctgttcctgcggagccaggagtacaagaaataccagacaaacaagacaaccggcaacaccgataagagagccttcgtcgagacctggcagtccttttaccggaagaagcttaaggaggtgtggaaacctgccgtgcggtctggcggatctggcggaggctccacaagcccccagggcctggtgaccttcggcgacgtggccgtggacttcagccaggaggagtgggagtggctgaaccccaaccagaggaacctgtacaggaaggtgatgctggagaactacaagaacctggccagcctgggcctgtgcgtgagcaagcccgacgtgatcagcagcctggagcagggcaaggagccctggaccgtgaagaggaagatgaccagggcctggtgccccgacctgaagatcgtgaccagccccaagaaaaagagaaaagtctaagctgccttctgcggggcttgccttctggccatgcccttcttctctcccttgcacctgtacctcttggtctttgaataaagcctgagtaggaaggctagcaaaaaaaaaaaaaaaaaaaaaaaaaaaaaaaaaaaaaaaaaaaaaaaaaaaaaaaaaaaaaaaaaaaaaaaaaaaaaaaa

SEQ ID NO: 2891 - RNA, 5419 nt, synthetic construct
  source 1..5419: mol_type = other RNA
aggaaataagagagaaaagaagagtaagaagaaatataagagccaccatggcccctaagaagaagcgtaaagtgagccgggtgaacggcagcggcagcggcggcggcatgaaccacgaccaggagttcgacccccctaaggtgtaccctcccgtccccgccgagaagagaaagcccatccgggtcctgagcctgttcgatggcatcgccaccggtctgctggtgctgaaggacctgggcatccaggtggataggtacattgcctccgaggtgtgcgaggactccatcaccgtgggaatggtgcgtcatcagggcaagatcatgtacgtgggcgacgtgcggagcgtgacacagaagcatatccaggagtggggccctttcgacctggtgatcggcggcagcccttgcaatgacctgagcatcgtgaacccagcccggaagggcctgtacgagggaaccggcagactgttcttcgagttttacagactgctgcacgacgcccggcctaaggaaggcgacgaccggcccttcttttggctgttcgagaatgtggtggccatgggagtcagcgacaagcgggatattagccggttcctggagagcaaccccgtgatgatcgatgccaaggaagtgagcgccgcccaccgggccagatacttctggggcaatctgcctggcatgaacagacccctggccagcaccgtgaacgacaagctggagctgcaggagtgcctggagcacggccggatcgccaagttcagcaaggtgagaaccatcaccacccgaagcaacagcatcaaacaaggcaaggaccagcactttcctgtgttcatgaacgagaaggaggacatcctgtggtgtaccgagatggagagagtgttcgggttcccagtccactacacagatgtcagcaacatgtctagactggccagacagagactgctgggaagaagctggtccgtccctgtgatcagacacctgttcgcccctctgaaggagtacttcgcctgcgtgagcagcggcaacagcaacgccaacagccggggccccagcttctctagcggcctggtgccactgtccctgagagggagccacatgggccccatggagatctacaaaaccgtgagcgcctggaagcggcagcctgtgcgcgtgctgagcctgtttcggaatatcgataaagtcctgaaaagcctgggattcctggagagcggctctggctccggcggtggcaccctgaagtacgtggaggatgtgacaaacgtggtcagacgggatgtggagaagtggggccccttcgatctggtgtacggcagcacccaacccctgggcagctcttgtgaccggtgccctggctggtacatgtttcagttccaccggatcctgcagtacgccctgccgagacaggagtcccagcggccattcttttggattttcatggacaacttgctgctgaccgaggatgaccaggaaactaccactcggttcctgcagaccgaagccgtgaccctgcaggacgtgagaggccgggactaccagaacgccatgcgggtgtggtccaacatccctggactgaaaagcaagcacgcacctctgacccctaaagaagaggagtacctgcaggcccaggtgcggagcagaagcaagctggacgcccctaaggtggatctgctggtgaagaattgcctcctgcccctgagagagtacttcaagtatttcagccagaatagtctgcccctgggcggcccaagcagcggcgcccctcctcccagcggcggcagcccagccggctccccaacctctaccgaggagggcacctctgagtccgccacccccgagagcggccctggcacctccaccgagcccagcgagggcagcgcacccggcagccctgccggcagccccacctccacagaggagggaaccagcaccgagcccagcgaaggcagcgccccaggcaccagcaccgagcctagtgagggcggctctggcggcggcagcgcccaggagattaaacggatcaacaagatcagaagaagacttgtgaaagacagcaacaccaagaaggccggcaagacaggccccatgaaaaccctgctggttagagtgatgacacccgatctgagagagcggctggaaaacctgagaaagaagcctgaaaatatcccccagcccatcagcaatacatctagagccaacctgaataagctgctgaccgattacaccgaaatgaagaaggcgatcctgcatgtgtactgggaagagttccagaaggaccctgtgggcctgatgagccgggtggcccagcctgccagcaagaagatcgatcagaacaagctgaaacctgagatggacgagaagggcaacctgaccaccgccggctttgcctgctctcagtgtggccagcccctgttcgtgtacaagctggagcaggtgtctgagaagggcaaggcttacaccaactacttcggacggtgcaatgtggccgagcacgaaaagctgatcctgctggcccagctgaagcccgagaaggatagcgacgaagccgtgacatatagcctgggaaagtttgggcagagggccctggatttctacagcattcatgtgaccaaggagtccacccaccccgtgaagcccctggcccagatcgccggaaacagatacgcctccggacctgtgggaaaggccctgagcgacgcatgtatgggcacaatcgcctccttcctgtctaagtaccaggacatcatcatcgaacaccagaaggtggtgaagggcaaccagaagagactggagagcctgcgggagctggccggcaaggaaaacctggaataccctagcgtgaccctgccacctcagcctcacaccaaggagggcgttgatgcctacaacgaagtgatcgcccgggtgcgaatgtgggtgaacctgaacctgtggcagaagctgaagctaagcagagatgatgccaagcctctgctgagactgaagggattcccttcctttcctctggtcgagagacaggccaacgaagtggactggtgggacatggtgtgtaacgtgaagaagctgatcaacgagaaaaaggaggatggcaaggtgttttggcagaatctggctggctacaagagacaggaagccctgagaccatacctgagcagcgaggaagatcggaagaagggaaagaaattcgctcggtaccagctgggcgacctgctgctgcacctggaaaagaagcacggcgaggactggggaaaggtgtacgacgaggcctgggagcggattgacaagaaagtggaaggcctgagcaagcacatcaagctggaagaggaacggagaagcgaggacgcccagagcaaggccgccctgaccgactggctgcgggctaaggccagcttcgtgatcgagggcctgaaggaggccgacaaggacgagttctgcagatgcgagctgaagctgcagaagtggtacggggacctgcggggaaagcccttcgccatcgaagccgagaacagcatcctggacatcagcggcttcagcaagcagtacaactgtgccttcatctggcagaaggacggcgtgaagaagctgaacctgtacctgatcatcaactacttcaagggcggcaagctgcggttcaagaagatcaaacctgaagccttcgaagccaacagattctacaccgtgatcaacaaaaagagcggcgagatcgtgcccatggaggtgaacttcaacttcgacgaccccaacctgatcatcctgcctctggcctttggcaagagacagggcagagaattcatctggaacgacctgctgtccctggaaaccggcagcctgaagctggccaacggaagagtgatcgagaagacactgtacaacagaagaacccggcaggatgagcctgccctgttcgtggccctgaccttcgagcggcgggaggtcctggactcctccaatatcaaaccaatgaacctgatcggcgtggcaagaggcgaaaacatccccgccgtgatcgccctgaccgaccccgagggctgcccactgagccggtttaaggatagcctgggaaacccaacccacatcctgagaatcggcgagagctataaggagaagcagcggaccatccaggccaagaaggaggtggagcagcggagagccggcggctacagccggaagtacgccagcaaagccaagaatctggcagacgatatggtgagaaacaccgctagagatctgctgtactacgccgtgacccaggatgccatgctgatcttcgccaacctgagccggggcttcggccggcagggcaagcggaccttcatggccgagagacagtacacacggatggaggactggctgaccgccaagctggcctacgagggcctgagcaagacctacctgtccaagacactggcccagtacacctccaagacatgcagcaactgtgggtttaccatcaccagcgccgactacgacagggtgctggagaagctgaagaagacagcaacaggctggatgaccacaattaacggcaaggagctgaaggtggagggccagattacctactacaacagatacaagagacagaacgtagtcaaggacctgtccgtcgagctggatagactgagcgaagaatctgtgaacaacgacatctcctcctggacaaagggcagaagcggagaagctctgagcctcctgaagaaaagattctcccatagacccgtgcaggagaagttcgtgtgcctgaactgcggcttcgagacacacgcagccgagcaagccgccctgaacatcgccagatcctggctgttcctgcggagccaggagtacaagaaataccagacaaacaagacaaccggcaacaccgataagagagccttcgtcgagacctggcagtccttttaccggaagaagcttaaggaggtgtggaaacctgccgtgcggtctggcggatctggcggaggctccacaagcagcgtgaccttcagggacgtgatcgtggacttcacccaggaggagtgggagcagctgaagcccgtgcagaaggacctgtacagggacgtgatgatggagaactactggaacctggtgagcctggacctggagaccgagggcgacatgaacgaccccgaccccgagaaggacagctgggaggacaggcccagcgtgaccagcagcatgcccgccccccccaggctggagggccccaggggcgccaccagccccaagaaaaagagaaaagtctaagctgccttctgcggggcttgccttctggccatgcccttcttctctcccttgcacctgtacctcttggtctttgaataaagcctgagtaggaaggctagcaaaaaaaaaaaaaaaaaaaaaaaaaaaaaaaaaaaaaaaaaaaaaaaaaaaaaaaaaaaaaaaaaaaaaaaaaaaaaaaa

SEQ ID NO: 2892 - RNA, 5419 nt, synthetic construct
  source 1..5419: mol_type = other RNA
aggaaataagagagaaaagaagagtaagaagaaatataagagccaccatggcccctaagaagaagcgtaaagtgagccgggtgaacggcagcggcagcggcggcggcatgaaccacgaccaggagttcgacccccctaaggtgtaccctcccgtccccgccgagaagagaaagcccatccgggtcctgagcctgttcgatggcatcgccaccggtctgctggtgctgaaggacctgggcatccaggtggataggtacattgcctccgaggtgtgcgaggactccatcaccgtgggaatggtgcgtcatcagggcaagatcatgtacgtgggcgacgtgcggagcgtgacacagaagcatatccaggagtggggccctttcgacctggtgatcggcggcagcccttgcaatgacctgagcatcgtgaacccagcccggaagggcctgtacgagggaaccggcagactgttcttcgagttttacagactgctgcacgacgcccggcctaaggaaggcgacgaccggcccttcttttggctgttcgagaatgtggtggccatgggagtcagcgacaagcgggatattagccggttcctggagagcaaccccgtgatgatcgatgccaaggaagtgagcgccgcccaccgggccagatacttctggggcaatctgcctggcatgaacagacccctggccagcaccgtgaacgacaagctggagctgcaggagtgcctggagcacggccggatcgccaagttcagcaaggtgagaaccatcaccacccgaagcaacagcatcaaacaaggcaaggaccagcactttcctgtgttcatgaacgagaaggaggacatcctgtggtgtaccgagatggagagagtgttcgggttcccagtccactacacagatgtcagcaacatgtctagactggccagacagagactgctgggaagaagctggtccgtccctgtgatcagacacctgttcgcccctctgaaggagtacttcgcctgcgtgagcagcggcaacagcaacgccaacagccggggccccagcttctctagcggcctggtgccactgtccctgagagggagccacatgggccccatggagatctacaaaaccgtgagcgcctggaagcggcagcctgtgcgcgtgctgagcctgtttcggaatatcgataaagtcctgaaaagcctgggattcctggagagcggctctggctccggcggtggcaccctgaagtacgtggaggatgtgacaaacgtggtcagacgggatgtggagaagtggggccccttcgatctggtgtacggcagcacccaacccctgggcagctcttgtgaccggtgccctggctggtacatgtttcagttccaccggatcctgcagtacgccctgccgagacaggagtcccagcggccattcttttggattttcatggacaacttgctgctgaccgaggatgaccaggaaactaccactcggttcctgcagaccgaagccgtgaccctgcaggacgtgagaggccgggactaccagaacgccatgcgggtgtggtccaacatccctggactgaaaagcaagcacgcacctctgacccctaaagaagaggagtacctgcaggcccaggtgcggagcagaagcaagctggacgcccctaaggtggatctgctggtgaagaattgcctcctgcccctgagagagtacttcaagtatttcagccagaatagtctgcccctgggcggcccaagcagcggcgcccctcctcccagcggcggcagcccagccggctccccaacctctaccgaggagggcacctctgagtccgccacccccgagagcggccctggcacctccaccgagcccagcgagggcagcgcacccggcagccctgccggcagccccacctccacagaggagggaaccagcaccgagcccagcgaaggcagcgccccaggcaccagcaccgagcctagtgagggcggctctggcggcggcagcgcccaggagattaaacggatcaacaagatcagaagaagacttgtgaaagacagcaacaccaagaaggccggcaagacaggccccatgaaaaccctgctggttagagtgatgacacccgatctgagagagcggctggaaaacctgagaaagaagcctgaaaatatcccccagcccatcagcaatacatctagagccaacctgaataagctgctgaccgattacaccgaaatgaagaaggcgatcctgcatgtgtactgggaagagttccagaaggaccctgtgggcctgatgagccgggtggcccagcctgccagcaagaagatcgatcagaacaagctgaaacctgagatggacgagaagggcaacctgaccaccgccggctttgcctgctctcagtgtggccagcccctgttcgtgtacaagctggagcaggtgtctgagaagggcaaggcttacaccaactacttcggacggtgcaatgtggccgagcacgaaaagctgatcctgctggcccagctgaagcccgagaaggatagcgacgaagccgtgacatatagcctgggaaagtttgggcagagggccctggatttctacagcattcatgtgaccaaggagtccacccaccccgtgaagcccctggcccagatcgccggaaacagatacgcctccggacctgtgggaaaggccctgagcgacgcatgtatgggcacaatcgcctccttcctgtctaagtaccaggacatcatcatcgaacaccagaaggtggtgaagggcaaccagaagagactggagagcctgcgggagctggccggcaaggaaaacctggaataccctagcgtgaccctgccacctcagcctcacaccaaggagggcgttgatgcctacaacgaagtgatcgcccgggtgcgaatgtgggtgaacctgaacctgtggcagaagctgaagctaagcagagatgatgccaagcctctgctgagactgaagggattcccttcctttcctctggtcgagagacaggccaacgaagtggactggtgggacatggtgtgtaacgtgaagaagctgatcaacgagaaaaaggaggatggcaaggtgttttggcagaatctggctggctacaagagacaggaagccctgagaccatacctgagcagcgaggaagatcggaagaagggaaagaaattcgctcggtaccagctgggcgacctgctgctgcacctggaaaagaagcacggcgaggactggggaaaggtgtacgacgaggcctgggagcggattgacaagaaagtggaaggcctgagcaagcacatcaagctggaagaggaacggagaagcgaggacgcccagagcaaggccgccctgaccgactggctgcgggctaaggccagcttcgtgatcgagggcctgaaggaggccgacaaggacgagttctgcagatgcgagctgaagctgcagaagtggtacggggacctgcggggaaagcccttcgccatcgaagccgagaacagcatcctggacatcagcggcttcagcaagcagtacaactgtgccttcatctggcagaaggacggcgtgaagaagctgaacctgtacctgatcatcaactacttcaagggcggcaagctgcggttcaagaagatcaaacctgaagccttcgaagccaacagattctacaccgtgatcaacaaaaagagcggcgagatcgtgcccatggaggtgaacttcaacttcgacgaccccaacctgatcatcctgcctctggcctttggcaagagacagggcagagaattcatctggaacgacctgctgtccctggaaaccggcagcctgaagctggccaacggaagagtgatcgagaagacactgtacaacagaagaacccggcaggatgagcctgccctgttcgtggccctgaccttcgagcggcgggaggtcctggactcctccaatatcaaaccaatgaacctgatcggcgtggcaagaggcgaaaacatccccgccgtgatcgccctgaccgaccccgagggctgcccactgagccggtttaaggatagcctgggaaacccaacccacatcctgagaatcggcgagagctataaggagaagcagcggaccatccaggccaagaaggaggtggagcagcggagagccggcggctacagccggaagtacgccagcaaagccaagaatctggcagacgatatggtgagaaacaccgctagagatctgctgtactacgccgtgacccaggatgccatgctgatcttcgccaacctgagccggggcttcggccggcagggcaagcggaccttcatggccgagagacagtacacacggatggaggactggctgaccgccaagctggcctacgagggcctgagcaagacctacctgtccaagacactggcccagtacacctccaagacatgcagcaactgtgggtttaccatcaccagcgccgactacgacagggtgctggagaagctgaagaagacagcaacaggctggatgaccacaattaacggcaaggagctgaaggtggagggccagattacctactacaacagatacaagagacagaacgtagtcaaggacctgtccgtcgagctggatagactgagcgaagaatctgtgaacaacgacatctcctcctggacaaagggcagaagcggagaagctctgagcctcctgaagaaaagattctcccatagacccgtgcaggagaagttcgtgtgcctgaactgcggcttcgagacacacgcagccgagcaagccgccctgaacatcgccagatcctggctgttcctgcggagccaggagtacaagaaataccagacaaacaagacaaccggcaacaccgataagagagccttcgtcgagacctggcagtccttttaccggaagaagcttaaggaggtgtggaaacctgccgtgcggtctggcggatctggcggaggctccacaagccccgcccaggtgctggtgaccttcaaggacgtggccgtggacttcacccaggaggagtggaggctgctggacccccaccagaaggagctgtacaaggaggtgaccctggagaacgcctggaacatgctgagcatgggcctgcccgtgcccagggacctggtgagccacttcaagcaggtggaggccccctggatgctggaggaggagggcagcagcaacagctgcctggacggcgagaggaggaccagccccaagaaaaagagaaaagtctaagctgccttctgcggggcttgccttctggccatgcccttcttctctcccttgcacctgtacctcttggtctttgaataaagcctgagtaggaaggctagcaaaaaaaaaaaaaaaaaaaaaaaaaaaaaaaaaaaaaaaaaaaaaaaaaaaaaaaaaaaaaaaaaaaaaaaaaaaaaaaa

SEQ ID NO: 2893 - RNA, 5419 nt, synthetic construct
  source 1..5419: mol_type = other RNA
aggaaataagagagaaaagaagagtaagaagaaatataagagccaccatggcccctaagaagaagcgtaaagtgagccgggtgaacggcagcggcagcggcggcggcatgaaccacgaccaggagttcgacccccctaaggtgtaccctcccgtccccgccgagaagagaaagcccatccgggtcctgagcctgttcgatggcatcgccaccggtctgctggtgctgaaggacctgggcatccaggtggataggtacattgcctccgaggtgtgcgaggactccatcaccgtgggaatggtgcgtcatcagggcaagatcatgtacgtgggcgacgtgcggagcgtgacacagaagcatatccaggagtggggccctttcgacctggtgatcggcggcagcccttgcaatgacctgagcatcgtgaacccagcccggaagggcctgtacgagggaaccggcagactgttcttcgagttttacagactgctgcacgacgcccggcctaaggaaggcgacgaccggcccttcttttggctgttcgagaatgtggtggccatgggagtcagcgacaagcgggatattagccggttcctggagagcaaccccgtgatgatcgatgccaaggaagtgagcgccgcccaccgggccagatacttctggggcaatctgcctggcatgaacagacccctggccagcaccgtgaacgacaagctggagctgcaggagtgcctggagcacggccggatcgccaagttcagcaaggtgagaaccatcaccacccgaagcaacagcatcaaacaaggcaaggaccagcactttcctgtgttcatgaacgagaaggaggacatcctgtggtgtaccgagatggagagagtgttcgggttcccagtccactacacagatgtcagcaacatgtctagactggccagacagagactgctgggaagaagctggtccgtccctgtgatcagacacctgttcgcccctctgaaggagtacttcgcctgcgtgagcagcggcaacagcaacgccaacagccggggccccagcttctctagcggcctggtgccactgtccctgagagggagccacatgggccccatggagatctacaaaaccgtgagcgcctggaagcggcagcctgtgcgcgtgctgagcctgtttcggaatatcgataaagtcctgaaaagcctgggattcctggagagcggctctggctccggcggtggcaccctgaagtacgtggaggatgtgacaaacgtggtcagacgggatgtggagaagtggggccccttcgatctggtgtacggcagcacccaacccctgggcagctcttgtgaccggtgccctggctggtacatgtttcagttccaccggatcctgcagtacgccctgccgagacaggagtcccagcggccattcttttggattttcatggacaacttgctgctgaccgaggatgaccaggaaactaccactcggttcctgcagaccgaagccgtgaccctgcaggacgtgagaggccgggactaccagaacgccatgcgggtgtggtccaacatccctggactgaaaagcaagcacgcacctctgacccctaaagaagaggagtacctgcaggcccaggtgcggagcagaagcaagctggacgcccctaaggtggatctgctggtgaagaattgcctcctgcccctgagagagtacttcaagtatttcagccagaatagtctgcccctgggcggcccaagcagcggcgcccctcctcccagcggcggcagcccagccggctccccaacctctaccgaggagggcacctctgagtccgccacccccgagagcggccctggcacctccaccgagcccagcgagggcagcgcacccggcagccctgccggcagccccacctccacagaggagggaaccagcaccgagcccagcgaaggcagcgccccaggcaccagcaccgagcctagtgagggcggctctggcggcggcagcgcccaggagattaaacggatcaacaagatcagaagaagacttgtgaaagacagcaacaccaagaaggccggcaagacaggccccatgaaaaccctgctggttagagtgatgacacccgatctgagagagcggctggaaaacctgagaaagaagcctgaaaatatcccccagcccatcagcaatacatctagagccaacctgaataagctgctgaccgattacaccgaaatgaagaaggcgatcctgcatgtgtactgggaagagttccagaaggaccctgtgggcctgatgagccgggtggcccagcctgccagcaagaagatcgatcagaacaagctgaaacctgagatggacgagaagggcaacctgaccaccgccggctttgcctgctctcagtgtggccagcccctgttcgtgtacaagctggagcaggtgtctgagaagggcaaggcttacaccaactacttcggacggtgcaatgtggccgagcacgaaaagctgatcctgctggcccagctgaagcccgagaaggatagcgacgaagccgtgacatatagcctgggaaagtttgggcagagggccctggatttctacagcattcatgtgaccaaggagtccacccaccccgtgaagcccctggcccagatcgccggaaacagatacgcctccggacctgtgggaaaggccctgagcgacgcatgtatgggcacaatcgcctccttcctgtctaagtaccaggacatcatcatcgaacaccagaaggtggtgaagggcaaccagaagagactggagagcctgcgggagctggccggcaaggaaaacctggaataccctagcgtgaccctgccacctcagcctcacaccaaggagggcgttgatgcctacaacgaagtgatcgcccgggtgcgaatgtgggtgaacctgaacctgtggcagaagctgaagctaagcagagatgatgccaagcctctgctgagactgaagggattcccttcctttcctctggtcgagagacaggccaacgaagtggactggtgggacatggtgtgtaacgtgaagaagctgatcaacgagaaaaaggaggatggcaaggtgttttggcagaatctggctggctacaagagacaggaagccctgagaccatacctgagcagcgaggaagatcggaagaagggaaagaaattcgctcggtaccagctgggcgacctgctgctgcacctggaaaagaagcacggcgaggactggggaaaggtgtacgacgaggcctgggagcggattgacaagaaagtggaaggcctgagcaagcacatcaagctggaagaggaacggagaagcgaggacgcccagagcaaggccgccctgaccgactggctgcgggctaaggccagcttcgtgatcgagggcctgaaggaggccgacaaggacgagttctgcagatgcgagctgaagctgcagaagtggtacggggacctgcggggaaagcccttcgccatcgaagccgagaacagcatcctggacatcagcggcttcagcaagcagtacaactgtgccttcatctggcagaaggacggcgtgaagaagctgaacctgtacctgatcatcaactacttcaagggcggcaagctgcggttcaagaagatcaaacctgaagccttcgaagccaacagattctacaccgtgatcaacaaaaagagcggcgagatcgtgcccatggaggtgaacttcaacttcgacgaccccaacctgatcatcctgcctctggcctttggcaagagacagggcagagaattcatctggaacgacctgctgtccctggaaaccggcagcctgaagctggccaacggaagagtgatcgagaagacactgtacaacagaagaacccggcaggatgagcctgccctgttcgtggccctgaccttcgagcggcgggaggtcctggactcctccaatatcaaaccaatgaacctgatcggcgtggcaagaggcgaaaacatccccgccgtgatcgccctgaccgaccccgagggctgcccactgagccggtttaaggatagcctgggaaacccaacccacatcctgagaatcggcgagagctataaggagaagcagcggaccatccaggccaagaaggaggtggagcagcggagagccggcggctacagccggaagtacgccagcaaagccaagaatctggcagacgatatggtgagaaacaccgctagagatctgctgtactacgccgtgacccaggatgccatgctgatcttcgccaacctgagccggggcttcggccggcagggcaagcggaccttcatggccgagagacagtacacacggatggaggactggctgaccgccaagctggcctacgagggcctgagcaagacctacctgtccaagacactggcccagtacacctccaagacatgcagcaactgtgggtttaccatcaccagcgccgactacgacagggtgctggagaagctgaagaagacagcaacaggctggatgaccacaattaacggcaaggagctgaaggtggagggccagattacctactacaacagatacaagagacagaacgtagtcaaggacctgtccgtcgagctggatagactgagcgaagaatctgtgaacaacgacatctcctcctggacaaagggcagaagcggagaagctctgagcctcctgaagaaaagattctcccatagacccgtgcaggagaagttcgtgtgcctgaactgcggcttcgagacacacgcagccgagcaagccgccctgaacatcgccagatcctggctgttcctgcggagccaggagtacaagaaataccagacaaacaagacaaccggcaacaccgataagagagccttcgtcgagacctggcagtccttttaccggaagaagcttaaggaggtgtggaaacctgccgtgcggtctggcggatctggcggaggctccacaagcagcctggccctggtgaccttcaaggacgtgctggtgaacttcaccagggaggagtggaagctgctggacgccgcccagcaggtgatgtacagggacgtgatgctggagaactacaggaacctggtgagcctgggccacaggctgcccaagcccgacgtgatcctgcagctggagaagggcgaggagccctggctggtggagaggggcacccaccaggacgcccaccccgactgggacaccgccaccagccccaagaaaaagagaaaagtctaagctgccttctgcggggcttgccttctggccatgcccttcttctctcccttgcacctgtacctcttggtctttgaataaagcctgagtaggaaggctagcaaaaaaaaaaaaaaaaaaaaaaaaaaaaaaaaaaaaaaaaaaaaaaaaaaaaaaaaaaaaaaaaaaaaaaaaaaaaaaaa

SEQ ID NO: 2894 - RNA, 5419 nt, synthetic construct
  source 1..5419: mol_type = other RNA
aggaaataagagagaaaagaagagtaagaagaaatataagagccaccatggcccctaagaagaagcgtaaagtgagccgggtgaacggcagcggcagcggcggcggcatgaaccacgaccaggagttcgacccccctaaggtgtaccctcccgtccccgccgagaagagaaagcccatccgggtcctgagcctgttcgatggcatcgccaccggtctgctggtgctgaaggacctgggcatccaggtggataggtacattgcctccgaggtgtgcgaggactccatcaccgtgggaatggtgcgtcatcagggcaagatcatgtacgtgggcgacgtgcggagcgtgacacagaagcatatccaggagtggggccctttcgacctggtgatcggcggcagcccttgcaatgacctgagcatcgtgaacccagcccggaagggcctgtacgagggaaccggcagactgttcttcgagttttacagactgctgcacgacgcccggcctaaggaaggcgacgaccggcccttcttttggctgttcgagaatgtggtggccatgggagtcagcgacaagcgggatattagccggttcctggagagcaaccccgtgatgatcgatgccaaggaagtgagcgccgcccaccgggccagatacttctggggcaatctgcctggcatgaacagacccctggccagcaccgtgaacgacaagctggagctgcaggagtgcctggagcacggccggatcgccaagttcagcaaggtgagaaccatcaccacccgaagcaacagcatcaaacaaggcaaggaccagcactttcctgtgttcatgaacgagaaggaggacatcctgtggtgtaccgagatggagagagtgttcgggttcccagtccactacacagatgtcagcaacatgtctagactggccagacagagactgctgggaagaagctggtccgtccctgtgatcagacacctgttcgcccctctgaaggagtacttcgcctgcgtgagcagcggcaacagcaacgccaacagccggggccccagcttctctagcggcctggtgccactgtccctgagagggagccacatgggccccatggagatctacaaaaccgtgagcgcctggaagcggcagcctgtgcgcgtgctgagcctgtttcggaatatcgataaagtcctgaaaagcctgggattcctggagagcggctctggctccggcggtggcaccctgaagtacgtggaggatgtgacaaacgtggtcagacgggatgtggagaagtggggccccttcgatctggtgtacggcagcacccaacccctgggcagctcttgtgaccggtgccctggctggtacatgtttcagttccaccggatcctgcagtacgccctgccgagacaggagtcccagcggccattcttttggattttcatggacaacttgctgctgaccgaggatgaccaggaaactaccactcggttcctgcagaccgaagccgtgaccctgcaggacgtgagaggccgggactaccagaacgccatgcgggtgtggtccaacatccctggactgaaaagcaagcacgcacctctgacccctaaagaagaggagtacctgcaggcccaggtgcggagcagaagcaagctggacgcccctaaggtggatctgctggtgaagaattgcctcctgcccctgagagagtacttcaagtatttcagccagaatagtctgcccctgggcggcccaagcagcggcgcccctcctcccagcggcggcagcccagccggctccccaacctctaccgaggagggcacctctgagtccgccacccccgagagcggccctggcacctccaccgagcccagcgagggcagcgcacccggcagccctgccggcagccccacctccacagaggagggaaccagcaccgagcccagcgaaggcagcgccccaggcaccagcaccgagcctagtgagggcggctctggcggcggcagcgcccaggagattaaacggatcaacaagatcagaagaagacttgtgaaagacagcaacaccaagaaggccggcaagacaggccccatgaaaaccctgctggttagagtgatgacacccgatctgagagagcggctggaaaacctgagaaagaagcctgaaaatatcccccagcccatcagcaatacatctagagccaacctgaataagctgctgaccgattacaccgaaatgaagaaggcgatcctgcatgtgtactgggaagagttccagaaggaccctgtgggcctgatgagccgggtggcccagcctgccagcaagaagatcgatcagaacaagctgaaacctgagatggacgagaagggcaacctgaccaccgccggctttgcctgctctcagtgtggccagcccctgttcgtgtacaagctggagcaggtgtctgagaagggcaaggcttacaccaactacttcggacggtgcaatgtggccgagcacgaaaagctgatcctgctggcccagctgaagcccgagaaggatagcgacgaagccgtgacatatagcctgggaaagtttgggcagagggccctggatttctacagcattcatgtgaccaaggagtccacccaccccgtgaagcccctggcccagatcgccggaaacagatacgcctccggacctgtgggaaaggccctgagcgacgcatgtatgggcacaatcgcctccttcctgtctaagtaccaggacatcatcatcgaacaccagaaggtggtgaagggcaaccagaagagactggagagcctgcgggagctggccggcaaggaaaacctggaataccctagcgtgaccctgccacctcagcctcacaccaaggagggcgttgatgcctacaacgaagtgatcgcccgggtgcgaatgtgggtgaacctgaacctgtggcagaagctgaagctaagcagagatgatgccaagcctctgctgagactgaagggattcccttcctttcctctggtcgagagacaggccaacgaagtggactggtgggacatggtgtgtaacgtgaagaagctgatcaacgagaaaaaggaggatggcaaggtgttttggcagaatctggctggctacaagagacaggaagccctgagaccatacctgagcagcgaggaagatcggaagaagggaaagaaattcgctcggtaccagctgggcgacctgctgctgcacctggaaaagaagcacggcgaggactggggaaaggtgtacgacgaggcctgggagcggattgacaagaaagtggaaggcctgagcaagcacatcaagctggaagaggaacggagaagcgaggacgcccagagcaaggccgccctgaccgactggctgcgggctaaggccagcttcgtgatcgagggcctgaaggaggccgacaaggacgagttctgcagatgcgagctgaagctgcagaagtggtacggggacctgcggggaaagcccttcgccatcgaagccgagaacagcatcctggacatcagcggcttcagcaagcagtacaactgtgccttcatctggcagaaggacggcgtgaagaagctgaacctgtacctgatcatcaactacttcaagggcggcaagctgcggttcaagaagatcaaacctgaagccttcgaagccaacagattctacaccgtgatcaacaaaaagagcggcgagatcgtgcccatggaggtgaacttcaacttcgacgaccccaacctgatcatcctgcctctggcctttggcaagagacagggcagagaattcatctggaacgacctgctgtccctggaaaccggcagcctgaagctggccaacggaagagtgatcgagaagacactgtacaacagaagaacccggcaggatgagcctgccctgttcgtggccctgaccttcgagcggcgggaggtcctggactcctccaatatcaaaccaatgaacctgatcggcgtggcaagaggcgaaaacatccccgccgtgatcgccctgaccgaccccgagggctgcccactgagccggtttaaggatagcctgggaaacccaacccacatcctgagaatcggcgagagctataaggagaagcagcggaccatccaggccaagaaggaggtggagcagcggagagccggcggctacagccggaagtacgccagcaaagccaagaatctggcagacgatatggtgagaaacaccgctagagatctgctgtactacgccgtgacccaggatgccatgctgatcttcgccaacctgagccggggcttcggccggcagggcaagcggaccttcatggccgagagacagtacacacggatggaggactggctgaccgccaagctggcctacgagggcctgagcaagacctacctgtccaagacactggcccagtacacctccaagacatgcagcaactgtgggtttaccatcaccagcgccgactacgacagggtgctggagaagctgaagaagacagcaacaggctggatgaccacaattaacggcaaggagctgaaggtggagggccagattacctactacaacagatacaagagacagaacgtagtcaaggacctgtccgtcgagctggatagactgagcgaagaatctgtgaacaacgacatctcctcctggacaaagggcagaagcggagaagctctgagcctcctgaagaaaagattctcccatagacccgtgcaggagaagttcgtgtgcctgaactgcggcttcgagacacacgcagccgagcaagccgccctgaacatcgccagatcctggctgttcctgcggagccaggagtacaagaaataccagacaaacaagacaaccggcaacaccgataagagagccttcgtcgagacctggcagtccttttaccggaagaagcttaaggaggtgtggaaacctgccgtgcggtctggcggatctggcggaggctccacaagcagccaggccagcgtgagcttcaaggacgtgaccgtggagttcacccaggacgagtggaggctgatgagcagcgcccagaggaccctgtacagggaggtgatgctggagaactacagccacctgatcagcatgggctactgcagcaccaagcccgagctgatcttcgccctggagcagaaggacttcagggagagcatcctggagagggagagcctgagcaccatcccccccgaggacttccagaccagccccaagaaaaagagaaaagtctaagctgccttctgcggggcttgccttctggccatgcccttcttctctcccttgcacctgtacctcttggtctttgaataaagcctgagtaggaaggctagcaaaaaaaaaaaaaaaaaaaaaaaaaaaaaaaaaaaaaaaaaaaaaaaaaaaaaaaaaaaaaaaaaaaaaaaaaaaaaaaa

SEQ ID NO: 2895 - RNA, 5419 nt, synthetic construct
  source 1..5419: mol_type = other RNA
aggaaataagagagaaaagaagagtaagaagaaatataagagccaccatggcccctaagaagaagcgtaaagtgagccgggtgaacggcagcggcagcggcggcggcatgaaccacgaccaggagttcgacccccctaaggtgtaccctcccgtccccgccgagaagagaaagcccatccgggtcctgagcctgttcgatggcatcgccaccggtctgctggtgctgaaggacctgggcatccaggtggataggtacattgcctccgaggtgtgcgaggactccatcaccgtgggaatggtgcgtcatcagggcaagatcatgtacgtgggcgacgtgcggagcgtgacacagaagcatatccaggagtggggccctttcgacctggtgatcggcggcagcccttgcaatgacctgagcatcgtgaacccagcccggaagggcctgtacgagggaaccggcagactgttcttcgagttttacagactgctgcacgacgcccggcctaaggaaggcgacgaccggcccttcttttggctgttcgagaatgtggtggccatgggagtcagcgacaagcgggatattagccggttcctggagagcaaccccgtgatgatcgatgccaaggaagtgagcgccgcccaccgggccagatacttctggggcaatctgcctggcatgaacagacccctggccagcaccgtgaacgacaagctggagctgcaggagtgcctggagcacggccggatcgccaagttcagcaaggtgagaaccatcaccacccgaagcaacagcatcaaacaaggcaaggaccagcactttcctgtgttcatgaacgagaaggaggacatcctgtggtgtaccgagatggagagagtgttcgggttcccagtccactacacagatgtcagcaacatgtctagactggccagacagagactgctgggaagaagctggtccgtccctgtgatcagacacctgttcgcccctctgaaggagtacttcgcctgcgtgagcagcggcaacagcaacgccaacagccggggccccagcttctctagcggcctggtgccactgtccctgagagggagccacatgggccccatggagatctacaaaaccgtgagcgcctggaagcggcagcctgtgcgcgtgctgagcctgtttcggaatatcgataaagtcctgaaaagcctgggattcctggagagcggctctggctccggcggtggcaccctgaagtacgtggaggatgtgacaaacgtggtcagacgggatgtggagaagtggggccccttcgatctggtgtacggcagcacccaacccctgggcagctcttgtgaccggtgccctggctggtacatgtttcagttccaccggatcctgcagtacgccctgccgagacaggagtcccagcggccattcttttggattttcatggacaacttgctgctgaccgaggatgaccaggaaactaccactcggttcctgcagaccgaagccgtgaccctgcaggacgtgagaggccgggactaccagaacgccatgcgggtgtggtccaacatccctggactgaaaagcaagcacgcacctctgacccctaaagaagaggagtacctgcaggcccaggtgcggagcagaagcaagctggacgcccctaaggtggatctgctggtgaagaattgcctcctgcccctgagagagtacttcaagtatttcagccagaatagtctgcccctgggcggcccaagcagcggcgcccctcctcccagcggcggcagcccagccggctccccaacctctaccgaggagggcacctctgagtccgccacccccgagagcggccctggcacctccaccgagcccagcgagggcagcgcacccggcagccctgccggcagccccacctccacagaggagggaaccagcaccgagcccagcgaaggcagcgccccaggcaccagcaccgagcctagtgagggcggctctggcggcggcagcgcccaggagattaaacggatcaacaagatcagaagaagacttgtgaaagacagcaacaccaagaaggccggcaagacaggccccatgaaaaccctgctggttagagtgatgacacccgatctgagagagcggctggaaaacctgagaaagaagcctgaaaatatcccccagcccatcagcaatacatctagagccaacctgaataagctgctgaccgattacaccgaaatgaagaaggcgatcctgcatgtgtactgggaagagttccagaaggaccctgtgggcctgatgagccgggtggcccagcctgccagcaagaagatcgatcagaacaagctgaaacctgagatggacgagaagggcaacctgaccaccgccggctttgcctgctctcagtgtggccagcccctgttcgtgtacaagctggagcaggtgtctgagaagggcaaggcttacaccaactacttcggacggtgcaatgtggccgagcacgaaaagctgatcctgctggcccagctgaagcccgagaaggatagcgacgaagccgtgacatatagcctgggaaagtttgggcagagggccctggatttctacagcattcatgtgaccaaggagtccacccaccccgtgaagcccctggcccagatcgccggaaacagatacgcctccggacctgtgggaaaggccctgagcgacgcatgtatgggcacaatcgcctccttcctgtctaagtaccaggacatcatcatcgaacaccagaaggtggtgaagggcaaccagaagagactggagagcctgcgggagctggccggcaaggaaaacctggaataccctagcgtgaccctgccacctcagcctcacaccaaggagggcgttgatgcctacaacgaagtgatcgcccgggtgcgaatgtgggtgaacctgaacctgtggcagaagctgaagctaagcagagatgatgccaagcctctgctgagactgaagggattcccttcctttcctctggtcgagagacaggccaacgaagtggactggtgggacatggtgtgtaacgtgaagaagctgatcaacgagaaaaaggaggatggcaaggtgttttggcagaatctggctggctacaagagacaggaagccctgagaccatacctgagcagcgaggaagatcggaagaagggaaagaaattcgctcggtaccagctgggcgacctgctgctgcacctggaaaagaagcacggcgaggactggggaaaggtgtacgacgaggcctgggagcggattgacaagaaagtggaaggcctgagcaagcacatcaagctggaagaggaacggagaagcgaggacgcccagagcaaggccgccctgaccgactggctgcgggctaaggccagcttcgtgatcgagggcctgaaggaggccgacaaggacgagttctgcagatgcgagctgaagctgcagaagtggtacggggacctgcggggaaagcccttcgccatcgaagccgagaacagcatcctggacatcagcggcttcagcaagcagtacaactgtgccttcatctggcagaaggacggcgtgaagaagctgaacctgtacctgatcatcaactacttcaagggcggcaagctgcggttcaagaagatcaaacctgaagccttcgaagccaacagattctacaccgtgatcaacaaaaagagcggcgagatcgtgcccatggaggtgaacttcaacttcgacgaccccaacctgatcatcctgcctctggcctttggcaagagacagggcagagaattcatctggaacgacctgctgtccctggaaaccggcagcctgaagctggccaacggaagagtgatcgagaagacactgtacaacagaagaacccggcaggatgagcctgccctgttcgtggccctgaccttcgagcggcgggaggtcctggactcctccaatatcaaaccaatgaacctgatcggcgtggcaagaggcgaaaacatccccgccgtgatcgccctgaccgaccccgagggctgcccactgagccggtttaaggatagcctgggaaacccaacccacatcctgagaatcggcgagagctataaggagaagcagcggaccatccaggccaagaaggaggtggagcagcggagagccggcggctacagccggaagtacgccagcaaagccaagaatctggcagacgatatggtgagaaacaccgctagagatctgctgtactacgccgtgacccaggatgccatgctgatcttcgccaacctgagccggggcttcggccggcagggcaagcggaccttcatggccgagagacagtacacacggatggaggactggctgaccgccaagctggcctacgagggcctgagcaagacctacctgtccaagacactggcccagtacacctccaagacatgcagcaactgtgggtttaccatcaccagcgccgactacgacagggtgctggagaagctgaagaagacagcaacaggctggatgaccacaattaacggcaaggagctgaaggtggagggccagattacctactacaacagatacaagagacagaacgtagtcaaggacctgtccgtcgagctggatagactgagcgaagaatctgtgaacaacgacatctcctcctggacaaagggcagaagcggagaagctctgagcctcctgaagaaaagattctcccatagacccgtgcaggagaagttcgtgtgcctgaactgcggcttcgagacacacgcagccgagcaagccgccctgaacatcgccagatcctggctgttcctgcggagccaggagtacaagaaataccagacaaacaagacaaccggcaacaccgataagagagccttcgtcgagacctggcagtccttttaccggaagaagcttaaggaggtgtggaaacctgccgtgcggtctggcggatctggcggaggctccacaagcagcctgggcagcgagctgttcagggacgtggccatcgtgttcagccaggaggagtggcagtggctggcccccgcccagagggacctgtacagggacgtgatgctggagacctacagcaacctggtgagcctgggcctggccatcagcaagcccgacgtgatcagcttcctggagcagggcagggagccctggatggtggagagggtggtggccggcggcctgtgccccgtgctggagagcaggaccagccccaagaaaaagagaaaagtctaagctgccttctgcggggcttgccttctggccatgcccttcttctctcccttgcacctgtacctcttggtctttgaataaagcctgagtaggaaggctagcaaaaaaaaaaaaaaaaaaaaaaaaaaaaaaaaaaaaaaaaaaaaaaaaaaaaaaaaaaaaaaaaaaaaaaaaaaaaaaaa

SEQ ID NO: 2896 - RNA, 5419 nt, synthetic construct
  source 1..5419: mol_type = other RNA
aggaaataagagagaaaagaagagtaagaagaaatataagagccaccatggcccctaagaagaagcgtaaagtgagccgggtgaacggcagcggcagcggcggcggcatgaaccacgaccaggagttcgacccccctaaggtgtaccctcccgtccccgccgagaagagaaagcccatccgggtcctgagcctgttcgatggcatcgccaccggtctgctggtgctgaaggacctgggcatccaggtggataggtacattgcctccgaggtgtgcgaggactccatcaccgtgggaatggtgcgtcatcagggcaagatcatgtacgtgggcgacgtgcggagcgtgacacagaagcatatccaggagtggggccctttcgacctggtgatcggcggcagcccttgcaatgacctgagcatcgtgaacccagcccggaagggcctgtacgagggaaccggcagactgttcttcgagttttacagactgctgcacgacgcccggcctaaggaaggcgacgaccggcccttcttttggctgttcgagaatgtggtggccatgggagtcagcgacaagcgggatattagccggttcctggagagcaaccccgtgatgatcgatgccaaggaagtgagcgccgcccaccgggccagatacttctggggcaatctgcctggcatgaacagacccctggccagcaccgtgaacgacaagctggagctgcaggagtgcctggagcacggccggatcgccaagttcagcaaggtgagaaccatcaccacccgaagcaacagcatcaaacaaggcaaggaccagcactttcctgtgttcatgaacgagaaggaggacatcctgtggtgtaccgagatggagagagtgttcgggttcccagtccactacacagatgtcagcaacatgtctagactggccagacagagactgctgggaagaagctggtccgtccctgtgatcagacacctgttcgcccctctgaaggagtacttcgcctgcgtgagcagcggcaacagcaacgccaacagccggggccccagcttctctagcggcctggtgccactgtccctgagagggagccacatgggccccatggagatctacaaaaccgtgagcgcctggaagcggcagcctgtgcgcgtgctgagcctgtttcggaatatcgataaagtcctgaaaagcctgggattcctggagagcggctctggctccggcggtggcaccctgaagtacgtggaggatgtgacaaacgtggtcagacgggatgtggagaagtggggccccttcgatctggtgtacggcagcacccaacccctgggcagctcttgtgaccggtgccctggctggtacatgtttcagttccaccggatcctgcagtacgccctgccgagacaggagtcccagcggccattcttttggattttcatggacaacttgctgctgaccgaggatgaccaggaaactaccactcggttcctgcagaccgaagccgtgaccctgcaggacgtgagaggccgggactaccagaacgccatgcgggtgtggtccaacatccctggactgaaaagcaagcacgcacctctgacccctaaagaagaggagtacctgcaggcccaggtgcggagcagaagcaagctggacgcccctaaggtggatctgctggtgaagaattgcctcctgcccctgagagagtacttcaagtatttcagccagaatagtctgcccctgggcggcccaagcagcggcgcccctcctcccagcggcggcagcccagccggctccccaacctctaccgaggagggcacctctgagtccgccacccccgagagcggccctggcacctccaccgagcccagcgagggcagcgcacccggcagccctgccggcagccccacctccacagaggagggaaccagcaccgagcccagcgaaggcagcgccccaggcaccagcaccgagcctagtgagggcggctctggcggcggcagcgcccaggagattaaacggatcaacaagatcagaagaagacttgtgaaagacagcaacaccaagaaggccggcaagacaggccccatgaaaaccctgctggttagagtgatgacacccgatctgagagagcggctggaaaacctgagaaagaagcctgaaaatatcccccagcccatcagcaatacatctagagccaacctgaataagctgctgaccgattacaccgaaatgaagaaggcgatcctgcatgtgtactgggaagagttccagaaggaccctgtgggcctgatgagccgggtggcccagcctgccagcaagaagatcgatcagaacaagctgaaacctgagatggacgagaagggcaacctgaccaccgccggctttgcctgctctcagtgtggccagcccctgttcgtgtacaagctggagcaggtgtctgagaagggcaaggcttacaccaactacttcggacggtgcaatgtggccgagcacgaaaagctgatcctgctggcccagctgaagcccgagaaggatagcgacgaagccgtgacatatagcctgggaaagtttgggcagagggccctggatttctacagcattcatgtgaccaaggagtccacccaccccgtgaagcccctggcccagatcgccggaaacagatacgcctccggacctgtgggaaaggccctgagcgacgcatgtatgggcacaatcgcctccttcctgtctaagtaccaggacatcatcatcgaacaccagaaggtggtgaagggcaaccagaagagactggagagcctgcgggagctggccggcaaggaaaacctggaataccctagcgtgaccctgccacctcagcctcacaccaaggagggcgttgatgcctacaacgaagtgatcgcccgggtgcgaatgtgggtgaacctgaacctgtggcagaagctgaagctaagcagagatgatgccaagcctctgctgagactgaagggattcccttcctttcctctggtcgagagacaggccaacgaagtggactggtgggacatggtgtgtaacgtgaagaagctgatcaacgagaaaaaggaggatggcaaggtgttttggcagaatctggctggctacaagagacaggaagccctgagaccatacctgagcagcgaggaagatcggaagaagggaaagaaattcgctcggtaccagctgggcgacctgctgctgcacctggaaaagaagcacggcgaggactggggaaaggtgtacgacgaggcctgggagcggattgacaagaaagtggaaggcctgagcaagcacatcaagctggaagaggaacggagaagcgaggacgcccagagcaaggccgccctgaccgactggctgcgggctaaggccagcttcgtgatcgagggcctgaaggaggccgacaaggacgagttctgcagatgcgagctgaagctgcagaagtggtacggggacctgcggggaaagcccttcgccatcgaagccgagaacagcatcctggacatcagcggcttcagcaagcagtacaactgtgccttcatctggcagaaggacggcgtgaagaagctgaacctgtacctgatcatcaactacttcaagggcggcaagctgcggttcaagaagatcaaacctgaagccttcgaagccaacagattctacaccgtgatcaacaaaaagagcggcgagatcgtgcccatggaggtgaacttcaacttcgacgaccccaacctgatcatcctgcctctggcctttggcaagagacagggcagagaattcatctggaacgacctgctgtccctggaaaccggcagcctgaagctggccaacggaagagtgatcgagaagacactgtacaacagaagaacccggcaggatgagcctgccctgttcgtggccctgaccttcgagcggcgggaggtcctggactcctccaatatcaaaccaatgaacctgatcggcgtggcaagaggcgaaaacatccccgccgtgatcgccctgaccgaccccgagggctgcccactgagccggtttaaggatagcctgggaaacccaacccacatcctgagaatcggcgagagctataaggagaagcagcggaccatccaggccaagaaggaggtggagcagcggagagccggcggctacagccggaagtacgccagcaaagccaagaatctggcagacgatatggtgagaaacaccgctagagatctgctgtactacgccgtgacccaggatgccatgctgatcttcgccaacctgagccggggcttcggccggcagggcaagcggaccttcatggccgagagacagtacacacggatggaggactggctgaccgccaagctggcctacgagggcctgagcaagacctacctgtccaagacactggcccagtacacctccaagacatgcagcaactgtgggtttaccatcaccagcgccgactacgacagggtgctggagaagctgaagaagacagcaacaggctggatgaccacaattaacggcaaggagctgaaggtggagggccagattacctactacaacagatacaagagacagaacgtagtcaaggacctgtccgtcgagctggatagactgagcgaagaatctgtgaacaacgacatctcctcctggacaaagggcagaagcggagaagctctgagcctcctgaagaaaagattctcccatagacccgtgcaggagaagttcgtgtgcctgaactgcggcttcgagacacacgcagccgagcaagccgccctgaacatcgccagatcctggctgttcctgcggagccaggagtacaagaaataccagacaaacaagacaaccggcaacaccgataagagagccttcgtcgagacctggcagtccttttaccggaagaagcttaaggaggtgtggaaacctgccgtgcggtctggcggatctggcggaggctccacaagcttccaggagagcgtgaccttcagggacgtggccgtggacttcacccaggaggagtggaggcacctggagcccgcccagagggccctgtacagggacgtgatgctggagaactacgagaacctggtgagcgtgggcatccccgtgagcaggctggacgtgaccagcctgctggagaggcaggaggccgtgtggaaggacggcggcctgagggacagctgcctggacagcctgagcaacaagatcaccagccccaagaaaaagagaaaagtctaagctgccttctgcggggcttgccttctggccatgcccttcttctctcccttgcacctgtacctcttggtctttgaataaagcctgagtaggaaggctagcaaaaaaaaaaaaaaaaaaaaaaaaaaaaaaaaaaaaaaaaaaaaaaaaaaaaaaaaaaaaaaaaaaaaaaaaaaaaaaaa

SEQ ID NO: 2897 - RNA, 5419 nt, synthetic construct
  source 1..5419: mol_type = other RNA
aggaaataagagagaaaagaagagtaagaagaaatataagagccaccatggcccctaagaagaagcgtaaagtgagccgggtgaacggcagcggcagcggcggcggcatgaaccacgaccaggagttcgacccccctaaggtgtaccctcccgtccccgccgagaagagaaagcccatccgggtcctgagcctgttcgatggcatcgccaccggtctgctggtgctgaaggacctgggcatccaggtggataggtacattgcctccgaggtgtgcgaggactccatcaccgtgggaatggtgcgtcatcagggcaagatcatgtacgtgggcgacgtgcggagcgtgacacagaagcatatccaggagtggggccctttcgacctggtgatcggcggcagcccttgcaatgacctgagcatcgtgaacccagcccggaagggcctgtacgagggaaccggcagactgttcttcgagttttacagactgctgcacgacgcccggcctaaggaaggcgacgaccggcccttcttttggctgttcgagaatgtggtggccatgggagtcagcgacaagcgggatattagccggttcctggagagcaaccccgtgatgatcgatgccaaggaagtgagcgccgcccaccgggccagatacttctggggcaatctgcctggcatgaacagacccctggccagcaccgtgaacgacaagctggagctgcaggagtgcctggagcacggccggatcgccaagttcagcaaggtgagaaccatcaccacccgaagcaacagcatcaaacaaggcaaggaccagcactttcctgtgttcatgaacgagaaggaggacatcctgtggtgtaccgagatggagagagtgttcgggttcccagtccactacacagatgtcagcaacatgtctagactggccagacagagactgctgggaagaagctggtccgtccctgtgatcagacacctgttcgcccctctgaaggagtacttcgcctgcgtgagcagcggcaacagcaacgccaacagccggggccccagcttctctagcggcctggtgccactgtccctgagagggagccacatgggccccatggagatctacaaaaccgtgagcgcctggaagcggcagcctgtgcgcgtgctgagcctgtttcggaatatcgataaagtcctgaaaagcctgggattcctggagagcggctctggctccggcggtggcaccctgaagtacgtggaggatgtgacaaacgtggtcagacgggatgtggagaagtggggccccttcgatctggtgtacggcagcacccaacccctgggcagctcttgtgaccggtgccctggctggtacatgtttcagttccaccggatcctgcagtacgccctgccgagacaggagtcccagcggccattcttttggattttcatggacaacttgctgctgaccgaggatgaccaggaaactaccactcggttcctgcagaccgaagccgtgaccctgcaggacgtgagaggccgggactaccagaacgccatgcgggtgtggtccaacatccctggactgaaaagcaagcacgcacctctgacccctaaagaagaggagtacctgcaggcccaggtgcggagcagaagcaagctggacgcccctaaggtggatctgctggtgaagaattgcctcctgcccctgagagagtacttcaagtatttcagccagaatagtctgcccctgggcggcccaagcagcggcgcccctcctcccagcggcggcagcccagccggctccccaacctctaccgaggagggcacctctgagtccgccacccccgagagcggccctggcacctccaccgagcccagcgagggcagcgcacccggcagccctgccggcagccccacctccacagaggagggaaccagcaccgagcccagcgaaggcagcgccccaggcaccagcaccgagcctagtgagggcggctctggcggcggcagcgcccaggagattaaacggatcaacaagatcagaagaagacttgtgaaagacagcaacaccaagaaggccggcaagacaggccccatgaaaaccctgctggttagagtgatgacacccgatctgagagagcggctggaaaacctgagaaagaagcctgaaaatatcccccagcccatcagcaatacatctagagccaacctgaataagctgctgaccgattacaccgaaatgaagaaggcgatcctgcatgtgtactgggaagagttccagaaggaccctgtgggcctgatgagccgggtggcccagcctgccagcaagaagatcgatcagaacaagctgaaacctgagatggacgagaagggcaacctgaccaccgccggctttgcctgctctcagtgtggccagcccctgttcgtgtacaagctggagcaggtgtctgagaagggcaaggcttacaccaactacttcggacggtgcaatgtggccgagcacgaaaagctgatcctgctggcccagctgaagcccgagaaggatagcgacgaagccgtgacatatagcctgggaaagtttgggcagagggccctggatttctacagcattcatgtgaccaaggagtccacccaccccgtgaagcccctggcccagatcgccggaaacagatacgcctccggacctgtgggaaaggccctgagcgacgcatgtatgggcacaatcgcctccttcctgtctaagtaccaggacatcatcatcgaacaccagaaggtggtgaagggcaaccagaagagactggagagcctgcgggagctggccggcaaggaaaacctggaataccctagcgtgaccctgccacctcagcctcacaccaaggagggcgttgatgcctacaacgaagtgatcgcccgggtgcgaatgtgggtgaacctgaacctgtggcagaagctgaagctaagcagagatgatgccaagcctctgctgagactgaagggattcccttcctttcctctggtcgagagacaggccaacgaagtggactggtgggacatggtgtgtaacgtgaagaagctgatcaacgagaaaaaggaggatggcaaggtgttttggcagaatctggctggctacaagagacaggaagccctgagaccatacctgagcagcgaggaagatcggaagaagggaaagaaattcgctcggtaccagctgggcgacctgctgctgcacctggaaaagaagcacggcgaggactggggaaaggtgtacgacgaggcctgggagcggattgacaagaaagtggaaggcctgagcaagcacatcaagctggaagaggaacggagaagcgaggacgcccagagcaaggccgccctgaccgactggctgcgggctaaggccagcttcgtgatcgagggcctgaaggaggccgacaaggacgagttctgcagatgcgagctgaagctgcagaagtggtacggggacctgcggggaaagcccttcgccatcgaagccgagaacagcatcctggacatcagcggcttcagcaagcagtacaactgtgccttcatctggcagaaggacggcgtgaagaagctgaacctgtacctgatcatcaactacttcaagggcggcaagctgcggttcaagaagatcaaacctgaagccttcgaagccaacagattctacaccgtgatcaacaaaaagagcggcgagatcgtgcccatggaggtgaacttcaacttcgacgaccccaacctgatcatcctgcctctggcctttggcaagagacagggcagagaattcatctggaacgacctgctgtccctggaaaccggcagcctgaagctggccaacggaagagtgatcgagaagacactgtacaacagaagaacccggcaggatgagcctgccctgttcgtggccctgaccttcgagcggcgggaggtcctggactcctccaatatcaaaccaatgaacctgatcggcgtggcaagaggcgaaaacatccccgccgtgatcgccctgaccgaccccgagggctgcccactgagccggtttaaggatagcctgggaaacccaacccacatcctgagaatcggcgagagctataaggagaagcagcggaccatccaggccaagaaggaggtggagcagcggagagccggcggctacagccggaagtacgccagcaaagccaagaatctggcagacgatatggtgagaaacaccgctagagatctgctgtactacgccgtgacccaggatgccatgctgatcttcgccaacctgagccggggcttcggccggcagggcaagcggaccttcatggccgagagacagtacacacggatggaggactggctgaccgccaagctggcctacgagggcctgagcaagacctacctgtccaagacactggcccagtacacctccaagacatgcagcaactgtgggtttaccatcaccagcgccgactacgacagggtgctggagaagctgaagaagacagcaacaggctggatgaccacaattaacggcaaggagctgaaggtggagggccagattacctactacaacagatacaagagacagaacgtagtcaaggacctgtccgtcgagctggatagactgagcgaagaatctgtgaacaacgacatctcctcctggacaaagggcagaagcggagaagctctgagcctcctgaagaaaagattctcccatagacccgtgcaggagaagttcgtgtgcctgaactgcggcttcgagacacacgcagccgagcaagccgccctgaacatcgccagatcctggctgttcctgcggagccaggagtacaagaaataccagacaaacaagacaaccggcaacaccgataagagagccttcgtcgagacctggcagtccttttaccggaagaagcttaaggaggtgtggaaacctgccgtgcggtctggcggatctggcggaggctccacaagcgaggccgtgaccttcaaggacgtggccgtgttcttcaccgaggaggagctgggcctgctggacctggcccagaggaagctgtacagagacgtgatgctggagaacttcaggaacctgctgagcgtgggccaccagcccttccaccaggacgtgttccacttcctgagggaggagaagttctggatgatggagaccgccacccagagggagggcaacagcggcgagaacgccagcgtgcaccccaccagccccaagaaaaagagaaaagtctaagctgccttctgcggggcttgccttctggccatgcccttcttctctcccttgcacctgtacctcttggtctttgaataaagcctgagtaggaaggctagcaaaaaaaaaaaaaaaaaaaaaaaaaaaaaaaaaaaaaaaaaaaaaaaaaaaaaaaaaaaaaaaaaaaaaaaaaaaaaaaa

SEQ ID NO: 2898 - RNA, 5419 nt, synthetic construct
  source 1..5419: mol_type = other RNA
aggaaataagagagaaaagaagagtaagaagaaatataagagccaccatggcccctaagaagaagcgtaaagtgagccgggtgaacggcagcggcagcggcggcggcatgaaccacgaccaggagttcgacccccctaaggtgtaccctcccgtccccgccgagaagagaaagcccatccgggtcctgagcctgttcgatggcatcgccaccggtctgctggtgctgaaggacctgggcatccaggtggataggtacattgcctccgaggtgtgcgaggactccatcaccgtgggaatggtgcgtcatcagggcaagatcatgtacgtgggcgacgtgcggagcgtgacacagaagcatatccaggagtggggccctttcgacctggtgatcggcggcagcccttgcaatgacctgagcatcgtgaacccagcccggaagggcctgtacgagggaaccggcagactgttcttcgagttttacagactgctgcacgacgcccggcctaaggaaggcgacgaccggcccttcttttggctgttcgagaatgtggtggccatgggagtcagcgacaagcgggatattagccggttcctggagagcaaccccgtgatgatcgatgccaaggaagtgagcgccgcccaccgggccagatacttctggggcaatctgcctggcatgaacagacccctggccagcaccgtgaacgacaagctggagctgcaggagtgcctggagcacggccggatcgccaagttcagcaaggtgagaaccatcaccacccgaagcaacagcatcaaacaaggcaaggaccagcactttcctgtgttcatgaacgagaaggaggacatcctgtggtgtaccgagatggagagagtgttcgggttcccagtccactacacagatgtcagcaacatgtctagactggccagacagagactgctgggaagaagctggtccgtccctgtgatcagacacctgttcgcccctctgaaggagtacttcgcctgcgtgagcagcggcaacagcaacgccaacagccggggccccagcttctctagcggcctggtgccactgtccctgagagggagccacatgggccccatggagatctacaaaaccgtgagcgcctggaagcggcagcctgtgcgcgtgctgagcctgtttcggaatatcgataaagtcctgaaaagcctgggattcctggagagcggctctggctccggcggtggcaccctgaagtacgtggaggatgtgacaaacgtggtcagacgggatgtggagaagtggggccccttcgatctggtgtacggcagcacccaacccctgggcagctcttgtgaccggtgccctggctggtacatgtttcagttccaccggatcctgcagtacgccctgccgagacaggagtcccagcggccattcttttggattttcatggacaacttgctgctgaccgaggatgaccaggaaactaccactcggttcctgcagaccgaagccgtgaccctgcaggacgtgagaggccgggactaccagaacgccatgcgggtgtggtccaacatccctggactgaaaagcaagcacgcacctctgacccctaaagaagaggagtacctgcaggcccaggtgcggagcagaagcaagctggacgcccctaaggtggatctgctggtgaagaattgcctcctgcccctgagagagtacttcaagtatttcagccagaatagtctgcccctgggcggcccaagcagcggcgcccctcctcccagcggcggcagcccagccggctccccaacctctaccgaggagggcacctctgagtccgccacccccgagagcggccctggcacctccaccgagcccagcgagggcagcgcacccggcagccctgccggcagccccacctccacagaggagggaaccagcaccgagcccagcgaaggcagcgccccaggcaccagcaccgagcctagtgagggcggctctggcggcggcagcgcccaggagattaaacggatcaacaagatcagaagaagacttgtgaaagacagcaacaccaagaaggccggcaagacaggccccatgaaaaccctgctggttagagtgatgacacccgatctgagagagcggctggaaaacctgagaaagaagcctgaaaatatcccccagcccatcagcaatacatctagagccaacctgaataagctgctgaccgattacaccgaaatgaagaaggcgatcctgcatgtgtactgggaagagttccagaaggaccctgtgggcctgatgagccgggtggcccagcctgccagcaagaagatcgatcagaacaagctgaaacctgagatggacgagaagggcaacctgaccaccgccggctttgcctgctctcagtgtggccagcccctgttcgtgtacaagctggagcaggtgtctgagaagggcaaggcttacaccaactacttcggacggtgcaatgtggccgagcacgaaaagctgatcctgctggcccagctgaagcccgagaaggatagcgacgaagccgtgacatatagcctgggaaagtttgggcagagggccctggatttctacagcattcatgtgaccaaggagtccacccaccccgtgaagcccctggcccagatcgccggaaacagatacgcctccggacctgtgggaaaggccctgagcgacgcatgtatgggcacaatcgcctccttcctgtctaagtaccaggacatcatcatcgaacaccagaaggtggtgaagggcaaccagaagagactggagagcctgcgggagctggccggcaaggaaaacctggaataccctagcgtgaccctgccacctcagcctcacaccaaggagggcgttgatgcctacaacgaagtgatcgcccgggtgcgaatgtgggtgaacctgaacctgtggcagaagctgaagctaagcagagatgatgccaagcctctgctgagactgaagggattcccttcctttcctctggtcgagagacaggccaacgaagtggactggtgggacatggtgtgtaacgtgaagaagctgatcaacgagaaaaaggaggatggcaaggtgttttggcagaatctggctggctacaagagacaggaagccctgagaccatacctgagcagcgaggaagatcggaagaagggaaagaaattcgctcggtaccagctgggcgacctgctgctgcacctggaaaagaagcacggcgaggactggggaaaggtgtacgacgaggcctgggagcggattgacaagaaagtggaaggcctgagcaagcacatcaagctggaagaggaacggagaagcgaggacgcccagagcaaggccgccctgaccgactggctgcgggctaaggccagcttcgtgatcgagggcctgaaggaggccgacaaggacgagttctgcagatgcgagctgaagctgcagaagtggtacggggacctgcggggaaagcccttcgccatcgaagccgagaacagcatcctggacatcagcggcttcagcaagcagtacaactgtgccttcatctggcagaaggacggcgtgaagaagctgaacctgtacctgatcatcaactacttcaagggcggcaagctgcggttcaagaagatcaaacctgaagccttcgaagccaacagattctacaccgtgatcaacaaaaagagcggcgagatcgtgcccatggaggtgaacttcaacttcgacgaccccaacctgatcatcctgcctctggcctttggcaagagacagggcagagaattcatctggaacgacctgctgtccctggaaaccggcagcctgaagctggccaacggaagagtgatcgagaagacactgtacaacagaagaacccggcaggatgagcctgccctgttcgtggccctgaccttcgagcggcgggaggtcctggactcctccaatatcaaaccaatgaacctgatcggcgtggcaagaggcgaaaacatccccgccgtgatcgccctgaccgaccccgagggctgcccactgagccggtttaaggatagcctgggaaacccaacccacatcctgagaatcggcgagagctataaggagaagcagcggaccatccaggccaagaaggaggtggagcagcggagagccggcggctacagccggaagtacgccagcaaagccaagaatctggcagacgatatggtgagaaacaccgctagagatctgctgtactacgccgtgacccaggatgccatgctgatcttcgccaacctgagccggggcttcggccggcagggcaagcggaccttcatggccgagagacagtacacacggatggaggactggctgaccgccaagctggcctacgagggcctgagcaagacctacctgtccaagacactggcccagtacacctccaagacatgcagcaactgtgggtttaccatcaccagcgccgactacgacagggtgctggagaagctgaagaagacagcaacaggctggatgaccacaattaacggcaaggagctgaaggtggagggccagattacctactacaacagatacaagagacagaacgtagtcaaggacctgtccgtcgagctggatagactgagcgaagaatctgtgaacaacgacatctcctcctggacaaagggcagaagcggagaagctctgagcctcctgaagaaaagattctcccatagacccgtgcaggagaagttcgtgtgcctgaactgcggcttcgagacacacgcagccgagcaagccgccctgaacatcgccagatcctggctgttcctgcggagccaggagtacaagaaataccagacaaacaagacaaccggcaacaccgataagagagccttcgtcgagacctggcagtccttttaccggaagaagcttaaggaggtgtggaaacctgccgtgcggtctggcggatctggcggaggctccacaagcacccagctgaccgtggaggacgtggacatcaagttcacccccgaggagtgggagtgcctggaccccgcccagagggccctgtactgggacgtgatggaggagacctacaggaacctgctgagcgtggacgtgagccacatccacatgaccaagaagctgcaggccaaggccaacagcggcaagggcgagatcctgcagaccgtgatgttcggcagggccgagacccacgagatcaaggacttcaccagccccaagaaaaagagaaaagtctaagctgccttctgcggggcttgccttctggccatgcccttcttctctcccttgcacctgtacctcttggtctttgaataaagcctgagtaggaaggctagcaaaaaaaaaaaaaaaaaaaaaaaaaaaaaaaaaaaaaaaaaaaaaaaaaaaaaaaaaaaaaaaaaaaaaaaaaaaaaaaa

SEQ ID NO: 2899 - RNA, 5419 nt, synthetic construct
  source 1..5419: mol_type = other RNA
aggaaataagagagaaaagaagagtaagaagaaatataagagccaccatggcccctaagaagaagcgtaaagtgagccgggtgaacggcagcggcagcggcggcggcatgaaccacgaccaggagttcgacccccctaaggtgtaccctcccgtccccgccgagaagagaaagcccatccgggtcctgagcctgttcgatggcatcgccaccggtctgctggtgctgaaggacctgggcatccaggtggataggtacattgcctccgaggtgtgcgaggactccatcaccgtgggaatggtgcgtcatcagggcaagatcatgtacgtgggcgacgtgcggagcgtgacacagaagcatatccaggagtggggccctttcgacctggtgatcggcggcagcccttgcaatgacctgagcatcgtgaacccagcccggaagggcctgtacgagggaaccggcagactgttcttcgagttttacagactgctgcacgacgcccggcctaaggaaggcgacgaccggcccttcttttggctgttcgagaatgtggtggccatgggagtcagcgacaagcgggatattagccggttcctggagagcaaccccgtgatgatcgatgccaaggaagtgagcgccgcccaccgggccagatacttctggggcaatctgcctggcatgaacagacccctggccagcaccgtgaacgacaagctggagctgcaggagtgcctggagcacggccggatcgccaagttcagcaaggtgagaaccatcaccacccgaagcaacagcatcaaacaaggcaaggaccagcactttcctgtgttcatgaacgagaaggaggacatcctgtggtgtaccgagatggagagagtgttcgggttcccagtccactacacagatgtcagcaacatgtctagactggccagacagagactgctgggaagaagctggtccgtccctgtgatcagacacctgttcgcccctctgaaggagtacttcgcctgcgtgagcagcggcaacagcaacgccaacagccggggccccagcttctctagcggcctggtgccactgtccctgagagggagccacatgggccccatggagatctacaaaaccgtgagcgcctggaagcggcagcctgtgcgcgtgctgagcctgtttcggaatatcgataaagtcctgaaaagcctgggattcctggagagcggctctggctccggcggtggcaccctgaagtacgtggaggatgtgacaaacgtggtcagacgggatgtggagaagtggggccccttcgatctggtgtacggcagcacccaacccctgggcagctcttgtgaccggtgccctggctggtacatgtttcagttccaccggatcctgcagtacgccctgccgagacaggagtcccagcggccattcttttggattttcatggacaacttgctgctgaccgaggatgaccaggaaactaccactcggttcctgcagaccgaagccgtgaccctgcaggacgtgagaggccgggactaccagaacgccatgcgggtgtggtccaacatccctggactgaaaagcaagcacgcacctctgacccctaaagaagaggagtacctgcaggcccaggtgcggagcagaagcaagctggacgcccctaaggtggatctgctggtgaagaattgcctcctgcccctgagagagtacttcaagtatttcagccagaatagtctgcccctgggcggcccaagcagcggcgcccctcctcccagcggcggcagcccagccggctccccaacctctaccgaggagggcacctctgagtccgccacccccgagagcggccctggcacctccaccgagcccagcgagggcagcgcacccggcagccctgccggcagccccacctccacagaggagggaaccagcaccgagcccagcgaaggcagcgccccaggcaccagcaccgagcctagtgagggcggctctggcggcggcagcgcccaggagattaaacggatcaacaagatcagaagaagacttgtgaaagacagcaacaccaagaaggccggcaagacaggccccatgaaaaccctgctggttagagtgatgacacccgatctgagagagcggctggaaaacctgagaaagaagcctgaaaatatcccccagcccatcagcaatacatctagagccaacctgaataagctgctgaccgattacaccgaaatgaagaaggcgatcctgcatgtgtactgggaagagttccagaaggaccctgtgggcctgatgagccgggtggcccagcctgccagcaagaagatcgatcagaacaagctgaaacctgagatggacgagaagggcaacctgaccaccgccggctttgcctgctctcagtgtggccagcccctgttcgtgtacaagctggagcaggtgtctgagaagggcaaggcttacaccaactacttcggacggtgcaatgtggccgagcacgaaaagctgatcctgctggcccagctgaagcccgagaaggatagcgacgaagccgtgacatatagcctgggaaagtttgggcagagggccctggatttctacagcattcatgtgaccaaggagtccacccaccccgtgaagcccctggcccagatcgccggaaacagatacgcctccggacctgtgggaaaggccctgagcgacgcatgtatgggcacaatcgcctccttcctgtctaagtaccaggacatcatcatcgaacaccagaaggtggtgaagggcaaccagaagagactggagagcctgcgggagctggccggcaaggaaaacctggaataccctagcgtgaccctgccacctcagcctcacaccaaggagggcgttgatgcctacaacgaagtgatcgcccgggtgcgaatgtgggtgaacctgaacctgtggcagaagctgaagctaagcagagatgatgccaagcctctgctgagactgaagggattcccttcctttcctctggtcgagagacaggccaacgaagtggactggtgggacatggtgtgtaacgtgaagaagctgatcaacgagaaaaaggaggatggcaaggtgttttggcagaatctggctggctacaagagacaggaagccctgagaccatacctgagcagcgaggaagatcggaagaagggaaagaaattcgctcggtaccagctgggcgacctgctgctgcacctggaaaagaagcacggcgaggactggggaaaggtgtacgacgaggcctgggagcggattgacaagaaagtggaaggcctgagcaagcacatcaagctggaagaggaacggagaagcgaggacgcccagagcaaggccgccctgaccgactggctgcgggctaaggccagcttcgtgatcgagggcctgaaggaggccgacaaggacgagttctgcagatgcgagctgaagctgcagaagtggtacggggacctgcggggaaagcccttcgccatcgaagccgagaacagcatcctggacatcagcggcttcagcaagcagtacaactgtgccttcatctggcagaaggacggcgtgaagaagctgaacctgtacctgatcatcaactacttcaagggcggcaagctgcggttcaagaagatcaaacctgaagccttcgaagccaacagattctacaccgtgatcaacaaaaagagcggcgagatcgtgcccatggaggtgaacttcaacttcgacgaccccaacctgatcatcctgcctctggcctttggcaagagacagggcagagaattcatctggaacgacctgctgtccctggaaaccggcagcctgaagctggccaacggaagagtgatcgagaagacactgtacaacagaagaacccggcaggatgagcctgccctgttcgtggccctgaccttcgagcggcgggaggtcctggactcctccaatatcaaaccaatgaacctgatcggcgtggcaagaggcgaaaacatccccgccgtgatcgccctgaccgaccccgagggctgcccactgagccggtttaaggatagcctgggaaacccaacccacatcctgagaatcggcgagagctataaggagaagcagcggaccatccaggccaagaaggaggtggagcagcggagagccggcggctacagccggaagtacgccagcaaagccaagaatctggcagacgatatggtgagaaacaccgctagagatctgctgtactacgccgtgacccaggatgccatgctgatcttcgccaacctgagccggggcttcggccggcagggcaagcggaccttcatggccgagagacagtacacacggatggaggactggctgaccgccaagctggcctacgagggcctgagcaagacctacctgtccaagacactggcccagtacacctccaagacatgcagcaactgtgggtttaccatcaccagcgccgactacgacagggtgctggagaagctgaagaagacagcaacaggctggatgaccacaattaacggcaaggagctgaaggtggagggccagattacctactacaacagatacaagagacagaacgtagtcaaggacctgtccgtcgagctggatagactgagcgaagaatctgtgaacaacgacatctcctcctggacaaagggcagaagcggagaagctctgagcctcctgaagaaaagattctcccatagacccgtgcaggagaagttcgtgtgcctgaactgcggcttcgagacacacgcagccgagcaagccgccctgaacatcgccagatcctggctgttcctgcggagccaggagtacaagaaataccagacaaacaagacaaccggcaacaccgataagagagccttcgtcgagacctggcagtccttttaccggaagaagcttaaggaggtgtggaaacctgccgtgcggtctggcggatctggcggaggctccacaagcacctgcatggtgcacaggcagaccatgagctgcagcggcgccggcggcatcaccgccttcgtggccttcagggacgtggccgtggacttcacccaggaggagtggaggctgctgagccccgcccagaggaccctgcacagggaggtgatgctggagacctacaaccacctggtgagcctggagatccccagcagcaagcccaagctgatcgcccagctggagaggggcgaggagccctggaggaccagccccaagaaaaagagaaaagtctaagctgccttctgcggggcttgccttctggccatgcccttcttctctcccttgcacctgtacctcttggtctttgaataaagcctgagtaggaaggctagcaaaaaaaaaaaaaaaaaaaaaaaaaaaaaaaaaaaaaaaaaaaaaaaaaaaaaaaaaaaaaaaaaaaaaaaaaaaaaaaa

SEQ ID NO: 2900 - RNA, 5419 nt, synthetic construct
  source 1..5419: mol_type = other RNA
aggaaataagagagaaaagaagagtaagaagaaatataagagccaccatggcccctaagaagaagcgtaaagtgagccgggtgaacggcagcggcagcggcggcggcatgaaccacgaccaggagttcgacccccctaaggtgtaccctcccgtccccgccgagaagagaaagcccatccgggtcctgagcctgttcgatggcatcgccaccggtctgctggtgctgaaggacctgggcatccaggtggataggtacattgcctccgaggtgtgcgaggactccatcaccgtgggaatggtgcgtcatcagggcaagatcatgtacgtgggcgacgtgcggagcgtgacacagaagcatatccaggagtggggccctttcgacctggtgatcggcggcagcccttgcaatgacctgagcatcgtgaacccagcccggaagggcctgtacgagggaaccggcagactgttcttcgagttttacagactgctgcacgacgcccggcctaaggaaggcgacgaccggcccttcttttggctgttcgagaatgtggtggccatgggagtcagcgacaagcgggatattagccggttcctggagagcaaccccgtgatgatcgatgccaaggaagtgagcgccgcccaccgggccagatacttctggggcaatctgcctggcatgaacagacccctggccagcaccgtgaacgacaagctggagctgcaggagtgcctggagcacggccggatcgccaagttcagcaaggtgagaaccatcaccacccgaagcaacagcatcaaacaaggcaaggaccagcactttcctgtgttcatgaacgagaaggaggacatcctgtggtgtaccgagatggagagagtgttcgggttcccagtccactacacagatgtcagcaacatgtctagactggccagacagagactgctgggaagaagctggtccgtccctgtgatcagacacctgttcgcccctctgaaggagtacttcgcctgcgtgagcagcggcaacagcaacgccaacagccggggccccagcttctctagcggcctggtgccactgtccctgagagggagccacatgggccccatggagatctacaaaaccgtgagcgcctggaagcggcagcctgtgcgcgtgctgagcctgtttcggaatatcgataaagtcctgaaaagcctgggattcctggagagcggctctggctccggcggtggcaccctgaagtacgtggaggatgtgacaaacgtggtcagacgggatgtggagaagtggggccccttcgatctggtgtacggcagcacccaacccctgggcagctcttgtgaccggtgccctggctggtacatgtttcagttccaccggatcctgcagtacgccctgccgagacaggagtcccagcggccattcttttggattttcatggacaacttgctgctgaccgaggatgaccaggaaactaccactcggttcctgcagaccgaagccgtgaccctgcaggacgtgagaggccgggactaccagaacgccatgcgggtgtggtccaacatccctggactgaaaagcaagcacgcacctctgacccctaaagaagaggagtacctgcaggcccaggtgcggagcagaagcaagctggacgcccctaaggtggatctgctggtgaagaattgcctcctgcccctgagagagtacttcaagtatttcagccagaatagtctgcccctgggcggcccaagcagcggcgcccctcctcccagcggcggcagcccagccggctccccaacctctaccgaggagggcacctctgagtccgccacccccgagagcggccctggcacctccaccgagcccagcgagggcagcgcacccggcagccctgccggcagccccacctccacagaggagggaaccagcaccgagcccagcgaaggcagcgccccaggcaccagcaccgagcctagtgagggcggctctggcggcggcagcgcccaggagattaaacggatcaacaagatcagaagaagacttgtgaaagacagcaacaccaagaaggccggcaagacaggccccatgaaaaccctgctggttagagtgatgacacccgatctgagagagcggctggaaaacctgagaaagaagcctgaaaatatcccccagcccatcagcaatacatctagagccaacctgaataagctgctgaccgattacaccgaaatgaagaaggcgatcctgcatgtgtactgggaagagttccagaaggaccctgtgggcctgatgagccgggtggcccagcctgccagcaagaagatcgatcagaacaagctgaaacctgagatggacgagaagggcaacctgaccaccgccggctttgcctgctctcagtgtggccagcccctgttcgtgtacaagctggagcaggtgtctgagaagggcaaggcttacaccaactacttcggacggtgcaatgtggccgagcacgaaaagctgatcctgctggcccagctgaagcccgagaaggatagcgacgaagccgtgacatatagcctgggaaagtttgggcagagggccctggatttctacagcattcatgtgaccaaggagtccacccaccccgtgaagcccctggcccagatcgccggaaacagatacgcctccggacctgtgggaaaggccctgagcgacgcatgtatgggcacaatcgcctccttcctgtctaagtaccaggacatcatcatcgaacaccagaaggtggtgaagggcaaccagaagagactggagagcctgcgggagctggccggcaaggaaaacctggaataccctagcgtgaccctgccacctcagcctcacaccaaggagggcgttgatgcctacaacgaagtgatcgcccgggtgcgaatgtgggtgaacctgaacctgtggcagaagctgaagctaagcagagatgatgccaagcctctgctgagactgaagggattcccttcctttcctctggtcgagagacaggccaacgaagtggactggtgggacatggtgtgtaacgtgaagaagctgatcaacgagaaaaaggaggatggcaaggtgttttggcagaatctggctggctacaagagacaggaagccctgagaccatacctgagcagcgaggaagatcggaagaagggaaagaaattcgctcggtaccagctgggcgacctgctgctgcacctggaaaagaagcacggcgaggactggggaaaggtgtacgacgaggcctgggagcggattgacaagaaagtggaaggcctgagcaagcacatcaagctggaagaggaacggagaagcgaggacgcccagagcaaggccgccctgaccgactggctgcgggctaaggccagcttcgtgatcgagggcctgaaggaggccgacaaggacgagttctgcagatgcgagctgaagctgcagaagtggtacggggacctgcggggaaagcccttcgccatcgaagccgagaacagcatcctggacatcagcggcttcagcaagcagtacaactgtgccttcatctggcagaaggacggcgtgaagaagctgaacctgtacctgatcatcaactacttcaagggcggcaagctgcggttcaagaagatcaaacctgaagccttcgaagccaacagattctacaccgtgatcaacaaaaagagcggcgagatcgtgcccatggaggtgaacttcaacttcgacgaccccaacctgatcatcctgcctctggcctttggcaagagacagggcagagaattcatctggaacgacctgctgtccctggaaaccggcagcctgaagctggccaacggaagagtgatcgagaagacactgtacaacagaagaacccggcaggatgagcctgccctgttcgtggccctgaccttcgagcggcgggaggtcctggactcctccaatatcaaaccaatgaacctgatcggcgtggcaagaggcgaaaacatccccgccgtgatcgccctgaccgaccccgagggctgcccactgagccggtttaaggatagcctgggaaacccaacccacatcctgagaatcggcgagagctataaggagaagcagcggaccatccaggccaagaaggaggtggagcagcggagagccggcggctacagccggaagtacgccagcaaagccaagaatctggcagacgatatggtgagaaacaccgctagagatctgctgtactacgccgtgacccaggatgccatgctgatcttcgccaacctgagccggggcttcggccggcagggcaagcggaccttcatggccgagagacagtacacacggatggaggactggctgaccgccaagctggcctacgagggcctgagcaagacctacctgtccaagacactggcccagtacacctccaagacatgcagcaactgtgggtttaccatcaccagcgccgactacgacagggtgctggagaagctgaagaagacagcaacaggctggatgaccacaattaacggcaaggagctgaaggtggagggccagattacctactacaacagatacaagagacagaacgtagtcaaggacctgtccgtcgagctggatagactgagcgaagaatctgtgaacaacgacatctcctcctggacaaagggcagaagcggagaagctctgagcctcctgaagaaaagattctcccatagacccgtgcaggagaagttcgtgtgcctgaactgcggcttcgagacacacgcagccgagcaagccgccctgaacatcgccagatcctggctgttcctgcggagccaggagtacaagaaataccagacaaacaagacaaccggcaacaccgataagagagccttcgtcgagacctggcagtccttttaccggaagaagcttaaggaggtgtggaaacctgccgtgcggtctggcggatctggcggaggctccacaagcagccagagcctggtgaccttcggcgacgtggccgtggacttcagccaggaggagtgggagtggctgaacagcgcccagaggaacctgtacaggagcgtgatgctggagaactacaggaacctggtgagcctgggcctgtgcgtgagcaagcccgacatgatcagcagcctggagcagaggaaggagccctggatggtgaagaggaagctgaccaggggcaggtgccccgacctgaagaccgtgaccagccccaagaaaaagagaaaagtctaagctgccttctgcggggcttgccttctggccatgcccttcttctctcccttgcacctgtacctcttggtctttgaataaagcctgagtaggaaggctagcaaaaaaaaaaaaaaaaaaaaaaaaaaaaaaaaaaaaaaaaaaaaaaaaaaaaaaaaaaaaaaaaaaaaaaaaaaaaaaaa

SEQ ID NO: 2901 - RNA, 5419 nt, synthetic construct
  source 1..5419: mol_type = other RNA
aggaaataagagagaaaagaagagtaagaagaaatataagagccaccatggcccctaagaagaagcgtaaagtgagccgggtgaacggcagcggcagcggcggcggcatgaaccacgaccaggagttcgacccccctaaggtgtaccctcccgtccccgccgagaagagaaagcccatccgggtcctgagcctgttcgatggcatcgccaccggtctgctggtgctgaaggacctgggcatccaggtggataggtacattgcctccgaggtgtgcgaggactccatcaccgtgggaatggtgcgtcatcagggcaagatcatgtacgtgggcgacgtgcggagcgtgacacagaagcatatccaggagtggggccctttcgacctggtgatcggcggcagcccttgcaatgacctgagcatcgtgaacccagcccggaagggcctgtacgagggaaccggcagactgttcttcgagttttacagactgctgcacgacgcccggcctaaggaaggcgacgaccggcccttcttttggctgttcgagaatgtggtggccatgggagtcagcgacaagcgggatattagccggttcctggagagcaaccccgtgatgatcgatgccaaggaagtgagcgccgcccaccgggccagatacttctggggcaatctgcctggcatgaacagacccctggccagcaccgtgaacgacaagctggagctgcaggagtgcctggagcacggccggatcgccaagttcagcaaggtgagaaccatcaccacccgaagcaacagcatcaaacaaggcaaggaccagcactttcctgtgttcatgaacgagaaggaggacatcctgtggtgtaccgagatggagagagtgttcgggttcccagtccactacacagatgtcagcaacatgtctagactggccagacagagactgctgggaagaagctggtccgtccctgtgatcagacacctgttcgcccctctgaaggagtacttcgcctgcgtgagcagcggcaacagcaacgccaacagccggggccccagcttctctagcggcctggtgccactgtccctgagagggagccacatgggccccatggagatctacaaaaccgtgagcgcctggaagcggcagcctgtgcgcgtgctgagcctgtttcggaatatcgataaagtcctgaaaagcctgggattcctggagagcggctctggctccggcggtggcaccctgaagtacgtggaggatgtgacaaacgtggtcagacgggatgtggagaagtggggccccttcgatctggtgtacggcagcacccaacccctgggcagctcttgtgaccggtgccctggctggtacatgtttcagttccaccggatcctgcagtacgccctgccgagacaggagtcccagcggccattcttttggattttcatggacaacttgctgctgaccgaggatgaccaggaaactaccactcggttcctgcagaccgaagccgtgaccctgcaggacgtgagaggccgggactaccagaacgccatgcgggtgtggtccaacatccctggactgaaaagcaagcacgcacctctgacccctaaagaagaggagtacctgcaggcccaggtgcggagcagaagcaagctggacgcccctaaggtggatctgctggtgaagaattgcctcctgcccctgagagagtacttcaagtatttcagccagaatagtctgcccctgggcggcccaagcagcggcgcccctcctcccagcggcggcagcccagccggctccccaacctctaccgaggagggcacctctgagtccgccacccccgagagcggccctggcacctccaccgagcccagcgagggcagcgcacccggcagccctgccggcagccccacctccacagaggagggaaccagcaccgagcccagcgaaggcagcgccccaggcaccagcaccgagcctagtgagggcggctctggcggcggcagcgcccaggagattaaacggatcaacaagatcagaagaagacttgtgaaagacagcaacaccaagaaggccggcaagacaggccccatgaaaaccctgctggttagagtgatgacacccgatctgagagagcggctggaaaacctgagaaagaagcctgaaaatatcccccagcccatcagcaatacatctagagccaacctgaataagctgctgaccgattacaccgaaatgaagaaggcgatcctgcatgtgtactgggaagagttccagaaggaccctgtgggcctgatgagccgggtggcccagcctgccagcaagaagatcgatcagaacaagctgaaacctgagatggacgagaagggcaacctgaccaccgccggctttgcctgctctcagtgtggccagcccctgttcgtgtacaagctggagcaggtgtctgagaagggcaaggcttacaccaactacttcggacggtgcaatgtggccgagcacgaaaagctgatcctgctggcccagctgaagcccgagaaggatagcgacgaagccgtgacatatagcctgggaaagtttgggcagagggccctggatttctacagcattcatgtgaccaaggagtccacccaccccgtgaagcccctggcccagatcgccggaaacagatacgcctccggacctgtgggaaaggccctgagcgacgcatgtatgggcacaatcgcctccttcctgtctaagtaccaggacatcatcatcgaacaccagaaggtggtgaagggcaaccagaagagactggagagcctgcgggagctggccggcaaggaaaacctggaataccctagcgtgaccctgccacctcagcctcacaccaaggagggcgttgatgcctacaacgaagtgatcgcccgggtgcgaatgtgggtgaacctgaacctgtggcagaagctgaagctaagcagagatgatgccaagcctctgctgagactgaagggattcccttcctttcctctggtcgagagacaggccaacgaagtggactggtgggacatggtgtgtaacgtgaagaagctgatcaacgagaaaaaggaggatggcaaggtgttttggcagaatctggctggctacaagagacaggaagccctgagaccatacctgagcagcgaggaagatcggaagaagggaaagaaattcgctcggtaccagctgggcgacctgctgctgcacctggaaaagaagcacggcgaggactggggaaaggtgtacgacgaggcctgggagcggattgacaagaaagtggaaggcctgagcaagcacatcaagctggaagaggaacggagaagcgaggacgcccagagcaaggccgccctgaccgactggctgcgggctaaggccagcttcgtgatcgagggcctgaaggaggccgacaaggacgagttctgcagatgcgagctgaagctgcagaagtggtacggggacctgcggggaaagcccttcgccatcgaagccgagaacagcatcctggacatcagcggcttcagcaagcagtacaactgtgccttcatctggcagaaggacggcgtgaagaagctgaacctgtacctgatcatcaactacttcaagggcggcaagctgcggttcaagaagatcaaacctgaagccttcgaagccaacagattctacaccgtgatcaacaaaaagagcggcgagatcgtgcccatggaggtgaacttcaacttcgacgaccccaacctgatcatcctgcctctggcctttggcaagagacagggcagagaattcatctggaacgacctgctgtccctggaaaccggcagcctgaagctggccaacggaagagtgatcgagaagacactgtacaacagaagaacccggcaggatgagcctgccctgttcgtggccctgaccttcgagcggcgggaggtcctggactcctccaatatcaaaccaatgaacctgatcggcgtggcaagaggcgaaaacatccccgccgtgatcgccctgaccgaccccgagggctgcccactgagccggtttaaggatagcctgggaaacccaacccacatcctgagaatcggcgagagctataaggagaagcagcggaccatccaggccaagaaggaggtggagcagcggagagccggcggctacagccggaagtacgccagcaaagccaagaatctggcagacgatatggtgagaaacaccgctagagatctgctgtactacgccgtgacccaggatgccatgctgatcttcgccaacctgagccggggcttcggccggcagggcaagcggaccttcatggccgagagacagtacacacggatggaggactggctgaccgccaagctggcctacgagggcctgagcaagacctacctgtccaagacactggcccagtacacctccaagacatgcagcaactgtgggtttaccatcaccagcgccgactacgacagggtgctggagaagctgaagaagacagcaacaggctggatgaccacaattaacggcaaggagctgaaggtggagggccagattacctactacaacagatacaagagacagaacgtagtcaaggacctgtccgtcgagctggatagactgagcgaagaatctgtgaacaacgacatctcctcctggacaaagggcagaagcggagaagctctgagcctcctgaagaaaagattctcccatagacccgtgcaggagaagttcgtgtgcctgaactgcggcttcgagacacacgcagccgagcaagccgccctgaacatcgccagatcctggctgttcctgcggagccaggagtacaagaaataccagacaaacaagacaaccggcaacaccgataagagagccttcgtcgagacctggcagtccttttaccggaagaagcttaaggaggtgtggaaacctgccgtgcggtctggcggatctggcggaggctccacaagcagccaggagcccgtgagcttcgccgacgtggccgtgtacttcagcagggaggagtgggccctgctggaccccgcccagagggtgctgtacagggacgtgatgctggagacctacgagtgcatcgccagcctggcctgccccgcccccaagcccgccgtgatcagcatgctggagggcgaggaggacccctggatccccgaggacatggccggcgacctgggccccggcgagcccgtgagggagaccagccccaagaaaaagagaaaagtctaagctgccttctgcggggcttgccttctggccatgcccttcttctctcccttgcacctgtacctcttggtctttgaataaagcctgagtaggaaggctagcaaaaaaaaaaaaaaaaaaaaaaaaaaaaaaaaaaaaaaaaaaaaaaaaaaaaaaaaaaaaaaaaaaaaaaaaaaaaaaaa

SEQ ID NO: 2902 - RNA, 5419 nt, synthetic construct
  source 1..5419: mol_type = other RNA
aggaaataagagagaaaagaagagtaagaagaaatataagagccaccatggcccctaagaagaagcgtaaagtgagccgggtgaacggcagcggcagcggcggcggcatgaaccacgaccaggagttcgacccccctaaggtgtaccctcccgtccccgccgagaagagaaagcccatccgggtcctgagcctgttcgatggcatcgccaccggtctgctggtgctgaaggacctgggcatccaggtggataggtacattgcctccgaggtgtgcgaggactccatcaccgtgggaatggtgcgtcatcagggcaagatcatgtacgtgggcgacgtgcggagcgtgacacagaagcatatccaggagtggggccctttcgacctggtgatcggcggcagcccttgcaatgacctgagcatcgtgaacccagcccggaagggcctgtacgagggaaccggcagactgttcttcgagttttacagactgctgcacgacgcccggcctaaggaaggcgacgaccggcccttcttttggctgttcgagaatgtggtggccatgggagtcagcgacaagcgggatattagccggttcctggagagcaaccccgtgatgatcgatgccaaggaagtgagcgccgcccaccgggccagatacttctggggcaatctgcctggcatgaacagacccctggccagcaccgtgaacgacaagctggagctgcaggagtgcctggagcacggccggatcgccaagttcagcaaggtgagaaccatcaccacccgaagcaacagcatcaaacaaggcaaggaccagcactttcctgtgttcatgaacgagaaggaggacatcctgtggtgtaccgagatggagagagtgttcgggttcccagtccactacacagatgtcagcaacatgtctagactggccagacagagactgctgggaagaagctggtccgtccctgtgatcagacacctgttcgcccctctgaaggagtacttcgcctgcgtgagcagcggcaacagcaacgccaacagccggggccccagcttctctagcggcctggtgccactgtccctgagagggagccacatgggccccatggagatctacaaaaccgtgagcgcctggaagcggcagcctgtgcgcgtgctgagcctgtttcggaatatcgataaagtcctgaaaagcctgggattcctggagagcggctctggctccggcggtggcaccctgaagtacgtggaggatgtgacaaacgtggtcagacgggatgtggagaagtggggccccttcgatctggtgtacggcagcacccaacccctgggcagctcttgtgaccggtgccctggctggtacatgtttcagttccaccggatcctgcagtacgccctgccgagacaggagtcccagcggccattcttttggattttcatggacaacttgctgctgaccgaggatgaccaggaaactaccactcggttcctgcagaccgaagccgtgaccctgcaggacgtgagaggccgggactaccagaacgccatgcgggtgtggtccaacatccctggactgaaaagcaagcacgcacctctgacccctaaagaagaggagtacctgcaggcccaggtgcggagcagaagcaagctggacgcccctaaggtggatctgctggtgaagaattgcctcctgcccctgagagagtacttcaagtatttcagccagaatagtctgcccctgggcggcccaagcagcggcgcccctcctcccagcggcggcagcccagccggctccccaacctctaccgaggagggcacctctgagtccgccacccccgagagcggccctggcacctccaccgagcccagcgagggcagcgcacccggcagccctgccggcagccccacctccacagaggagggaaccagcaccgagcccagcgaaggcagcgccccaggcaccagcaccgagcctagtgagggcggctctggcggcggcagcgcccaggagattaaacggatcaacaagatcagaagaagacttgtgaaagacagcaacaccaagaaggccggcaagacaggccccatgaaaaccctgctggttagagtgatgacacccgatctgagagagcggctggaaaacctgagaaagaagcctgaaaatatcccccagcccatcagcaatacatctagagccaacctgaataagctgctgaccgattacaccgaaatgaagaaggcgatcctgcatgtgtactgggaagagttccagaaggaccctgtgggcctgatgagccgggtggcccagcctgccagcaagaagatcgatcagaacaagctgaaacctgagatggacgagaagggcaacctgaccaccgccggctttgcctgctctcagtgtggccagcccctgttcgtgtacaagctggagcaggtgtctgagaagggcaaggcttacaccaactacttcggacggtgcaatgtggccgagcacgaaaagctgatcctgctggcccagctgaagcccgagaaggatagcgacgaagccgtgacatatagcctgggaaagtttgggcagagggccctggatttctacagcattcatgtgaccaaggagtccacccaccccgtgaagcccctggcccagatcgccggaaacagatacgcctccggacctgtgggaaaggccctgagcgacgcatgtatgggcacaatcgcctccttcctgtctaagtaccaggacatcatcatcgaacaccagaaggtggtgaagggcaaccagaagagactggagagcctgcgggagctggccggcaaggaaaacctggaataccctagcgtgaccctgccacctcagcctcacaccaaggagggcgttgatgcctacaacgaagtgatcgcccgggtgcgaatgtgggtgaacctgaacctgtggcagaagctgaagctaagcagagatgatgccaagcctctgctgagactgaagggattcccttcctttcctctggtcgagagacaggccaacgaagtggactggtgggacatggtgtgtaacgtgaagaagctgatcaacgagaaaaaggaggatggcaaggtgttttggcagaatctggctggctacaagagacaggaagccctgagaccatacctgagcagcgaggaagatcggaagaagggaaagaaattcgctcggtaccagctgggcgacctgctgctgcacctggaaaagaagcacggcgaggactggggaaaggtgtacgacgaggcctgggagcggattgacaagaaagtggaaggcctgagcaagcacatcaagctggaagaggaacggagaagcgaggacgcccagagcaaggccgccctgaccgactggctgcgggctaaggccagcttcgtgatcgagggcctgaaggaggccgacaaggacgagttctgcagatgcgagctgaagctgcagaagtggtacggggacctgcggggaaagcccttcgccatcgaagccgagaacagcatcctggacatcagcggcttcagcaagcagtacaactgtgccttcatctggcagaaggacggcgtgaagaagctgaacctgtacctgatcatcaactacttcaagggcggcaagctgcggttcaagaagatcaaacctgaagccttcgaagccaacagattctacaccgtgatcaacaaaaagagcggcgagatcgtgcccatggaggtgaacttcaacttcgacgaccccaacctgatcatcctgcctctggcctttggcaagagacagggcagagaattcatctggaacgacctgctgtccctggaaaccggcagcctgaagctggccaacggaagagtgatcgagaagacactgtacaacagaagaacccggcaggatgagcctgccctgttcgtggccctgaccttcgagcggcgggaggtcctggactcctccaatatcaaaccaatgaacctgatcggcgtggcaagaggcgaaaacatccccgccgtgatcgccctgaccgaccccgagggctgcccactgagccggtttaaggatagcctgggaaacccaacccacatcctgagaatcggcgagagctataaggagaagcagcggaccatccaggccaagaaggaggtggagcagcggagagccggcggctacagccggaagtacgccagcaaagccaagaatctggcagacgatatggtgagaaacaccgctagagatctgctgtactacgccgtgacccaggatgccatgctgatcttcgccaacctgagccggggcttcggccggcagggcaagcggaccttcatggccgagagacagtacacacggatggaggactggctgaccgccaagctggcctacgagggcctgagcaagacctacctgtccaagacactggcccagtacacctccaagacatgcagcaactgtgggtttaccatcaccagcgccgactacgacagggtgctggagaagctgaagaagacagcaacaggctggatgaccacaattaacggcaaggagctgaaggtggagggccagattacctactacaacagatacaagagacagaacgtagtcaaggacctgtccgtcgagctggatagactgagcgaagaatctgtgaacaacgacatctcctcctggacaaagggcagaagcggagaagctctgagcctcctgaagaaaagattctcccatagacccgtgcaggagaagttcgtgtgcctgaactgcggcttcgagacacacgcagccgagcaagccgccctgaacatcgccagatcctggctgttcctgcggagccaggagtacaagaaataccagacaaacaagacaaccggcaacaccgataagagagccttcgtcgagacctggcagtccttttaccggaagaagcttaaggaggtgtggaaacctgccgtgcggtctggcggatctggcggaggctccacaagcttccagggcagcgtgaccttcagggacgtggccatcgacttcagccaggaggagtgggagtggctgcagcccgcccagagggacctgtacaggcacgtgatgctggagaactacggccacctggtgagcctgggcctggacatcagcaagccctacgtggtgagcctgctggagcagggcagggagccctggctggtgaagggcgacgtgaggagggaccccttcagcgtgagcgagagcaacaccagccccaagaaaaagagaaaagtctaagctgccttctgcggggcttgccttctggccatgcccttcttctctcccttgcacctgtacctcttggtctttgaataaagcctgagtaggaaggctagcaaaaaaaaaaaaaaaaaaaaaaaaaaaaaaaaaaaaaaaaaaaaaaaaaaaaaaaaaaaaaaaaaaaaaaaaaaaaaaaa

SEQ ID NO: 2903 - RNA, 5419 nt, synthetic construct
  source 1..5419: mol_type = other RNA
aggaaataagagagaaaagaagagtaagaagaaatataagagccaccatggcccctaagaagaagcgtaaagtgagccgggtgaacggcagcggcagcggcggcggcatgaaccacgaccaggagttcgacccccctaaggtgtaccctcccgtccccgccgagaagagaaagcccatccgggtcctgagcctgttcgatggcatcgccaccggtctgctggtgctgaaggacctgggcatccaggtggataggtacattgcctccgaggtgtgcgaggactccatcaccgtgggaatggtgcgtcatcagggcaagatcatgtacgtgggcgacgtgcggagcgtgacacagaagcatatccaggagtggggccctttcgacctggtgatcggcggcagcccttgcaatgacctgagcatcgtgaacccagcccggaagggcctgtacgagggaaccggcagactgttcttcgagttttacagactgctgcacgacgcccggcctaaggaaggcgacgaccggcccttcttttggctgttcgagaatgtggtggccatgggagtcagcgacaagcgggatattagccggttcctggagagcaaccccgtgatgatcgatgccaaggaagtgagcgccgcccaccgggccagatacttctggggcaatctgcctggcatgaacagacccctggccagcaccgtgaacgacaagctggagctgcaggagtgcctggagcacggccggatcgccaagttcagcaaggtgagaaccatcaccacccgaagcaacagcatcaaacaaggcaaggaccagcactttcctgtgttcatgaacgagaaggaggacatcctgtggtgtaccgagatggagagagtgttcgggttcccagtccactacacagatgtcagcaacatgtctagactggccagacagagactgctgggaagaagctggtccgtccctgtgatcagacacctgttcgcccctctgaaggagtacttcgcctgcgtgagcagcggcaacagcaacgccaacagccggggccccagcttctctagcggcctggtgccactgtccctgagagggagccacatgggccccatggagatctacaaaaccgtgagcgcctggaagcggcagcctgtgcgcgtgctgagcctgtttcggaatatcgataaagtcctgaaaagcctgggattcctggagagcggctctggctccggcggtggcaccctgaagtacgtggaggatgtgacaaacgtggtcagacgggatgtggagaagtggggccccttcgatctggtgtacggcagcacccaacccctgggcagctcttgtgaccggtgccctggctggtacatgtttcagttccaccggatcctgcagtacgccctgccgagacaggagtcccagcggccattcttttggattttcatggacaacttgctgctgaccgaggatgaccaggaaactaccactcggttcctgcagaccgaagccgtgaccctgcaggacgtgagaggccgggactaccagaacgccatgcgggtgtggtccaacatccctggactgaaaagcaagcacgcacctctgacccctaaagaagaggagtacctgcaggcccaggtgcggagcagaagcaagctggacgcccctaaggtggatctgctggtgaagaattgcctcctgcccctgagagagtacttcaagtatttcagccagaatagtctgcccctgggcggcccaagcagcggcgcccctcctcccagcggcggcagcccagccggctccccaacctctaccgaggagggcacctctgagtccgccacccccgagagcggccctggcacctccaccgagcccagcgagggcagcgcacccggcagccctgccggcagccccacctccacagaggagggaaccagcaccgagcccagcgaaggcagcgccccaggcaccagcaccgagcctagtgagggcggctctggcggcggcagcgcccaggagattaaacggatcaacaagatcagaagaagacttgtgaaagacagcaacaccaagaaggccggcaagacaggccccatgaaaaccctgctggttagagtgatgacacccgatctgagagagcggctggaaaacctgagaaagaagcctgaaaatatcccccagcccatcagcaatacatctagagccaacctgaataagctgctgaccgattacaccgaaatgaagaaggcgatcctgcatgtgtactgggaagagttccagaaggaccctgtgggcctgatgagccgggtggcccagcctgccagcaagaagatcgatcagaacaagctgaaacctgagatggacgagaagggcaacctgaccaccgccggctttgcctgctctcagtgtggccagcccctgttcgtgtacaagctggagcaggtgtctgagaagggcaaggcttacaccaactacttcggacggtgcaatgtggccgagcacgaaaagctgatcctgctggcccagctgaagcccgagaaggatagcgacgaagccgtgacatatagcctgggaaagtttgggcagagggccctggatttctacagcattcatgtgaccaaggagtccacccaccccgtgaagcccctggcccagatcgccggaaacagatacgcctccggacctgtgggaaaggccctgagcgacgcatgtatgggcacaatcgcctccttcctgtctaagtaccaggacatcatcatcgaacaccagaaggtggtgaagggcaaccagaagagactggagagcctgcgggagctggccggcaaggaaaacctggaataccctagcgtgaccctgccacctcagcctcacaccaaggagggcgttgatgcctacaacgaagtgatcgcccgggtgcgaatgtgggtgaacctgaacctgtggcagaagctgaagctaagcagagatgatgccaagcctctgctgagactgaagggattcccttcctttcctctggtcgagagacaggccaacgaagtggactggtgggacatggtgtgtaacgtgaagaagctgatcaacgagaaaaaggaggatggcaaggtgttttggcagaatctggctggctacaagagacaggaagccctgagaccatacctgagcagcgaggaagatcggaagaagggaaagaaattcgctcggtaccagctgggcgacctgctgctgcacctggaaaagaagcacggcgaggactggggaaaggtgtacgacgaggcctgggagcggattgacaagaaagtggaaggcctgagcaagcacatcaagctggaagaggaacggagaagcgaggacgcccagagcaaggccgccctgaccgactggctgcgggctaaggccagcttcgtgatcgagggcctgaaggaggccgacaaggacgagttctgcagatgcgagctgaagctgcagaagtggtacggggacctgcggggaaagcccttcgccatcgaagccgagaacagcatcctggacatcagcggcttcagcaagcagtacaactgtgccttcatctggcagaaggacggcgtgaagaagctgaacctgtacctgatcatcaactacttcaagggcggcaagctgcggttcaagaagatcaaacctgaagccttcgaagccaacagattctacaccgtgatcaacaaaaagagcggcgagatcgtgcccatggaggtgaacttcaacttcgacgaccccaacctgatcatcctgcctctggcctttggcaagagacagggcagagaattcatctggaacgacctgctgtccctggaaaccggcagcctgaagctggccaacggaagagtgatcgagaagacactgtacaacagaagaacccggcaggatgagcctgccctgttcgtggccctgaccttcgagcggcgggaggtcctggactcctccaatatcaaaccaatgaacctgatcggcgtggcaagaggcgaaaacatccccgccgtgatcgccctgaccgaccccgagggctgcccactgagccggtttaaggatagcctgggaaacccaacccacatcctgagaatcggcgagagctataaggagaagcagcggaccatccaggccaagaaggaggtggagcagcggagagccggcggctacagccggaagtacgccagcaaagccaagaatctggcagacgatatggtgagaaacaccgctagagatctgctgtactacgccgtgacccaggatgccatgctgatcttcgccaacctgagccggggcttcggccggcagggcaagcggaccttcatggccgagagacagtacacacggatggaggactggctgaccgccaagctggcctacgagggcctgagcaagacctacctgtccaagacactggcccagtacacctccaagacatgcagcaactgtgggtttaccatcaccagcgccgactacgacagggtgctggagaagctgaagaagacagcaacaggctggatgaccacaattaacggcaaggagctgaaggtggagggccagattacctactacaacagatacaagagacagaacgtagtcaaggacctgtccgtcgagctggatagactgagcgaagaatctgtgaacaacgacatctcctcctggacaaagggcagaagcggagaagctctgagcctcctgaagaaaagattctcccatagacccgtgcaggagaagttcgtgtgcctgaactgcggcttcgagacacacgcagccgagcaagccgccctgaacatcgccagatcctggctgttcctgcggagccaggagtacaagaaataccagacaaacaagacaaccggcaacaccgataagagagccttcgtcgagacctggcagtccttttaccggaagaagcttaaggaggtgtggaaacctgccgtgcggtctggcggatctggcggaggctccacaagcagccagggcctggtgaccttcggcgacgtggccgtggtgttcagccaggaggagtgggagtggctgagcagcgagcagaggagcctgtactggagggtgatgctggacaactacaggaacctggccagcctgggcctgtgcgccagcaagcccgacatgatcgccctgctggagcagggcaaggacccctgcgtgctgaagaggaagaccgccaggggcctgaggcccgacctggaggccgtgaccagccccaagaaaaagagaaaagtctaagctgccttctgcggggcttgccttctggccatgcccttcttctctcccttgcacctgtacctcttggtctttgaataaagcctgagtaggaaggctagcaaaaaaaaaaaaaaaaaaaaaaaaaaaaaaaaaaaaaaaaaaaaaaaaaaaaaaaaaaaaaaaaaaaaaaaaaaaaaaaa

SEQ ID NO: 2904 - RNA, 5419 nt, synthetic construct
  source 1..5419: mol_type = other RNA
aggaaataagagagaaaagaagagtaagaagaaatataagagccaccatggcccctaagaagaagcgtaaagtgagccgggtgaacggcagcggcagcggcggcggcatgaaccacgaccaggagttcgacccccctaaggtgtaccctcccgtccccgccgagaagagaaagcccatccgggtcctgagcctgttcgatggcatcgccaccggtctgctggtgctgaaggacctgggcatccaggtggataggtacattgcctccgaggtgtgcgaggactccatcaccgtgggaatggtgcgtcatcagggcaagatcatgtacgtgggcgacgtgcggagcgtgacacagaagcatatccaggagtggggccctttcgacctggtgatcggcggcagcccttgcaatgacctgagcatcgtgaacccagcccggaagggcctgtacgagggaaccggcagactgttcttcgagttttacagactgctgcacgacgcccggcctaaggaaggcgacgaccggcccttcttttggctgttcgagaatgtggtggccatgggagtcagcgacaagcgggatattagccggttcctggagagcaaccccgtgatgatcgatgccaaggaagtgagcgccgcccaccgggccagatacttctggggcaatctgcctggcatgaacagacccctggccagcaccgtgaacgacaagctggagctgcaggagtgcctggagcacggccggatcgccaagttcagcaaggtgagaaccatcaccacccgaagcaacagcatcaaacaaggcaaggaccagcactttcctgtgttcatgaacgagaaggaggacatcctgtggtgtaccgagatggagagagtgttcgggttcccagtccactacacagatgtcagcaacatgtctagactggccagacagagactgctgggaagaagctggtccgtccctgtgatcagacacctgttcgcccctctgaaggagtacttcgcctgcgtgagcagcggcaacagcaacgccaacagccggggccccagcttctctagcggcctggtgccactgtccctgagagggagccacatgggccccatggagatctacaaaaccgtgagcgcctggaagcggcagcctgtgcgcgtgctgagcctgtttcggaatatcgataaagtcctgaaaagcctgggattcctggagagcggctctggctccggcggtggcaccctgaagtacgtggaggatgtgacaaacgtggtcagacgggatgtggagaagtggggccccttcgatctggtgtacggcagcacccaacccctgggcagctcttgtgaccggtgccctggctggtacatgtttcagttccaccggatcctgcagtacgccctgccgagacaggagtcccagcggccattcttttggattttcatggacaacttgctgctgaccgaggatgaccaggaaactaccactcggttcctgcagaccgaagccgtgaccctgcaggacgtgagaggccgggactaccagaacgccatgcgggtgtggtccaacatccctggactgaaaagcaagcacgcacctctgacccctaaagaagaggagtacctgcaggcccaggtgcggagcagaagcaagctggacgcccctaaggtggatctgctggtgaagaattgcctcctgcccctgagagagtacttcaagtatttcagccagaatagtctgcccctgggcggcccaagcagcggcgcccctcctcccagcggcggcagcccagccggctccccaacctctaccgaggagggcacctctgagtccgccacccccgagagcggccctggcacctccaccgagcccagcgagggcagcgcacccggcagccctgccggcagccccacctccacagaggagggaaccagcaccgagcccagcgaaggcagcgccccaggcaccagcaccgagcctagtgagggcggctctggcggcggcagcgcccaggagattaaacggatcaacaagatcagaagaagacttgtgaaagacagcaacaccaagaaggccggcaagacaggccccatgaaaaccctgctggttagagtgatgacacccgatctgagagagcggctggaaaacctgagaaagaagcctgaaaatatcccccagcccatcagcaatacatctagagccaacctgaataagctgctgaccgattacaccgaaatgaagaaggcgatcctgcatgtgtactgggaagagttccagaaggaccctgtgggcctgatgagccgggtggcccagcctgccagcaagaagatcgatcagaacaagctgaaacctgagatggacgagaagggcaacctgaccaccgccggctttgcctgctctcagtgtggccagcccctgttcgtgtacaagctggagcaggtgtctgagaagggcaaggcttacaccaactacttcggacggtgcaatgtggccgagcacgaaaagctgatcctgctggcccagctgaagcccgagaaggatagcgacgaagccgtgacatatagcctgggaaagtttgggcagagggccctggatttctacagcattcatgtgaccaaggagtccacccaccccgtgaagcccctggcccagatcgccggaaacagatacgcctccggacctgtgggaaaggccctgagcgacgcatgtatgggcacaatcgcctccttcctgtctaagtaccaggacatcatcatcgaacaccagaaggtggtgaagggcaaccagaagagactggagagcctgcgggagctggccggcaaggaaaacctggaataccctagcgtgaccctgccacctcagcctcacaccaaggagggcgttgatgcctacaacgaagtgatcgcccgggtgcgaatgtgggtgaacctgaacctgtggcagaagctgaagctaagcagagatgatgccaagcctctgctgagactgaagggattcccttcctttcctctggtcgagagacaggccaacgaagtggactggtgggacatggtgtgtaacgtgaagaagctgatcaacgagaaaaaggaggatggcaaggtgttttggcagaatctggctggctacaagagacaggaagccctgagaccatacctgagcagcgaggaagatcggaagaagggaaagaaattcgctcggtaccagctgggcgacctgctgctgcacctggaaaagaagcacggcgaggactggggaaaggtgtacgacgaggcctgggagcggattgacaagaaagtggaaggcctgagcaagcacatcaagctggaagaggaacggagaagcgaggacgcccagagcaaggccgccctgaccgactggctgcgggctaaggccagcttcgtgatcgagggcctgaaggaggccgacaaggacgagttctgcagatgcgagctgaagctgcagaagtggtacggggacctgcggggaaagcccttcgccatcgaagccgagaacagcatcctggacatcagcggcttcagcaagcagtacaactgtgccttcatctggcagaaggacggcgtgaagaagctgaacctgtacctgatcatcaactacttcaagggcggcaagctgcggttcaagaagatcaaacctgaagccttcgaagccaacagattctacaccgtgatcaacaaaaagagcggcgagatcgtgcccatggaggtgaacttcaacttcgacgaccccaacctgatcatcctgcctctggcctttggcaagagacagggcagagaattcatctggaacgacctgctgtccctggaaaccggcagcctgaagctggccaacggaagagtgatcgagaagacactgtacaacagaagaacccggcaggatgagcctgccctgttcgtggccctgaccttcgagcggcgggaggtcctggactcctccaatatcaaaccaatgaacctgatcggcgtggcaagaggcgaaaacatccccgccgtgatcgccctgaccgaccccgagggctgcccactgagccggtttaaggatagcctgggaaacccaacccacatcctgagaatcggcgagagctataaggagaagcagcggaccatccaggccaagaaggaggtggagcagcggagagccggcggctacagccggaagtacgccagcaaagccaagaatctggcagacgatatggtgagaaacaccgctagagatctgctgtactacgccgtgacccaggatgccatgctgatcttcgccaacctgagccggggcttcggccggcagggcaagcggaccttcatggccgagagacagtacacacggatggaggactggctgaccgccaagctggcctacgagggcctgagcaagacctacctgtccaagacactggcccagtacacctccaagacatgcagcaactgtgggtttaccatcaccagcgccgactacgacagggtgctggagaagctgaagaagacagcaacaggctggatgaccacaattaacggcaaggagctgaaggtggagggccagattacctactacaacagatacaagagacagaacgtagtcaaggacctgtccgtcgagctggatagactgagcgaagaatctgtgaacaacgacatctcctcctggacaaagggcagaagcggagaagctctgagcctcctgaagaaaagattctcccatagacccgtgcaggagaagttcgtgtgcctgaactgcggcttcgagacacacgcagccgagcaagccgccctgaacatcgccagatcctggctgttcctgcggagccaggagtacaagaaataccagacaaacaagacaaccggcaacaccgataagagagccttcgtcgagacctggcagtccttttaccggaagaagcttaaggaggtgtggaaacctgccgtgcggtctggcggatctggcggaggctccacaagcatgctgcagaccgcctggaggcaggagcccgtgaccttcgaggacgtggccgtgtacttcacccagaacgagtgggccagcctggacagcgtgcagagggccctgtacagggaggtgatgctggagaactacgccaacgtggccagcctggccttccccttcaccacccccgtgctggtgagccagctggagcagggcgagctgccctggggcctggacccctgggagcccatgggcagggagaccagccccaagaaaaagagaaaagtctaagctgccttctgcggggcttgccttctggccatgcccttcttctctcccttgcacctgtacctcttggtctttgaataaagcctgagtaggaaggctagcaaaaaaaaaaaaaaaaaaaaaaaaaaaaaaaaaaaaaaaaaaaaaaaaaaaaaaaaaaaaaaaaaaaaaaaaaaaaaaaa

SEQ ID NO: 2905 - RNA, 5419 nt, synthetic construct
  source 1..5419: mol_type = other RNA
aggaaataagagagaaaagaagagtaagaagaaatataagagccaccatggcccctaagaagaagcgtaaagtgagccgggtgaacggcagcggcagcggcggcggcatgaaccacgaccaggagttcgacccccctaaggtgtaccctcccgtccccgccgagaagagaaagcccatccgggtcctgagcctgttcgatggcatcgccaccggtctgctggtgctgaaggacctgggcatccaggtggataggtacattgcctccgaggtgtgcgaggactccatcaccgtgggaatggtgcgtcatcagggcaagatcatgtacgtgggcgacgtgcggagcgtgacacagaagcatatccaggagtggggccctttcgacctggtgatcggcggcagcccttgcaatgacctgagcatcgtgaacccagcccggaagggcctgtacgagggaaccggcagactgttcttcgagttttacagactgctgcacgacgcccggcctaaggaaggcgacgaccggcccttcttttggctgttcgagaatgtggtggccatgggagtcagcgacaagcgggatattagccggttcctggagagcaaccccgtgatgatcgatgccaaggaagtgagcgccgcccaccgggccagatacttctggggcaatctgcctggcatgaacagacccctggccagcaccgtgaacgacaagctggagctgcaggagtgcctggagcacggccggatcgccaagttcagcaaggtgagaaccatcaccacccgaagcaacagcatcaaacaaggcaaggaccagcactttcctgtgttcatgaacgagaaggaggacatcctgtggtgtaccgagatggagagagtgttcgggttcccagtccactacacagatgtcagcaacatgtctagactggccagacagagactgctgggaagaagctggtccgtccctgtgatcagacacctgttcgcccctctgaaggagtacttcgcctgcgtgagcagcggcaacagcaacgccaacagccggggccccagcttctctagcggcctggtgccactgtccctgagagggagccacatgggccccatggagatctacaaaaccgtgagcgcctggaagcggcagcctgtgcgcgtgctgagcctgtttcggaatatcgataaagtcctgaaaagcctgggattcctggagagcggctctggctccggcggtggcaccctgaagtacgtggaggatgtgacaaacgtggtcagacgggatgtggagaagtggggccccttcgatctggtgtacggcagcacccaacccctgggcagctcttgtgaccggtgccctggctggtacatgtttcagttccaccggatcctgcagtacgccctgccgagacaggagtcccagcggccattcttttggattttcatggacaacttgctgctgaccgaggatgaccaggaaactaccactcggttcctgcagaccgaagccgtgaccctgcaggacgtgagaggccgggactaccagaacgccatgcgggtgtggtccaacatccctggactgaaaagcaagcacgcacctctgacccctaaagaagaggagtacctgcaggcccaggtgcggagcagaagcaagctggacgcccctaaggtggatctgctggtgaagaattgcctcctgcccctgagagagtacttcaagtatttcagccagaatagtctgcccctgggcggcccaagcagcggcgcccctcctcccagcggcggcagcccagccggctccccaacctctaccgaggagggcacctctgagtccgccacccccgagagcggccctggcacctccaccgagcccagcgagggcagcgcacccggcagccctgccggcagccccacctccacagaggagggaaccagcaccgagcccagcgaaggcagcgccccaggcaccagcaccgagcctagtgagggcggctctggcggcggcagcgcccaggagattaaacggatcaacaagatcagaagaagacttgtgaaagacagcaacaccaagaaggccggcaagacaggccccatgaaaaccctgctggttagagtgatgacacccgatctgagagagcggctggaaaacctgagaaagaagcctgaaaatatcccccagcccatcagcaatacatctagagccaacctgaataagctgctgaccgattacaccgaaatgaagaaggcgatcctgcatgtgtactgggaagagttccagaaggaccctgtgggcctgatgagccgggtggcccagcctgccagcaagaagatcgatcagaacaagctgaaacctgagatggacgagaagggcaacctgaccaccgccggctttgcctgctctcagtgtggccagcccctgttcgtgtacaagctggagcaggtgtctgagaagggcaaggcttacaccaactacttcggacggtgcaatgtggccgagcacgaaaagctgatcctgctggcccagctgaagcccgagaaggatagcgacgaagccgtgacatatagcctgggaaagtttgggcagagggccctggatttctacagcattcatgtgaccaaggagtccacccaccccgtgaagcccctggcccagatcgccggaaacagatacgcctccggacctgtgggaaaggccctgagcgacgcatgtatgggcacaatcgcctccttcctgtctaagtaccaggacatcatcatcgaacaccagaaggtggtgaagggcaaccagaagagactggagagcctgcgggagctggccggcaaggaaaacctggaataccctagcgtgaccctgccacctcagcctcacaccaaggagggcgttgatgcctacaacgaagtgatcgcccgggtgcgaatgtgggtgaacctgaacctgtggcagaagctgaagctaagcagagatgatgccaagcctctgctgagactgaagggattcccttcctttcctctggtcgagagacaggccaacgaagtggactggtgggacatggtgtgtaacgtgaagaagctgatcaacgagaaaaaggaggatggcaaggtgttttggcagaatctggctggctacaagagacaggaagccctgagaccatacctgagcagcgaggaagatcggaagaagggaaagaaattcgctcggtaccagctgggcgacctgctgctgcacctggaaaagaagcacggcgaggactggggaaaggtgtacgacgaggcctgggagcggattgacaagaaagtggaaggcctgagcaagcacatcaagctggaagaggaacggagaagcgaggacgcccagagcaaggccgccctgaccgactggctgcgggctaaggccagcttcgtgatcgagggcctgaaggaggccgacaaggacgagttctgcagatgcgagctgaagctgcagaagtggtacggggacctgcggggaaagcccttcgccatcgaagccgagaacagcatcctggacatcagcggcttcagcaagcagtacaactgtgccttcatctggcagaaggacggcgtgaagaagctgaacctgtacctgatcatcaactacttcaagggcggcaagctgcggttcaagaagatcaaacctgaagccttcgaagccaacagattctacaccgtgatcaacaaaaagagcggcgagatcgtgcccatggaggtgaacttcaacttcgacgaccccaacctgatcatcctgcctctggcctttggcaagagacagggcagagaattcatctggaacgacctgctgtccctggaaaccggcagcctgaagctggccaacggaagagtgatcgagaagacactgtacaacagaagaacccggcaggatgagcctgccctgttcgtggccctgaccttcgagcggcgggaggtcctggactcctccaatatcaaaccaatgaacctgatcggcgtggcaagaggcgaaaacatccccgccgtgatcgccctgaccgaccccgagggctgcccactgagccggtttaaggatagcctgggaaacccaacccacatcctgagaatcggcgagagctataaggagaagcagcggaccatccaggccaagaaggaggtggagcagcggagagccggcggctacagccggaagtacgccagcaaagccaagaatctggcagacgatatggtgagaaacaccgctagagatctgctgtactacgccgtgacccaggatgccatgctgatcttcgccaacctgagccggggcttcggccggcagggcaagcggaccttcatggccgagagacagtacacacggatggaggactggctgaccgccaagctggcctacgagggcctgagcaagacctacctgtccaagacactggcccagtacacctccaagacatgcagcaactgtgggtttaccatcaccagcgccgactacgacagggtgctggagaagctgaagaagacagcaacaggctggatgaccacaattaacggcaaggagctgaaggtggagggccagattacctactacaacagatacaagagacagaacgtagtcaaggacctgtccgtcgagctggatagactgagcgaagaatctgtgaacaacgacatctcctcctggacaaagggcagaagcggagaagctctgagcctcctgaagaaaagattctcccatagacccgtgcaggagaagttcgtgtgcctgaactgcggcttcgagacacacgcagccgagcaagccgccctgaacatcgccagatcctggctgttcctgcggagccaggagtacaagaaataccagacaaacaagacaaccggcaacaccgataagagagccttcgtcgagacctggcagtccttttaccggaagaagcttaaggaggtgtggaaacctgccgtgcggtctggcggatctggcggaggctccacaagcaggcccagggccgtgaagttcgccgacgtggccgtgtacttcagcaccgaggagtggggctgcctgaggcccgcccagagggccctgtacagggacgtgatgagggagacctacggccacctgggcgccctgggctgcgccggccccaagcccgccctgatcagctggctggagaggaacaccgacgactgggagcccgccgccctggacccccaggagtgccccaagagggtgaccgtgcagaccagccccaagaaaaagagaaaagtctaagctgccttctgcggggcttgccttctggccatgcccttcttctctcccttgcacctgtacctcttggtctttgaataaagcctgagtaggaaggctagcaaaaaaaaaaaaaaaaaaaaaaaaaaaaaaaaaaaaaaaaaaaaaaaaaaaaaaaaaaaaaaaaaaaaaaaaaaaaaaaa

SEQ ID NO: 2906 - RNA, 5419 nt, synthetic construct
  source 1..5419: mol_type = other RNA
aggaaataagagagaaaagaagagtaagaagaaatataagagccaccatggcccctaagaagaagcgtaaagtgagccgggtgaacggcagcggcagcggcggcggcatgaaccacgaccaggagttcgacccccctaaggtgtaccctcccgtccccgccgagaagagaaagcccatccgggtcctgagcctgttcgatggcatcgccaccggtctgctggtgctgaaggacctgggcatccaggtggataggtacattgcctccgaggtgtgcgaggactccatcaccgtgggaatggtgcgtcatcagggcaagatcatgtacgtgggcgacgtgcggagcgtgacacagaagcatatccaggagtggggccctttcgacctggtgatcggcggcagcccttgcaatgacctgagcatcgtgaacccagcccggaagggcctgtacgagggaaccggcagactgttcttcgagttttacagactgctgcacgacgcccggcctaaggaaggcgacgaccggcccttcttttggctgttcgagaatgtggtggccatgggagtcagcgacaagcgggatattagccggttcctggagagcaaccccgtgatgatcgatgccaaggaagtgagcgccgcccaccgggccagatacttctggggcaatctgcctggcatgaacagacccctggccagcaccgtgaacgacaagctggagctgcaggagtgcctggagcacggccggatcgccaagttcagcaaggtgagaaccatcaccacccgaagcaacagcatcaaacaaggcaaggaccagcactttcctgtgttcatgaacgagaaggaggacatcctgtggtgtaccgagatggagagagtgttcgggttcccagtccactacacagatgtcagcaacatgtctagactggccagacagagactgctgggaagaagctggtccgtccctgtgatcagacacctgttcgcccctctgaaggagtacttcgcctgcgtgagcagcggcaacagcaacgccaacagccggggccccagcttctctagcggcctggtgccactgtccctgagagggagccacatgggccccatggagatctacaaaaccgtgagcgcctggaagcggcagcctgtgcgcgtgctgagcctgtttcggaatatcgataaagtcctgaaaagcctgggattcctggagagcggctctggctccggcggtggcaccctgaagtacgtggaggatgtgacaaacgtggtcagacgggatgtggagaagtggggccccttcgatctggtgtacggcagcacccaacccctgggcagctcttgtgaccggtgccctggctggtacatgtttcagttccaccggatcctgcagtacgccctgccgagacaggagtcccagcggccattcttttggattttcatggacaacttgctgctgaccgaggatgaccaggaaactaccactcggttcctgcagaccgaagccgtgaccctgcaggacgtgagaggccgggactaccagaacgccatgcgggtgtggtccaacatccctggactgaaaagcaagcacgcacctctgacccctaaagaagaggagtacctgcaggcccaggtgcggagcagaagcaagctggacgcccctaaggtggatctgctggtgaagaattgcctcctgcccctgagagagtacttcaagtatttcagccagaatagtctgcccctgggcggcccaagcagcggcgcccctcctcccagcggcggcagcccagccggctccccaacctctaccgaggagggcacctctgagtccgccacccccgagagcggccctggcacctccaccgagcccagcgagggcagcgcacccggcagccctgccggcagccccacctccacagaggagggaaccagcaccgagcccagcgaaggcagcgccccaggcaccagcaccgagcctagtgagggcggctctggcggcggcagcgcccaggagattaaacggatcaacaagatcagaagaagacttgtgaaagacagcaacaccaagaaggccggcaagacaggccccatgaaaaccctgctggttagagtgatgacacccgatctgagagagcggctggaaaacctgagaaagaagcctgaaaatatcccccagcccatcagcaatacatctagagccaacctgaataagctgctgaccgattacaccgaaatgaagaaggcgatcctgcatgtgtactgggaagagttccagaaggaccctgtgggcctgatgagccgggtggcccagcctgccagcaagaagatcgatcagaacaagctgaaacctgagatggacgagaagggcaacctgaccaccgccggctttgcctgctctcagtgtggccagcccctgttcgtgtacaagctggagcaggtgtctgagaagggcaaggcttacaccaactacttcggacggtgcaatgtggccgagcacgaaaagctgatcctgctggcccagctgaagcccgagaaggatagcgacgaagccgtgacatatagcctgggaaagtttgggcagagggccctggatttctacagcattcatgtgaccaaggagtccacccaccccgtgaagcccctggcccagatcgccggaaacagatacgcctccggacctgtgggaaaggccctgagcgacgcatgtatgggcacaatcgcctccttcctgtctaagtaccaggacatcatcatcgaacaccagaaggtggtgaagggcaaccagaagagactggagagcctgcgggagctggccggcaaggaaaacctggaataccctagcgtgaccctgccacctcagcctcacaccaaggagggcgttgatgcctacaacgaagtgatcgcccgggtgcgaatgtgggtgaacctgaacctgtggcagaagctgaagctaagcagagatgatgccaagcctctgctgagactgaagggattcccttcctttcctctggtcgagagacaggccaacgaagtggactggtgggacatggtgtgtaacgtgaagaagctgatcaacgagaaaaaggaggatggcaaggtgttttggcagaatctggctggctacaagagacaggaagccctgagaccatacctgagcagcgaggaagatcggaagaagggaaagaaattcgctcggtaccagctgggcgacctgctgctgcacctggaaaagaagcacggcgaggactggggaaaggtgtacgacgaggcctgggagcggattgacaagaaagtggaaggcctgagcaagcacatcaagctggaagaggaacggagaagcgaggacgcccagagcaaggccgccctgaccgactggctgcgggctaaggccagcttcgtgatcgagggcctgaaggaggccgacaaggacgagttctgcagatgcgagctgaagctgcagaagtggtacggggacctgcggggaaagcccttcgccatcgaagccgagaacagcatcctggacatcagcggcttcagcaagcagtacaactgtgccttcatctggcagaaggacggcgtgaagaagctgaacctgtacctgatcatcaactacttcaagggcggcaagctgcggttcaagaagatcaaacctgaagccttcgaagccaacagattctacaccgtgatcaacaaaaagagcggcgagatcgtgcccatggaggtgaacttcaacttcgacgaccccaacctgatcatcctgcctctggcctttggcaagagacagggcagagaattcatctggaacgacctgctgtccctggaaaccggcagcctgaagctggccaacggaagagtgatcgagaagacactgtacaacagaagaacccggcaggatgagcctgccctgttcgtggccctgaccttcgagcggcgggaggtcctggactcctccaatatcaaaccaatgaacctgatcggcgtggcaagaggcgaaaacatccccgccgtgatcgccctgaccgaccccgagggctgcccactgagccggtttaaggatagcctgggaaacccaacccacatcctgagaatcggcgagagctataaggagaagcagcggaccatccaggccaagaaggaggtggagcagcggagagccggcggctacagccggaagtacgccagcaaagccaagaatctggcagacgatatggtgagaaacaccgctagagatctgctgtactacgccgtgacccaggatgccatgctgatcttcgccaacctgagccggggcttcggccggcagggcaagcggaccttcatggccgagagacagtacacacggatggaggactggctgaccgccaagctggcctacgagggcctgagcaagacctacctgtccaagacactggcccagtacacctccaagacatgcagcaactgtgggtttaccatcaccagcgccgactacgacagggtgctggagaagctgaagaagacagcaacaggctggatgaccacaattaacggcaaggagctgaaggtggagggccagattacctactacaacagatacaagagacagaacgtagtcaaggacctgtccgtcgagctggatagactgagcgaagaatctgtgaacaacgacatctcctcctggacaaagggcagaagcggagaagctctgagcctcctgaagaaaagattctcccatagacccgtgcaggagaagttcgtgtgcctgaactgcggcttcgagacacacgcagccgagcaagccgccctgaacatcgccagatcctggctgttcctgcggagccaggagtacaagaaataccagacaaacaagacaaccggcaacaccgataagagagccttcgtcgagacctggcagtccttttaccggaagaagcttaaggaggtgtggaaacctgccgtgcggtctggcggatctggcggaggctccacaagcttccaggaggccgtgaccttcaacgacgtggccgtggtgttcagcgaggaggagctgggcctgctggacagcacccagaggaagctgtacagggacgtgatgctggagaacttcaggaacctggtgagcctgggccacagcagcagcaagcccgacatgatcagccagctggagagggaggaggagaagctgtgcatgaaggagatcaggaccgagaggggcggcaggaaccccaacgaggccaccagccccaagaaaaagagaaaagtctaagctgccttctgcggggcttgccttctggccatgcccttcttctctcccttgcacctgtacctcttggtctttgaataaagcctgagtaggaaggctagcaaaaaaaaaaaaaaaaaaaaaaaaaaaaaaaaaaaaaaaaaaaaaaaaaaaaaaaaaaaaaaaaaaaaaaaaaaaaaaaa

SEQ ID NO: 2907 - RNA, 5419 nt, synthetic construct
  source 1..5419: mol_type = other RNA
aggaaataagagagaaaagaagagtaagaagaaatataagagccaccatggcccctaagaagaagcgtaaagtgagccgggtgaacggcagcggcagcggcggcggcatgaaccacgaccaggagttcgacccccctaaggtgtaccctcccgtccccgccgagaagagaaagcccatccgggtcctgagcctgttcgatggcatcgccaccggtctgctggtgctgaaggacctgggcatccaggtggataggtacattgcctccgaggtgtgcgaggactccatcaccgtgggaatggtgcgtcatcagggcaagatcatgtacgtgggcgacgtgcggagcgtgacacagaagcatatccaggagtggggccctttcgacctggtgatcggcggcagcccttgcaatgacctgagcatcgtgaacccagcccggaagggcctgtacgagggaaccggcagactgttcttcgagttttacagactgctgcacgacgcccggcctaaggaaggcgacgaccggcccttcttttggctgttcgagaatgtggtggccatgggagtcagcgacaagcgggatattagccggttcctggagagcaaccccgtgatgatcgatgccaaggaagtgagcgccgcccaccgggccagatacttctggggcaatctgcctggcatgaacagacccctggccagcaccgtgaacgacaagctggagctgcaggagtgcctggagcacggccggatcgccaagttcagcaaggtgagaaccatcaccacccgaagcaacagcatcaaacaaggcaaggaccagcactttcctgtgttcatgaacgagaaggaggacatcctgtggtgtaccgagatggagagagtgttcgggttcccagtccactacacagatgtcagcaacatgtctagactggccagacagagactgctgggaagaagctggtccgtccctgtgatcagacacctgttcgcccctctgaaggagtacttcgcctgcgtgagcagcggcaacagcaacgccaacagccggggccccagcttctctagcggcctggtgccactgtccctgagagggagccacatgggccccatggagatctacaaaaccgtgagcgcctggaagcggcagcctgtgcgcgtgctgagcctgtttcggaatatcgataaagtcctgaaaagcctgggattcctggagagcggctctggctccggcggtggcaccctgaagtacgtggaggatgtgacaaacgtggtcagacgggatgtggagaagtggggccccttcgatctggtgtacggcagcacccaacccctgggcagctcttgtgaccggtgccctggctggtacatgtttcagttccaccggatcctgcagtacgccctgccgagacaggagtcccagcggccattcttttggattttcatggacaacttgctgctgaccgaggatgaccaggaaactaccactcggttcctgcagaccgaagccgtgaccctgcaggacgtgagaggccgggactaccagaacgccatgcgggtgtggtccaacatccctggactgaaaagcaagcacgcacctctgacccctaaagaagaggagtacctgcaggcccaggtgcggagcagaagcaagctggacgcccctaaggtggatctgctggtgaagaattgcctcctgcccctgagagagtacttcaagtatttcagccagaatagtctgcccctgggcggcccaagcagcggcgcccctcctcccagcggcggcagcccagccggctccccaacctctaccgaggagggcacctctgagtccgccacccccgagagcggccctggcacctccaccgagcccagcgagggcagcgcacccggcagccctgccggcagccccacctccacagaggagggaaccagcaccgagcccagcgaaggcagcgccccaggcaccagcaccgagcctagtgagggcggctctggcggcggcagcgcccaggagattaaacggatcaacaagatcagaagaagacttgtgaaagacagcaacaccaagaaggccggcaagacaggccccatgaaaaccctgctggttagagtgatgacacccgatctgagagagcggctggaaaacctgagaaagaagcctgaaaatatcccccagcccatcagcaatacatctagagccaacctgaataagctgctgaccgattacaccgaaatgaagaaggcgatcctgcatgtgtactgggaagagttccagaaggaccctgtgggcctgatgagccgggtggcccagcctgccagcaagaagatcgatcagaacaagctgaaacctgagatggacgagaagggcaacctgaccaccgccggctttgcctgctctcagtgtggccagcccctgttcgtgtacaagctggagcaggtgtctgagaagggcaaggcttacaccaactacttcggacggtgcaatgtggccgagcacgaaaagctgatcctgctggcccagctgaagcccgagaaggatagcgacgaagccgtgacatatagcctgggaaagtttgggcagagggccctggatttctacagcattcatgtgaccaaggagtccacccaccccgtgaagcccctggcccagatcgccggaaacagatacgcctccggacctgtgggaaaggccctgagcgacgcatgtatgggcacaatcgcctccttcctgtctaagtaccaggacatcatcatcgaacaccagaaggtggtgaagggcaaccagaagagactggagagcctgcgggagctggccggcaaggaaaacctggaataccctagcgtgaccctgccacctcagcctcacaccaaggagggcgttgatgcctacaacgaagtgatcgcccgggtgcgaatgtgggtgaacctgaacctgtggcagaagctgaagctaagcagagatgatgccaagcctctgctgagactgaagggattcccttcctttcctctggtcgagagacaggccaacgaagtggactggtgggacatggtgtgtaacgtgaagaagctgatcaacgagaaaaaggaggatggcaaggtgttttggcagaatctggctggctacaagagacaggaagccctgagaccatacctgagcagcgaggaagatcggaagaagggaaagaaattcgctcggtaccagctgggcgacctgctgctgcacctggaaaagaagcacggcgaggactggggaaaggtgtacgacgaggcctgggagcggattgacaagaaagtggaaggcctgagcaagcacatcaagctggaagaggaacggagaagcgaggacgcccagagcaaggccgccctgaccgactggctgcgggctaaggccagcttcgtgatcgagggcctgaaggaggccgacaaggacgagttctgcagatgcgagctgaagctgcagaagtggtacggggacctgcggggaaagcccttcgccatcgaagccgagaacagcatcctggacatcagcggcttcagcaagcagtacaactgtgccttcatctggcagaaggacggcgtgaagaagctgaacctgtacctgatcatcaactacttcaagggcggcaagctgcggttcaagaagatcaaacctgaagccttcgaagccaacagattctacaccgtgatcaacaaaaagagcggcgagatcgtgcccatggaggtgaacttcaacttcgacgaccccaacctgatcatcctgcctctggcctttggcaagagacagggcagagaattcatctggaacgacctgctgtccctggaaaccggcagcctgaagctggccaacggaagagtgatcgagaagacactgtacaacagaagaacccggcaggatgagcctgccctgttcgtggccctgaccttcgagcggcgggaggtcctggactcctccaatatcaaaccaatgaacctgatcggcgtggcaagaggcgaaaacatccccgccgtgatcgccctgaccgaccccgagggctgcccactgagccggtttaaggatagcctgggaaacccaacccacatcctgagaatcggcgagagctataaggagaagcagcggaccatccaggccaagaaggaggtggagcagcggagagccggcggctacagccggaagtacgccagcaaagccaagaatctggcagacgatatggtgagaaacaccgctagagatctgctgtactacgccgtgacccaggatgccatgctgatcttcgccaacctgagccggggcttcggccggcagggcaagcggaccttcatggccgagagacagtacacacggatggaggactggctgaccgccaagctggcctacgagggcctgagcaagacctacctgtccaagacactggcccagtacacctccaagacatgcagcaactgtgggtttaccatcaccagcgccgactacgacagggtgctggagaagctgaagaagacagcaacaggctggatgaccacaattaacggcaaggagctgaaggtggagggccagattacctactacaacagatacaagagacagaacgtagtcaaggacctgtccgtcgagctggatagactgagcgaagaatctgtgaacaacgacatctcctcctggacaaagggcagaagcggagaagctctgagcctcctgaagaaaagattctcccatagacccgtgcaggagaagttcgtgtgcctgaactgcggcttcgagacacacgcagccgagcaagccgccctgaacatcgccagatcctggctgttcctgcggagccaggagtacaagaaataccagacaaacaagacaaccggcaacaccgataagagagccttcgtcgagacctggcagtccttttaccggaagaagcttaaggaggtgtggaaacctgccgtgcggtctggcggatctggcggaggctccacaagcgcccacggcagcgtgatgttcagcgacgtgagcgtggtgttcagccaggaggagtgggactacctggacgtggagcagagggacctgtacagggacgtgatgctggagaactacaacaacctggtgagcctgggctgcttcatcagcaagcccgacgtgatcagcctgctggagcagggcaaggagccctggaaggtggtgaggaaggagaggaggaggtaccccgacctggagaccaggcacaccagccccaagaaaaagagaaaagtctaagctgccttctgcggggcttgccttctggccatgcccttcttctctcccttgcacctgtacctcttggtctttgaataaagcctgagtaggaaggctagcaaaaaaaaaaaaaaaaaaaaaaaaaaaaaaaaaaaaaaaaaaaaaaaaaaaaaaaaaaaaaaaaaaaaaaaaaaaaaaaa

SEQ ID NO: 2908 - RNA, 5419 nt, synthetic construct
  source 1..5419: mol_type = other RNA
aggaaataagagagaaaagaagagtaagaagaaatataagagccaccatggcccctaagaagaagcgtaaagtgagccgggtgaacggcagcggcagcggcggcggcatgaaccacgaccaggagttcgacccccctaaggtgtaccctcccgtccccgccgagaagagaaagcccatccgggtcctgagcctgttcgatggcatcgccaccggtctgctggtgctgaaggacctgggcatccaggtggataggtacattgcctccgaggtgtgcgaggactccatcaccgtgggaatggtgcgtcatcagggcaagatcatgtacgtgggcgacgtgcggagcgtgacacagaagcatatccaggagtggggccctttcgacctggtgatcggcggcagcccttgcaatgacctgagcatcgtgaacccagcccggaagggcctgtacgagggaaccggcagactgttcttcgagttttacagactgctgcacgacgcccggcctaaggaaggcgacgaccggcccttcttttggctgttcgagaatgtggtggccatgggagtcagcgacaagcgggatattagccggttcctggagagcaaccccgtgatgatcgatgccaaggaagtgagcgccgcccaccgggccagatacttctggggcaatctgcctggcatgaacagacccctggccagcaccgtgaacgacaagctggagctgcaggagtgcctggagcacggccggatcgccaagttcagcaaggtgagaaccatcaccacccgaagcaacagcatcaaacaaggcaaggaccagcactttcctgtgttcatgaacgagaaggaggacatcctgtggtgtaccgagatggagagagtgttcgggttcccagtccactacacagatgtcagcaacatgtctagactggccagacagagactgctgggaagaagctggtccgtccctgtgatcagacacctgttcgcccctctgaaggagtacttcgcctgcgtgagcagcggcaacagcaacgccaacagccggggccccagcttctctagcggcctggtgccactgtccctgagagggagccacatgggccccatggagatctacaaaaccgtgagcgcctggaagcggcagcctgtgcgcgtgctgagcctgtttcggaatatcgataaagtcctgaaaagcctgggattcctggagagcggctctggctccggcggtggcaccctgaagtacgtggaggatgtgacaaacgtggtcagacgggatgtggagaagtggggccccttcgatctggtgtacggcagcacccaacccctgggcagctcttgtgaccggtgccctggctggtacatgtttcagttccaccggatcctgcagtacgccctgccgagacaggagtcccagcggccattcttttggattttcatggacaacttgctgctgaccgaggatgaccaggaaactaccactcggttcctgcagaccgaagccgtgaccctgcaggacgtgagaggccgggactaccagaacgccatgcgggtgtggtccaacatccctggactgaaaagcaagcacgcacctctgacccctaaagaagaggagtacctgcaggcccaggtgcggagcagaagcaagctggacgcccctaaggtggatctgctggtgaagaattgcctcctgcccctgagagagtacttcaagtatttcagccagaatagtctgcccctgggcggcccaagcagcggcgcccctcctcccagcggcggcagcccagccggctccccaacctctaccgaggagggcacctctgagtccgccacccccgagagcggccctggcacctccaccgagcccagcgagggcagcgcacccggcagccctgccggcagccccacctccacagaggagggaaccagcaccgagcccagcgaaggcagcgccccaggcaccagcaccgagcctagtgagggcggctctggcggcggcagcgcccaggagattaaacggatcaacaagatcagaagaagacttgtgaaagacagcaacaccaagaaggccggcaagacaggccccatgaaaaccctgctggttagagtgatgacacccgatctgagagagcggctggaaaacctgagaaagaagcctgaaaatatcccccagcccatcagcaatacatctagagccaacctgaataagctgctgaccgattacaccgaaatgaagaaggcgatcctgcatgtgtactgggaagagttccagaaggaccctgtgggcctgatgagccgggtggcccagcctgccagcaagaagatcgatcagaacaagctgaaacctgagatggacgagaagggcaacctgaccaccgccggctttgcctgctctcagtgtggccagcccctgttcgtgtacaagctggagcaggtgtctgagaagggcaaggcttacaccaactacttcggacggtgcaatgtggccgagcacgaaaagctgatcctgctggcccagctgaagcccgagaaggatagcgacgaagccgtgacatatagcctgggaaagtttgggcagagggccctggatttctacagcattcatgtgaccaaggagtccacccaccccgtgaagcccctggcccagatcgccggaaacagatacgcctccggacctgtgggaaaggccctgagcgacgcatgtatgggcacaatcgcctccttcctgtctaagtaccaggacatcatcatcgaacaccagaaggtggtgaagggcaaccagaagagactggagagcctgcgggagctggccggcaaggaaaacctggaataccctagcgtgaccctgccacctcagcctcacaccaaggagggcgttgatgcctacaacgaagtgatcgcccgggtgcgaatgtgggtgaacctgaacctgtggcagaagctgaagctaagcagagatgatgccaagcctctgctgagactgaagggattcccttcctttcctctggtcgagagacaggccaacgaagtggactggtgggacatggtgtgtaacgtgaagaagctgatcaacgagaaaaaggaggatggcaaggtgttttggcagaatctggctggctacaagagacaggaagccctgagaccatacctgagcagcgaggaagatcggaagaagggaaagaaattcgctcggtaccagctgggcgacctgctgctgcacctggaaaagaagcacggcgaggactggggaaaggtgtacgacgaggcctgggagcggattgacaagaaagtggaaggcctgagcaagcacatcaagctggaagaggaacggagaagcgaggacgcccagagcaaggccgccctgaccgactggctgcgggctaaggccagcttcgtgatcgagggcctgaaggaggccgacaaggacgagttctgcagatgcgagctgaagctgcagaagtggtacggggacctgcggggaaagcccttcgccatcgaagccgagaacagcatcctggacatcagcggcttcagcaagcagtacaactgtgccttcatctggcagaaggacggcgtgaagaagctgaacctgtacctgatcatcaactacttcaagggcggcaagctgcggttcaagaagatcaaacctgaagccttcgaagccaacagattctacaccgtgatcaacaaaaagagcggcgagatcgtgcccatggaggtgaacttcaacttcgacgaccccaacctgatcatcctgcctctggcctttggcaagagacagggcagagaattcatctggaacgacctgctgtccctggaaaccggcagcctgaagctggccaacggaagagtgatcgagaagacactgtacaacagaagaacccggcaggatgagcctgccctgttcgtggccctgaccttcgagcggcgggaggtcctggactcctccaatatcaaaccaatgaacctgatcggcgtggcaagaggcgaaaacatccccgccgtgatcgccctgaccgaccccgagggctgcccactgagccggtttaaggatagcctgggaaacccaacccacatcctgagaatcggcgagagctataaggagaagcagcggaccatccaggccaagaaggaggtggagcagcggagagccggcggctacagccggaagtacgccagcaaagccaagaatctggcagacgatatggtgagaaacaccgctagagatctgctgtactacgccgtgacccaggatgccatgctgatcttcgccaacctgagccggggcttcggccggcagggcaagcggaccttcatggccgagagacagtacacacggatggaggactggctgaccgccaagctggcctacgagggcctgagcaagacctacctgtccaagacactggcccagtacacctccaagacatgcagcaactgtgggtttaccatcaccagcgccgactacgacagggtgctggagaagctgaagaagacagcaacaggctggatgaccacaattaacggcaaggagctgaaggtggagggccagattacctactacaacagatacaagagacagaacgtagtcaaggacctgtccgtcgagctggatagactgagcgaagaatctgtgaacaacgacatctcctcctggacaaagggcagaagcggagaagctctgagcctcctgaagaaaagattctcccatagacccgtgcaggagaagttcgtgtgcctgaactgcggcttcgagacacacgcagccgagcaagccgccctgaacatcgccagatcctggctgttcctgcggagccaggagtacaagaaataccagacaaacaagacaaccggcaacaccgataagagagccttcgtcgagacctggcagtccttttaccggaagaagcttaaggaggtgtggaaacctgccgtgcggtctggcggatctggcggaggctccacaagcgtgcagggcagcgtgagcttcgaggacgtggccgtgggcttcagccaggaggagtggcagatcctgggccccagccagaaggccctgtactgggacgtgatgctggagaactactgcaacctggtgagcgtgggctaccaggcccccacccccaacagcctgttccagctggagcagggcggccccccctggaccgtggagggcgccgccctgagccccacctgcagcggcaagaagctgtacaccagccccaagaaaaagagaaaagtctaagctgccttctgcggggcttgccttctggccatgcccttcttctctcccttgcacctgtacctcttggtctttgaataaagcctgagtaggaaggctagcaaaaaaaaaaaaaaaaaaaaaaaaaaaaaaaaaaaaaaaaaaaaaaaaaaaaaaaaaaaaaaaaaaaaaaaaaaaaaaaa

SEQ ID NO: 2909 - RNA, 5419 nt, synthetic construct
  source 1..5419: mol_type = other RNA
aggaaataagagagaaaagaagagtaagaagaaatataagagccaccatggcccctaagaagaagcgtaaagtgagccgggtgaacggcagcggcagcggcggcggcatgaaccacgaccaggagttcgacccccctaaggtgtaccctcccgtccccgccgagaagagaaagcccatccgggtcctgagcctgttcgatggcatcgccaccggtctgctggtgctgaaggacctgggcatccaggtggataggtacattgcctccgaggtgtgcgaggactccatcaccgtgggaatggtgcgtcatcagggcaagatcatgtacgtgggcgacgtgcggagcgtgacacagaagcatatccaggagtggggccctttcgacctggtgatcggcggcagcccttgcaatgacctgagcatcgtgaacccagcccggaagggcctgtacgagggaaccggcagactgttcttcgagttttacagactgctgcacgacgcccggcctaaggaaggcgacgaccggcccttcttttggctgttcgagaatgtggtggccatgggagtcagcgacaagcgggatattagccggttcctggagagcaaccccgtgatgatcgatgccaaggaagtgagcgccgcccaccgggccagatacttctggggcaatctgcctggcatgaacagacccctggccagcaccgtgaacgacaagctggagctgcaggagtgcctggagcacggccggatcgccaagttcagcaaggtgagaaccatcaccacccgaagcaacagcatcaaacaaggcaaggaccagcactttcctgtgttcatgaacgagaaggaggacatcctgtggtgtaccgagatggagagagtgttcgggttcccagtccactacacagatgtcagcaacatgtctagactggccagacagagactgctgggaagaagctggtccgtccctgtgatcagacacctgttcgcccctctgaaggagtacttcgcctgcgtgagcagcggcaacagcaacgccaacagccggggccccagcttctctagcggcctggtgccactgtccctgagagggagccacatgggccccatggagatctacaaaaccgtgagcgcctggaagcggcagcctgtgcgcgtgctgagcctgtttcggaatatcgataaagtcctgaaaagcctgggattcctggagagcggctctggctccggcggtggcaccctgaagtacgtggaggatgtgacaaacgtggtcagacgggatgtggagaagtggggccccttcgatctggtgtacggcagcacccaacccctgggcagctcttgtgaccggtgccctggctggtacatgtttcagttccaccggatcctgcagtacgccctgccgagacaggagtcccagcggccattcttttggattttcatggacaacttgctgctgaccgaggatgaccaggaaactaccactcggttcctgcagaccgaagccgtgaccctgcaggacgtgagaggccgggactaccagaacgccatgcgggtgtggtccaacatccctggactgaaaagcaagcacgcacctctgacccctaaagaagaggagtacctgcaggcccaggtgcggagcagaagcaagctggacgcccctaaggtggatctgctggtgaagaattgcctcctgcccctgagagagtacttcaagtatttcagccagaatagtctgcccctgggcggcccaagcagcggcgcccctcctcccagcggcggcagcccagccggctccccaacctctaccgaggagggcacctctgagtccgccacccccgagagcggccctggcacctccaccgagcccagcgagggcagcgcacccggcagccctgccggcagccccacctccacagaggagggaaccagcaccgagcccagcgaaggcagcgccccaggcaccagcaccgagcctagtgagggcggctctggcggcggcagcgcccaggagattaaacggatcaacaagatcagaagaagacttgtgaaagacagcaacaccaagaaggccggcaagacaggccccatgaaaaccctgctggttagagtgatgacacccgatctgagagagcggctggaaaacctgagaaagaagcctgaaaatatcccccagcccatcagcaatacatctagagccaacctgaataagctgctgaccgattacaccgaaatgaagaaggcgatcctgcatgtgtactgggaagagttccagaaggaccctgtgggcctgatgagccgggtggcccagcctgccagcaagaagatcgatcagaacaagctgaaacctgagatggacgagaagggcaacctgaccaccgccggctttgcctgctctcagtgtggccagcccctgttcgtgtacaagctggagcaggtgtctgagaagggcaaggcttacaccaactacttcggacggtgcaatgtggccgagcacgaaaagctgatcctgctggcccagctgaagcccgagaaggatagcgacgaagccgtgacatatagcctgggaaagtttgggcagagggccctggatttctacagcattcatgtgaccaaggagtccacccaccccgtgaagcccctggcccagatcgccggaaacagatacgcctccggacctgtgggaaaggccctgagcgacgcatgtatgggcacaatcgcctccttcctgtctaagtaccaggacatcatcatcgaacaccagaaggtggtgaagggcaaccagaagagactggagagcctgcgggagctggccggcaaggaaaacctggaataccctagcgtgaccctgccacctcagcctcacaccaaggagggcgttgatgcctacaacgaagtgatcgcccgggtgcgaatgtgggtgaacctgaacctgtggcagaagctgaagctaagcagagatgatgccaagcctctgctgagactgaagggattcccttcctttcctctggtcgagagacaggccaacgaagtggactggtgggacatggtgtgtaacgtgaagaagctgatcaacgagaaaaaggaggatggcaaggtgttttggcagaatctggctggctacaagagacaggaagccctgagaccatacctgagcagcgaggaagatcggaagaagggaaagaaattcgctcggtaccagctgggcgacctgctgctgcacctggaaaagaagcacggcgaggactggggaaaggtgtacgacgaggcctgggagcggattgacaagaaagtggaaggcctgagcaagcacatcaagctggaagaggaacggagaagcgaggacgcccagagcaaggccgccctgaccgactggctgcgggctaaggccagcttcgtgatcgagggcctgaaggaggccgacaaggacgagttctgcagatgcgagctgaagctgcagaagtggtacggggacctgcggggaaagcccttcgccatcgaagccgagaacagcatcctggacatcagcggcttcagcaagcagtacaactgtgccttcatctggcagaaggacggcgtgaagaagctgaacctgtacctgatcatcaactacttcaagggcggcaagctgcggttcaagaagatcaaacctgaagccttcgaagccaacagattctacaccgtgatcaacaaaaagagcggcgagatcgtgcccatggaggtgaacttcaacttcgacgaccccaacctgatcatcctgcctctggcctttggcaagagacagggcagagaattcatctggaacgacctgctgtccctggaaaccggcagcctgaagctggccaacggaagagtgatcgagaagacactgtacaacagaagaacccggcaggatgagcctgccctgttcgtggccctgaccttcgagcggcgggaggtcctggactcctccaatatcaaaccaatgaacctgatcggcgtggcaagaggcgaaaacatccccgccgtgatcgccctgaccgaccccgagggctgcccactgagccggtttaaggatagcctgggaaacccaacccacatcctgagaatcggcgagagctataaggagaagcagcggaccatccaggccaagaaggaggtggagcagcggagagccggcggctacagccggaagtacgccagcaaagccaagaatctggcagacgatatggtgagaaacaccgctagagatctgctgtactacgccgtgacccaggatgccatgctgatcttcgccaacctgagccggggcttcggccggcagggcaagcggaccttcatggccgagagacagtacacacggatggaggactggctgaccgccaagctggcctacgagggcctgagcaagacctacctgtccaagacactggcccagtacacctccaagacatgcagcaactgtgggtttaccatcaccagcgccgactacgacagggtgctggagaagctgaagaagacagcaacaggctggatgaccacaattaacggcaaggagctgaaggtggagggccagattacctactacaacagatacaagagacagaacgtagtcaaggacctgtccgtcgagctggatagactgagcgaagaatctgtgaacaacgacatctcctcctggacaaagggcagaagcggagaagctctgagcctcctgaagaaaagattctcccatagacccgtgcaggagaagttcgtgtgcctgaactgcggcttcgagacacacgcagccgagcaagccgccctgaacatcgccagatcctggctgttcctgcggagccaggagtacaagaaataccagacaaacaagacaaccggcaacaccgataagagagccttcgtcgagacctggcagtccttttaccggaagaagcttaaggaggtgtggaaacctgccgtgcggtctggcggatctggcggaggctccacaagcctggtgcccgtgaccttcgaggacgtggccgtgtacttcagcagggaggagtggggcctgctggacgacatgcagaggaccttctacagggacgtgatgaaggagaactaccagaccgtggtgagcctgcccggcagcagcatccccaagcccgacgtgatcagccagatggagaggggcgaggagccctgggtgcccgacctgcagaagctgggcccccaccagacccccgagaaccccctgaccagccccaagaaaaagagaaaagtctaagctgccttctgcggggcttgccttctggccatgcccttcttctctcccttgcacctgtacctcttggtctttgaataaagcctgagtaggaaggctagcaaaaaaaaaaaaaaaaaaaaaaaaaaaaaaaaaaaaaaaaaaaaaaaaaaaaaaaaaaaaaaaaaaaaaaaaaaaaaaaa

SEQ ID NO: 2910 - RNA, 5419 nt, synthetic construct
  source 1..5419: mol_type = other RNA
aggaaataagagagaaaagaagagtaagaagaaatataagagccaccatggcccctaagaagaagcgtaaagtgagccgggtgaacggcagcggcagcggcggcggcatgaaccacgaccaggagttcgacccccctaaggtgtaccctcccgtccccgccgagaagagaaagcccatccgggtcctgagcctgttcgatggcatcgccaccggtctgctggtgctgaaggacctgggcatccaggtggataggtacattgcctccgaggtgtgcgaggactccatcaccgtgggaatggtgcgtcatcagggcaagatcatgtacgtgggcgacgtgcggagcgtgacacagaagcatatccaggagtggggccctttcgacctggtgatcggcggcagcccttgcaatgacctgagcatcgtgaacccagcccggaagggcctgtacgagggaaccggcagactgttcttcgagttttacagactgctgcacgacgcccggcctaaggaaggcgacgaccggcccttcttttggctgttcgagaatgtggtggccatgggagtcagcgacaagcgggatattagccggttcctggagagcaaccccgtgatgatcgatgccaaggaagtgagcgccgcccaccgggccagatacttctggggcaatctgcctggcatgaacagacccctggccagcaccgtgaacgacaagctggagctgcaggagtgcctggagcacggccggatcgccaagttcagcaaggtgagaaccatcaccacccgaagcaacagcatcaaacaaggcaaggaccagcactttcctgtgttcatgaacgagaaggaggacatcctgtggtgtaccgagatggagagagtgttcgggttcccagtccactacacagatgtcagcaacatgtctagactggccagacagagactgctgggaagaagctggtccgtccctgtgatcagacacctgttcgcccctctgaaggagtacttcgcctgcgtgagcagcggcaacagcaacgccaacagccggggccccagcttctctagcggcctggtgccactgtccctgagagggagccacatgggccccatggagatctacaaaaccgtgagcgcctggaagcggcagcctgtgcgcgtgctgagcctgtttcggaatatcgataaagtcctgaaaagcctgggattcctggagagcggctctggctccggcggtggcaccctgaagtacgtggaggatgtgacaaacgtggtcagacgggatgtggagaagtggggccccttcgatctggtgtacggcagcacccaacccctgggcagctcttgtgaccggtgccctggctggtacatgtttcagttccaccggatcctgcagtacgccctgccgagacaggagtcccagcggccattcttttggattttcatggacaacttgctgctgaccgaggatgaccaggaaactaccactcggttcctgcagaccgaagccgtgaccctgcaggacgtgagaggccgggactaccagaacgccatgcgggtgtggtccaacatccctggactgaaaagcaagcacgcacctctgacccctaaagaagaggagtacctgcaggcccaggtgcggagcagaagcaagctggacgcccctaaggtggatctgctggtgaagaattgcctcctgcccctgagagagtacttcaagtatttcagccagaatagtctgcccctgggcggcccaagcagcggcgcccctcctcccagcggcggcagcccagccggctccccaacctctaccgaggagggcacctctgagtccgccacccccgagagcggccctggcacctccaccgagcccagcgagggcagcgcacccggcagccctgccggcagccccacctccacagaggagggaaccagcaccgagcccagcgaaggcagcgccccaggcaccagcaccgagcctagtgagggcggctctggcggcggcagcgcccaggagattaaacggatcaacaagatcagaagaagacttgtgaaagacagcaacaccaagaaggccggcaagacaggccccatgaaaaccctgctggttagagtgatgacacccgatctgagagagcggctggaaaacctgagaaagaagcctgaaaatatcccccagcccatcagcaatacatctagagccaacctgaataagctgctgaccgattacaccgaaatgaagaaggcgatcctgcatgtgtactgggaagagttccagaaggaccctgtgggcctgatgagccgggtggcccagcctgccagcaagaagatcgatcagaacaagctgaaacctgagatggacgagaagggcaacctgaccaccgccggctttgcctgctctcagtgtggccagcccctgttcgtgtacaagctggagcaggtgtctgagaagggcaaggcttacaccaactacttcggacggtgcaatgtggccgagcacgaaaagctgatcctgctggcccagctgaagcccgagaaggatagcgacgaagccgtgacatatagcctgggaaagtttgggcagagggccctggatttctacagcattcatgtgaccaaggagtccacccaccccgtgaagcccctggcccagatcgccggaaacagatacgcctccggacctgtgggaaaggccctgagcgacgcatgtatgggcacaatcgcctccttcctgtctaagtaccaggacatcatcatcgaacaccagaaggtggtgaagggcaaccagaagagactggagagcctgcgggagctggccggcaaggaaaacctggaataccctagcgtgaccctgccacctcagcctcacaccaaggagggcgttgatgcctacaacgaagtgatcgcccgggtgcgaatgtgggtgaacctgaacctgtggcagaagctgaagctaagcagagatgatgccaagcctctgctgagactgaagggattcccttcctttcctctggtcgagagacaggccaacgaagtggactggtgggacatggtgtgtaacgtgaagaagctgatcaacgagaaaaaggaggatggcaaggtgttttggcagaatctggctggctacaagagacaggaagccctgagaccatacctgagcagcgaggaagatcggaagaagggaaagaaattcgctcggtaccagctgggcgacctgctgctgcacctggaaaagaagcacggcgaggactggggaaaggtgtacgacgaggcctgggagcggattgacaagaaagtggaaggcctgagcaagcacatcaagctggaagaggaacggagaagcgaggacgcccagagcaaggccgccctgaccgactggctgcgggctaaggccagcttcgtgatcgagggcctgaaggaggccgacaaggacgagttctgcagatgcgagctgaagctgcagaagtggtacggggacctgcggggaaagcccttcgccatcgaagccgagaacagcatcctggacatcagcggcttcagcaagcagtacaactgtgccttcatctggcagaaggacggcgtgaagaagctgaacctgtacctgatcatcaactacttcaagggcggcaagctgcggttcaagaagatcaaacctgaagccttcgaagccaacagattctacaccgtgatcaacaaaaagagcggcgagatcgtgcccatggaggtgaacttcaacttcgacgaccccaacctgatcatcctgcctctggcctttggcaagagacagggcagagaattcatctggaacgacctgctgtccctggaaaccggcagcctgaagctggccaacggaagagtgatcgagaagacactgtacaacagaagaacccggcaggatgagcctgccctgttcgtggccctgaccttcgagcggcgggaggtcctggactcctccaatatcaaaccaatgaacctgatcggcgtggcaagaggcgaaaacatccccgccgtgatcgccctgaccgaccccgagggctgcccactgagccggtttaaggatagcctgggaaacccaacccacatcctgagaatcggcgagagctataaggagaagcagcggaccatccaggccaagaaggaggtggagcagcggagagccggcggctacagccggaagtacgccagcaaagccaagaatctggcagacgatatggtgagaaacaccgctagagatctgctgtactacgccgtgacccaggatgccatgctgatcttcgccaacctgagccggggcttcggccggcagggcaagcggaccttcatggccgagagacagtacacacggatggaggactggctgaccgccaagctggcctacgagggcctgagcaagacctacctgtccaagacactggcccagtacacctccaagacatgcagcaactgtgggtttaccatcaccagcgccgactacgacagggtgctggagaagctgaagaagacagcaacaggctggatgaccacaattaacggcaaggagctgaaggtggagggccagattacctactacaacagatacaagagacagaacgtagtcaaggacctgtccgtcgagctggatagactgagcgaagaatctgtgaacaacgacatctcctcctggacaaagggcagaagcggagaagctctgagcctcctgaagaaaagattctcccatagacccgtgcaggagaagttcgtgtgcctgaactgcggcttcgagacacacgcagccgagcaagccgccctgaacatcgccagatcctggctgttcctgcggagccaggagtacaagaaataccagacaaacaagacaaccggcaacaccgataagagagccttcgtcgagacctggcagtccttttaccggaagaagcttaaggaggtgtggaaacctgccgtgcggtctggcggatctggcggaggctccacaagcatggtgaccttcgaggacgtggccgtgcacttcaccaagaccgagtggaccggcctgagccccgcccagagggccctgtacaggagcgtgatgctggagaacttcggcaacctgaccgccctgggctaccccgtgcccaagcccgccctgatcagcctgctggagggcggcgacatggcctggggcctggaggcccaggacgaccccctggccgagaccaccaagaacgtgtgcaaggacgtgaccagccccaagaaaaagagaaaagtctaagctgccttctgcggggcttgccttctggccatgcccttcttctctcccttgcacctgtacctcttggtctttgaataaagcctgagtaggaaggctagcaaaaaaaaaaaaaaaaaaaaaaaaaaaaaaaaaaaaaaaaaaaaaaaaaaaaaaaaaaaaaaaaaaaaaaaaaaaaaaaa

SEQ ID NO: 2911 - RNA, 5419 nt, synthetic construct
  source 1..5419: mol_type = other RNA
aggaaataagagagaaaagaagagtaagaagaaatataagagccaccatggcccctaagaagaagcgtaaagtgagccgggtgaacggcagcggcagcggcggcggcatgaaccacgaccaggagttcgacccccctaaggtgtaccctcccgtccccgccgagaagagaaagcccatccgggtcctgagcctgttcgatggcatcgccaccggtctgctggtgctgaaggacctgggcatccaggtggataggtacattgcctccgaggtgtgcgaggactccatcaccgtgggaatggtgcgtcatcagggcaagatcatgtacgtgggcgacgtgcggagcgtgacacagaagcatatccaggagtggggccctttcgacctggtgatcggcggcagcccttgcaatgacctgagcatcgtgaacccagcccggaagggcctgtacgagggaaccggcagactgttcttcgagttttacagactgctgcacgacgcccggcctaaggaaggcgacgaccggcccttcttttggctgttcgagaatgtggtggccatgggagtcagcgacaagcgggatattagccggttcctggagagcaaccccgtgatgatcgatgccaaggaagtgagcgccgcccaccgggccagatacttctggggcaatctgcctggcatgaacagacccctggccagcaccgtgaacgacaagctggagctgcaggagtgcctggagcacggccggatcgccaagttcagcaaggtgagaaccatcaccacccgaagcaacagcatcaaacaaggcaaggaccagcactttcctgtgttcatgaacgagaaggaggacatcctgtggtgtaccgagatggagagagtgttcgggttcccagtccactacacagatgtcagcaacatgtctagactggccagacagagactgctgggaagaagctggtccgtccctgtgatcagacacctgttcgcccctctgaaggagtacttcgcctgcgtgagcagcggcaacagcaacgccaacagccggggccccagcttctctagcggcctggtgccactgtccctgagagggagccacatgggccccatggagatctacaaaaccgtgagcgcctggaagcggcagcctgtgcgcgtgctgagcctgtttcggaatatcgataaagtcctgaaaagcctgggattcctggagagcggctctggctccggcggtggcaccctgaagtacgtggaggatgtgacaaacgtggtcagacgggatgtggagaagtggggccccttcgatctggtgtacggcagcacccaacccctgggcagctcttgtgaccggtgccctggctggtacatgtttcagttccaccggatcctgcagtacgccctgccgagacaggagtcccagcggccattcttttggattttcatggacaacttgctgctgaccgaggatgaccaggaaactaccactcggttcctgcagaccgaagccgtgaccctgcaggacgtgagaggccgggactaccagaacgccatgcgggtgtggtccaacatccctggactgaaaagcaagcacgcacctctgacccctaaagaagaggagtacctgcaggcccaggtgcggagcagaagcaagctggacgcccctaaggtggatctgctggtgaagaattgcctcctgcccctgagagagtacttcaagtatttcagccagaatagtctgcccctgggcggcccaagcagcggcgcccctcctcccagcggcggcagcccagccggctccccaacctctaccgaggagggcacctctgagtccgccacccccgagagcggccctggcacctccaccgagcccagcgagggcagcgcacccggcagccctgccggcagccccacctccacagaggagggaaccagcaccgagcccagcgaaggcagcgccccaggcaccagcaccgagcctagtgagggcggctctggcggcggcagcgcccaggagattaaacggatcaacaagatcagaagaagacttgtgaaagacagcaacaccaagaaggccggcaagacaggccccatgaaaaccctgctggttagagtgatgacacccgatctgagagagcggctggaaaacctgagaaagaagcctgaaaatatcccccagcccatcagcaatacatctagagccaacctgaataagctgctgaccgattacaccgaaatgaagaaggcgatcctgcatgtgtactgggaagagttccagaaggaccctgtgggcctgatgagccgggtggcccagcctgccagcaagaagatcgatcagaacaagctgaaacctgagatggacgagaagggcaacctgaccaccgccggctttgcctgctctcagtgtggccagcccctgttcgtgtacaagctggagcaggtgtctgagaagggcaaggcttacaccaactacttcggacggtgcaatgtggccgagcacgaaaagctgatcctgctggcccagctgaagcccgagaaggatagcgacgaagccgtgacatatagcctgggaaagtttgggcagagggccctggatttctacagcattcatgtgaccaaggagtccacccaccccgtgaagcccctggcccagatcgccggaaacagatacgcctccggacctgtgggaaaggccctgagcgacgcatgtatgggcacaatcgcctccttcctgtctaagtaccaggacatcatcatcgaacaccagaaggtggtgaagggcaaccagaagagactggagagcctgcgggagctggccggcaaggaaaacctggaataccctagcgtgaccctgccacctcagcctcacaccaaggagggcgttgatgcctacaacgaagtgatcgcccgggtgcgaatgtgggtgaacctgaacctgtggcagaagctgaagctaagcagagatgatgccaagcctctgctgagactgaagggattcccttcctttcctctggtcgagagacaggccaacgaagtggactggtgggacatggtgtgtaacgtgaagaagctgatcaacgagaaaaaggaggatggcaaggtgttttggcagaatctggctggctacaagagacaggaagccctgagaccatacctgagcagcgaggaagatcggaagaagggaaagaaattcgctcggtaccagctgggcgacctgctgctgcacctggaaaagaagcacggcgaggactggggaaaggtgtacgacgaggcctgggagcggattgacaagaaagtggaaggcctgagcaagcacatcaagctggaagaggaacggagaagcgaggacgcccagagcaaggccgccctgaccgactggctgcgggctaaggccagcttcgtgatcgagggcctgaaggaggccgacaaggacgagttctgcagatgcgagctgaagctgcagaagtggtacggggacctgcggggaaagcccttcgccatcgaagccgagaacagcatcctggacatcagcggcttcagcaagcagtacaactgtgccttcatctggcagaaggacggcgtgaagaagctgaacctgtacctgatcatcaactacttcaagggcggcaagctgcggttcaagaagatcaaacctgaagccttcgaagccaacagattctacaccgtgatcaacaaaaagagcggcgagatcgtgcccatggaggtgaacttcaacttcgacgaccccaacctgatcatcctgcctctggcctttggcaagagacagggcagagaattcatctggaacgacctgctgtccctggaaaccggcagcctgaagctggccaacggaagagtgatcgagaagacactgtacaacagaagaacccggcaggatgagcctgccctgttcgtggccctgaccttcgagcggcgggaggtcctggactcctccaatatcaaaccaatgaacctgatcggcgtggcaagaggcgaaaacatccccgccgtgatcgccctgaccgaccccgagggctgcccactgagccggtttaaggatagcctgggaaacccaacccacatcctgagaatcggcgagagctataaggagaagcagcggaccatccaggccaagaaggaggtggagcagcggagagccggcggctacagccggaagtacgccagcaaagccaagaatctggcagacgatatggtgagaaacaccgctagagatctgctgtactacgccgtgacccaggatgccatgctgatcttcgccaacctgagccggggcttcggccggcagggcaagcggaccttcatggccgagagacagtacacacggatggaggactggctgaccgccaagctggcctacgagggcctgagcaagacctacctgtccaagacactggcccagtacacctccaagacatgcagcaactgtgggtttaccatcaccagcgccgactacgacagggtgctggagaagctgaagaagacagcaacaggctggatgaccacaattaacggcaaggagctgaaggtggagggccagattacctactacaacagatacaagagacagaacgtagtcaaggacctgtccgtcgagctggatagactgagcgaagaatctgtgaacaacgacatctcctcctggacaaagggcagaagcggagaagctctgagcctcctgaagaaaagattctcccatagacccgtgcaggagaagttcgtgtgcctgaactgcggcttcgagacacacgcagccgagcaagccgccctgaacatcgccagatcctggctgttcctgcggagccaggagtacaagaaataccagacaaacaagacaaccggcaacaccgataagagagccttcgtcgagacctggcagtccttttaccggaagaagcttaaggaggtgtggaaacctgccgtgcggtctggcggatctggcggaggctccacaagcaacagccagggcctgctgaccttcagggacgtggccatcgagttcagccaggaggagctgaggtgcctgaaccacagccagtgggagctgtacagggacgtgatgttcgagaactacggccacctgctgttcctgggcctggtggtgagcaagcccgacctggtgatcttcctggagcagaagaaggacgtgtgggccgtgaagaggaaggagaccgtggccacccaccccggcaggtgggagaccagccccaagaaaaagagaaaagtctaagctgccttctgcggggcttgccttctggccatgcccttcttctctcccttgcacctgtacctcttggtctttgaataaagcctgagtaggaaggctagcaaaaaaaaaaaaaaaaaaaaaaaaaaaaaaaaaaaaaaaaaaaaaaaaaaaaaaaaaaaaaaaaaaaaaaaaaaaaaaaa

SEQ ID NO: 2912 - RNA, 5419 nt, synthetic construct
  source 1..5419: mol_type = other RNA
aggaaataagagagaaaagaagagtaagaagaaatataagagccaccatggcccctaagaagaagcgtaaagtgagccgggtgaacggcagcggcagcggcggcggcatgaaccacgaccaggagttcgacccccctaaggtgtaccctcccgtccccgccgagaagagaaagcccatccgggtcctgagcctgttcgatggcatcgccaccggtctgctggtgctgaaggacctgggcatccaggtggataggtacattgcctccgaggtgtgcgaggactccatcaccgtgggaatggtgcgtcatcagggcaagatcatgtacgtgggcgacgtgcggagcgtgacacagaagcatatccaggagtggggccctttcgacctggtgatcggcggcagcccttgcaatgacctgagcatcgtgaacccagcccggaagggcctgtacgagggaaccggcagactgttcttcgagttttacagactgctgcacgacgcccggcctaaggaaggcgacgaccggcccttcttttggctgttcgagaatgtggtggccatgggagtcagcgacaagcgggatattagccggttcctggagagcaaccccgtgatgatcgatgccaaggaagtgagcgccgcccaccgggccagatacttctggggcaatctgcctggcatgaacagacccctggccagcaccgtgaacgacaagctggagctgcaggagtgcctggagcacggccggatcgccaagttcagcaaggtgagaaccatcaccacccgaagcaacagcatcaaacaaggcaaggaccagcactttcctgtgttcatgaacgagaaggaggacatcctgtggtgtaccgagatggagagagtgttcgggttcccagtccactacacagatgtcagcaacatgtctagactggccagacagagactgctgggaagaagctggtccgtccctgtgatcagacacctgttcgcccctctgaaggagtacttcgcctgcgtgagcagcggcaacagcaacgccaacagccggggccccagcttctctagcggcctggtgccactgtccctgagagggagccacatgggccccatggagatctacaaaaccgtgagcgcctggaagcggcagcctgtgcgcgtgctgagcctgtttcggaatatcgataaagtcctgaaaagcctgggattcctggagagcggctctggctccggcggtggcaccctgaagtacgtggaggatgtgacaaacgtggtcagacgggatgtggagaagtggggccccttcgatctggtgtacggcagcacccaacccctgggcagctcttgtgaccggtgccctggctggtacatgtttcagttccaccggatcctgcagtacgccctgccgagacaggagtcccagcggccattcttttggattttcatggacaacttgctgctgaccgaggatgaccaggaaactaccactcggttcctgcagaccgaagccgtgaccctgcaggacgtgagaggccgggactaccagaacgccatgcgggtgtggtccaacatccctggactgaaaagcaagcacgcacctctgacccctaaagaagaggagtacctgcaggcccaggtgcggagcagaagcaagctggacgcccctaaggtggatctgctggtgaagaattgcctcctgcccctgagagagtacttcaagtatttcagccagaatagtctgcccctgggcggcccaagcagcggcgcccctcctcccagcggcggcagcccagccggctccccaacctctaccgaggagggcacctctgagtccgccacccccgagagcggccctggcacctccaccgagcccagcgagggcagcgcacccggcagccctgccggcagccccacctccacagaggagggaaccagcaccgagcccagcgaaggcagcgccccaggcaccagcaccgagcctagtgagggcggctctggcggcggcagcgcccaggagattaaacggatcaacaagatcagaagaagacttgtgaaagacagcaacaccaagaaggccggcaagacaggccccatgaaaaccctgctggttagagtgatgacacccgatctgagagagcggctggaaaacctgagaaagaagcctgaaaatatcccccagcccatcagcaatacatctagagccaacctgaataagctgctgaccgattacaccgaaatgaagaaggcgatcctgcatgtgtactgggaagagttccagaaggaccctgtgggcctgatgagccgggtggcccagcctgccagcaagaagatcgatcagaacaagctgaaacctgagatggacgagaagggcaacctgaccaccgccggctttgcctgctctcagtgtggccagcccctgttcgtgtacaagctggagcaggtgtctgagaagggcaaggcttacaccaactacttcggacggtgcaatgtggccgagcacgaaaagctgatcctgctggcccagctgaagcccgagaaggatagcgacgaagccgtgacatatagcctgggaaagtttgggcagagggccctggatttctacagcattcatgtgaccaaggagtccacccaccccgtgaagcccctggcccagatcgccggaaacagatacgcctccggacctgtgggaaaggccctgagcgacgcatgtatgggcacaatcgcctccttcctgtctaagtaccaggacatcatcatcgaacaccagaaggtggtgaagggcaaccagaagagactggagagcctgcgggagctggccggcaaggaaaacctggaataccctagcgtgaccctgccacctcagcctcacaccaaggagggcgttgatgcctacaacgaagtgatcgcccgggtgcgaatgtgggtgaacctgaacctgtggcagaagctgaagctaagcagagatgatgccaagcctctgctgagactgaagggattcccttcctttcctctggtcgagagacaggccaacgaagtggactggtgggacatggtgtgtaacgtgaagaagctgatcaacgagaaaaaggaggatggcaaggtgttttggcagaatctggctggctacaagagacaggaagccctgagaccatacctgagcagcgaggaagatcggaagaagggaaagaaattcgctcggtaccagctgggcgacctgctgctgcacctggaaaagaagcacggcgaggactggggaaaggtgtacgacgaggcctgggagcggattgacaagaaagtggaaggcctgagcaagcacatcaagctggaagaggaacggagaagcgaggacgcccagagcaaggccgccctgaccgactggctgcgggctaaggccagcttcgtgatcgagggcctgaaggaggccgacaaggacgagttctgcagatgcgagctgaagctgcagaagtggtacggggacctgcggggaaagcccttcgccatcgaagccgagaacagcatcctggacatcagcggcttcagcaagcagtacaactgtgccttcatctggcagaaggacggcgtgaagaagctgaacctgtacctgatcatcaactacttcaagggcggcaagctgcggttcaagaagatcaaacctgaagccttcgaagccaacagattctacaccgtgatcaacaaaaagagcggcgagatcgtgcccatggaggtgaacttcaacttcgacgaccccaacctgatcatcctgcctctggcctttggcaagagacagggcagagaattcatctggaacgacctgctgtccctggaaaccggcagcctgaagctggccaacggaagagtgatcgagaagacactgtacaacagaagaacccggcaggatgagcctgccctgttcgtggccctgaccttcgagcggcgggaggtcctggactcctccaatatcaaaccaatgaacctgatcggcgtggcaagaggcgaaaacatccccgccgtgatcgccctgaccgaccccgagggctgcccactgagccggtttaaggatagcctgggaaacccaacccacatcctgagaatcggcgagagctataaggagaagcagcggaccatccaggccaagaaggaggtggagcagcggagagccggcggctacagccggaagtacgccagcaaagccaagaatctggcagacgatatggtgagaaacaccgctagagatctgctgtactacgccgtgacccaggatgccatgctgatcttcgccaacctgagccggggcttcggccggcagggcaagcggaccttcatggccgagagacagtacacacggatggaggactggctgaccgccaagctggcctacgagggcctgagcaagacctacctgtccaagacactggcccagtacacctccaagacatgcagcaactgtgggtttaccatcaccagcgccgactacgacagggtgctggagaagctgaagaagacagcaacaggctggatgaccacaattaacggcaaggagctgaaggtggagggccagattacctactacaacagatacaagagacagaacgtagtcaaggacctgtccgtcgagctggatagactgagcgaagaatctgtgaacaacgacatctcctcctggacaaagggcagaagcggagaagctctgagcctcctgaagaaaagattctcccatagacccgtgcaggagaagttcgtgtgcctgaactgcggcttcgagacacacgcagccgagcaagccgccctgaacatcgccagatcctggctgttcctgcggagccaggagtacaagaaataccagacaaacaagacaaccggcaacaccgataagagagccttcgtcgagacctggcagtccttttaccggaagaagcttaaggaggtgtggaaacctgccgtgcggtctggcggatctggcggaggctccacaagcatgatccaggcccaggagagcatcaccctggaggacgtggccgtggacttcacctgggaggagtggcagctgctgggcgccgcccagaaggacctgtacagggacgtgatgctggagaactacagcaacctggtggccgtgggctaccaggccagcaagcccgacgccctgttcaagctggagcagggcgagcagccctggaccaccgaggacggcatccacagcggcgcctgcagcgacatgaccagccccaagaaaaagagaaaagtctaagctgccttctgcggggcttgccttctggccatgcccttcttctctcccttgcacctgtacctcttggtctttgaataaagcctgagtaggaaggctagcaaaaaaaaaaaaaaaaaaaaaaaaaaaaaaaaaaaaaaaaaaaaaaaaaaaaaaaaaaaaaaaaaaaaaaaaaaaaaaaa

SEQ ID NO: 2913 - RNA, 5419 nt, synthetic construct
  source 1..5419: mol_type = other RNA
aggaaataagagagaaaagaagagtaagaagaaatataagagccaccatggcccctaagaagaagcgtaaagtgagccgggtgaacggcagcggcagcggcggcggcatgaaccacgaccaggagttcgacccccctaaggtgtaccctcccgtccccgccgagaagagaaagcccatccgggtcctgagcctgttcgatggcatcgccaccggtctgctggtgctgaaggacctgggcatccaggtggataggtacattgcctccgaggtgtgcgaggactccatcaccgtgggaatggtgcgtcatcagggcaagatcatgtacgtgggcgacgtgcggagcgtgacacagaagcatatccaggagtggggccctttcgacctggtgatcggcggcagcccttgcaatgacctgagcatcgtgaacccagcccggaagggcctgtacgagggaaccggcagactgttcttcgagttttacagactgctgcacgacgcccggcctaaggaaggcgacgaccggcccttcttttggctgttcgagaatgtggtggccatgggagtcagcgacaagcgggatattagccggttcctggagagcaaccccgtgatgatcgatgccaaggaagtgagcgccgcccaccgggccagatacttctggggcaatctgcctggcatgaacagacccctggccagcaccgtgaacgacaagctggagctgcaggagtgcctggagcacggccggatcgccaagttcagcaaggtgagaaccatcaccacccgaagcaacagcatcaaacaaggcaaggaccagcactttcctgtgttcatgaacgagaaggaggacatcctgtggtgtaccgagatggagagagtgttcgggttcccagtccactacacagatgtcagcaacatgtctagactggccagacagagactgctgggaagaagctggtccgtccctgtgatcagacacctgttcgcccctctgaaggagtacttcgcctgcgtgagcagcggcaacagcaacgccaacagccggggccccagcttctctagcggcctggtgccactgtccctgagagggagccacatgggccccatggagatctacaaaaccgtgagcgcctggaagcggcagcctgtgcgcgtgctgagcctgtttcggaatatcgataaagtcctgaaaagcctgggattcctggagagcggctctggctccggcggtggcaccctgaagtacgtggaggatgtgacaaacgtggtcagacgggatgtggagaagtggggccccttcgatctggtgtacggcagcacccaacccctgggcagctcttgtgaccggtgccctggctggtacatgtttcagttccaccggatcctgcagtacgccctgccgagacaggagtcccagcggccattcttttggattttcatggacaacttgctgctgaccgaggatgaccaggaaactaccactcggttcctgcagaccgaagccgtgaccctgcaggacgtgagaggccgggactaccagaacgccatgcgggtgtggtccaacatccctggactgaaaagcaagcacgcacctctgacccctaaagaagaggagtacctgcaggcccaggtgcggagcagaagcaagctggacgcccctaaggtggatctgctggtgaagaattgcctcctgcccctgagagagtacttcaagtatttcagccagaatagtctgcccctgggcggcccaagcagcggcgcccctcctcccagcggcggcagcccagccggctccccaacctctaccgaggagggcacctctgagtccgccacccccgagagcggccctggcacctccaccgagcccagcgagggcagcgcacccggcagccctgccggcagccccacctccacagaggagggaaccagcaccgagcccagcgaaggcagcgccccaggcaccagcaccgagcctagtgagggcggctctggcggcggcagcgcccaggagattaaacggatcaacaagatcagaagaagacttgtgaaagacagcaacaccaagaaggccggcaagacaggccccatgaaaaccctgctggttagagtgatgacacccgatctgagagagcggctggaaaacctgagaaagaagcctgaaaatatcccccagcccatcagcaatacatctagagccaacctgaataagctgctgaccgattacaccgaaatgaagaaggcgatcctgcatgtgtactgggaagagttccagaaggaccctgtgggcctgatgagccgggtggcccagcctgccagcaagaagatcgatcagaacaagctgaaacctgagatggacgagaagggcaacctgaccaccgccggctttgcctgctctcagtgtggccagcccctgttcgtgtacaagctggagcaggtgtctgagaagggcaaggcttacaccaactacttcggacggtgcaatgtggccgagcacgaaaagctgatcctgctggcccagctgaagcccgagaaggatagcgacgaagccgtgacatatagcctgggaaagtttgggcagagggccctggatttctacagcattcatgtgaccaaggagtccacccaccccgtgaagcccctggcccagatcgccggaaacagatacgcctccggacctgtgggaaaggccctgagcgacgcatgtatgggcacaatcgcctccttcctgtctaagtaccaggacatcatcatcgaacaccagaaggtggtgaagggcaaccagaagagactggagagcctgcgggagctggccggcaaggaaaacctggaataccctagcgtgaccctgccacctcagcctcacaccaaggagggcgttgatgcctacaacgaagtgatcgcccgggtgcgaatgtgggtgaacctgaacctgtggcagaagctgaagctaagcagagatgatgccaagcctctgctgagactgaagggattcccttcctttcctctggtcgagagacaggccaacgaagtggactggtgggacatggtgtgtaacgtgaagaagctgatcaacgagaaaaaggaggatggcaaggtgttttggcagaatctggctggctacaagagacaggaagccctgagaccatacctgagcagcgaggaagatcggaagaagggaaagaaattcgctcggtaccagctgggcgacctgctgctgcacctggaaaagaagcacggcgaggactggggaaaggtgtacgacgaggcctgggagcggattgacaagaaagtggaaggcctgagcaagcacatcaagctggaagaggaacggagaagcgaggacgcccagagcaaggccgccctgaccgactggctgcgggctaaggccagcttcgtgatcgagggcctgaaggaggccgacaaggacgagttctgcagatgcgagctgaagctgcagaagtggtacggggacctgcggggaaagcccttcgccatcgaagccgagaacagcatcctggacatcagcggcttcagcaagcagtacaactgtgccttcatctggcagaaggacggcgtgaagaagctgaacctgtacctgatcatcaactacttcaagggcggcaagctgcggttcaagaagatcaaacctgaagccttcgaagccaacagattctacaccgtgatcaacaaaaagagcggcgagatcgtgcccatggaggtgaacttcaacttcgacgaccccaacctgatcatcctgcctctggcctttggcaagagacagggcagagaattcatctggaacgacctgctgtccctggaaaccggcagcctgaagctggccaacggaagagtgatcgagaagacactgtacaacagaagaacccggcaggatgagcctgccctgttcgtggccctgaccttcgagcggcgggaggtcctggactcctccaatatcaaaccaatgaacctgatcggcgtggcaagaggcgaaaacatccccgccgtgatcgccctgaccgaccccgagggctgcccactgagccggtttaaggatagcctgggaaacccaacccacatcctgagaatcggcgagagctataaggagaagcagcggaccatccaggccaagaaggaggtggagcagcggagagccggcggctacagccggaagtacgccagcaaagccaagaatctggcagacgatatggtgagaaacaccgctagagatctgctgtactacgccgtgacccaggatgccatgctgatcttcgccaacctgagccggggcttcggccggcagggcaagcggaccttcatggccgagagacagtacacacggatggaggactggctgaccgccaagctggcctacgagggcctgagcaagacctacctgtccaagacactggcccagtacacctccaagacatgcagcaactgtgggtttaccatcaccagcgccgactacgacagggtgctggagaagctgaagaagacagcaacaggctggatgaccacaattaacggcaaggagctgaaggtggagggccagattacctactacaacagatacaagagacagaacgtagtcaaggacctgtccgtcgagctggatagactgagcgaagaatctgtgaacaacgacatctcctcctggacaaagggcagaagcggagaagctctgagcctcctgaagaaaagattctcccatagacccgtgcaggagaagttcgtgtgcctgaactgcggcttcgagacacacgcagccgagcaagccgccctgaacatcgccagatcctggctgttcctgcggagccaggagtacaagaaataccagacaaacaagacaaccggcaacaccgataagagagccttcgtcgagacctggcagtccttttaccggaagaagcttaaggaggtgtggaaacctgccgtgcggtctggcggatctggcggaggctccacaagcgagccctgggccatcaccttcgccgacgtggccgtgtacttcagccccgaggagtggggctgcctgcagcccacccagagggccctgtacagggacgtgatgagggacacctacgtgctgctgagcgccctgggcggcggcggcgccaagcccgccctgatcagctgggtggagagggaggccgagctgtgggaccccgacgcccaggaccccgaggtgcccaagtggcccaccgaggccgacaccagccccaagaaaaagagaaaagtctaagctgccttctgcggggcttgccttctggccatgcccttcttctctcccttgcacctgtacctcttggtctttgaataaagcctgagtaggaaggctagcaaaaaaaaaaaaaaaaaaaaaaaaaaaaaaaaaaaaaaaaaaaaaaaaaaaaaaaaaaaaaaaaaaaaaaaaaaaaaaaa

SEQ ID NO: 2914 - RNA, 5419 nt, synthetic construct
  source 1..5419: mol_type = other RNA
aggaaataagagagaaaagaagagtaagaagaaatataagagccaccatggcccctaagaagaagcgtaaagtgagccgggtgaacggcagcggcagcggcggcggcatgaaccacgaccaggagttcgacccccctaaggtgtaccctcccgtccccgccgagaagagaaagcccatccgggtcctgagcctgttcgatggcatcgccaccggtctgctggtgctgaaggacctgggcatccaggtggataggtacattgcctccgaggtgtgcgaggactccatcaccgtgggaatggtgcgtcatcagggcaagatcatgtacgtgggcgacgtgcggagcgtgacacagaagcatatccaggagtggggccctttcgacctggtgatcggcggcagcccttgcaatgacctgagcatcgtgaacccagcccggaagggcctgtacgagggaaccggcagactgttcttcgagttttacagactgctgcacgacgcccggcctaaggaaggcgacgaccggcccttcttttggctgttcgagaatgtggtggccatgggagtcagcgacaagcgggatattagccggttcctggagagcaaccccgtgatgatcgatgccaaggaagtgagcgccgcccaccgggccagatacttctggggcaatctgcctggcatgaacagacccctggccagcaccgtgaacgacaagctggagctgcaggagtgcctggagcacggccggatcgccaagttcagcaaggtgagaaccatcaccacccgaagcaacagcatcaaacaaggcaaggaccagcactttcctgtgttcatgaacgagaaggaggacatcctgtggtgtaccgagatggagagagtgttcgggttcccagtccactacacagatgtcagcaacatgtctagactggccagacagagactgctgggaagaagctggtccgtccctgtgatcagacacctgttcgcccctctgaaggagtacttcgcctgcgtgagcagcggcaacagcaacgccaacagccggggccccagcttctctagcggcctggtgccactgtccctgagagggagccacatgggccccatggagatctacaaaaccgtgagcgcctggaagcggcagcctgtgcgcgtgctgagcctgtttcggaatatcgataaagtcctgaaaagcctgggattcctggagagcggctctggctccggcggtggcaccctgaagtacgtggaggatgtgacaaacgtggtcagacgggatgtggagaagtggggccccttcgatctggtgtacggcagcacccaacccctgggcagctcttgtgaccggtgccctggctggtacatgtttcagttccaccggatcctgcagtacgccctgccgagacaggagtcccagcggccattcttttggattttcatggacaacttgctgctgaccgaggatgaccaggaaactaccactcggttcctgcagaccgaagccgtgaccctgcaggacgtgagaggccgggactaccagaacgccatgcgggtgtggtccaacatccctggactgaaaagcaagcacgcacctctgacccctaaagaagaggagtacctgcaggcccaggtgcggagcagaagcaagctggacgcccctaaggtggatctgctggtgaagaattgcctcctgcccctgagagagtacttcaagtatttcagccagaatagtctgcccctgggcggcccaagcagcggcgcccctcctcccagcggcggcagcccagccggctccccaacctctaccgaggagggcacctctgagtccgccacccccgagagcggccctggcacctccaccgagcccagcgagggcagcgcacccggcagccctgccggcagccccacctccacagaggagggaaccagcaccgagcccagcgaaggcagcgccccaggcaccagcaccgagcctagtgagggcggctctggcggcggcagcgcccaggagattaaacggatcaacaagatcagaagaagacttgtgaaagacagcaacaccaagaaggccggcaagacaggccccatgaaaaccctgctggttagagtgatgacacccgatctgagagagcggctggaaaacctgagaaagaagcctgaaaatatcccccagcccatcagcaatacatctagagccaacctgaataagctgctgaccgattacaccgaaatgaagaaggcgatcctgcatgtgtactgggaagagttccagaaggaccctgtgggcctgatgagccgggtggcccagcctgccagcaagaagatcgatcagaacaagctgaaacctgagatggacgagaagggcaacctgaccaccgccggctttgcctgctctcagtgtggccagcccctgttcgtgtacaagctggagcaggtgtctgagaagggcaaggcttacaccaactacttcggacggtgcaatgtggccgagcacgaaaagctgatcctgctggcccagctgaagcccgagaaggatagcgacgaagccgtgacatatagcctgggaaagtttgggcagagggccctggatttctacagcattcatgtgaccaaggagtccacccaccccgtgaagcccctggcccagatcgccggaaacagatacgcctccggacctgtgggaaaggccctgagcgacgcatgtatgggcacaatcgcctccttcctgtctaagtaccaggacatcatcatcgaacaccagaaggtggtgaagggcaaccagaagagactggagagcctgcgggagctggccggcaaggaaaacctggaataccctagcgtgaccctgccacctcagcctcacaccaaggagggcgttgatgcctacaacgaagtgatcgcccgggtgcgaatgtgggtgaacctgaacctgtggcagaagctgaagctaagcagagatgatgccaagcctctgctgagactgaagggattcccttcctttcctctggtcgagagacaggccaacgaagtggactggtgggacatggtgtgtaacgtgaagaagctgatcaacgagaaaaaggaggatggcaaggtgttttggcagaatctggctggctacaagagacaggaagccctgagaccatacctgagcagcgaggaagatcggaagaagggaaagaaattcgctcggtaccagctgggcgacctgctgctgcacctggaaaagaagcacggcgaggactggggaaaggtgtacgacgaggcctgggagcggattgacaagaaagtggaaggcctgagcaagcacatcaagctggaagaggaacggagaagcgaggacgcccagagcaaggccgccctgaccgactggctgcgggctaaggccagcttcgtgatcgagggcctgaaggaggccgacaaggacgagttctgcagatgcgagctgaagctgcagaagtggtacggggacctgcggggaaagcccttcgccatcgaagccgagaacagcatcctggacatcagcggcttcagcaagcagtacaactgtgccttcatctggcagaaggacggcgtgaagaagctgaacctgtacctgatcatcaactacttcaagggcggcaagctgcggttcaagaagatcaaacctgaagccttcgaagccaacagattctacaccgtgatcaacaaaaagagcggcgagatcgtgcccatggaggtgaacttcaacttcgacgaccccaacctgatcatcctgcctctggcctttggcaagagacagggcagagaattcatctggaacgacctgctgtccctggaaaccggcagcctgaagctggccaacggaagagtgatcgagaagacactgtacaacagaagaacccggcaggatgagcctgccctgttcgtggccctgaccttcgagcggcgggaggtcctggactcctccaatatcaaaccaatgaacctgatcggcgtggcaagaggcgaaaacatccccgccgtgatcgccctgaccgaccccgagggctgcccactgagccggtttaaggatagcctgggaaacccaacccacatcctgagaatcggcgagagctataaggagaagcagcggaccatccaggccaagaaggaggtggagcagcggagagccggcggctacagccggaagtacgccagcaaagccaagaatctggcagacgatatggtgagaaacaccgctagagatctgctgtactacgccgtgacccaggatgccatgctgatcttcgccaacctgagccggggcttcggccggcagggcaagcggaccttcatggccgagagacagtacacacggatggaggactggctgaccgccaagctggcctacgagggcctgagcaagacctacctgtccaagacactggcccagtacacctccaagacatgcagcaactgtgggtttaccatcaccagcgccgactacgacagggtgctggagaagctgaagaagacagcaacaggctggatgaccacaattaacggcaaggagctgaaggtggagggccagattacctactacaacagatacaagagacagaacgtagtcaaggacctgtccgtcgagctggatagactgagcgaagaatctgtgaacaacgacatctcctcctggacaaagggcagaagcggagaagctctgagcctcctgaagaaaagattctcccatagacccgtgcaggagaagttcgtgtgcctgaactgcggcttcgagacacacgcagccgagcaagccgccctgaacatcgccagatcctggctgttcctgcggagccaggagtacaagaaataccagacaaacaagacaaccggcaacaccgataagagagccttcgtcgagacctggcagtccttttaccggaagaagcttaaggaggtgtggaaacctgccgtgcggtctggcggatctggcggaggctccacaagcagccaggagcccgtgagcttcgaggaggtggccgtgtacttcagcagggaggagtgggccctgctggaccccgcccagagggccctgtacagggacgtgatgctggagacctacgagtgcgtggccagcctggcccccctgcccgcccccaagcccatggtgatcagcctgctggaggagggcgaggagccctggatccccgacgtgggcagccccgaggccgtggccggcgacgtgagccccaccagccccaagaaaaagagaaaagtctaagctgccttctgcggggcttgccttctggccatgcccttcttctctcccttgcacctgtacctcttggtctttgaataaagcctgagtaggaaggctagcaaaaaaaaaaaaaaaaaaaaaaaaaaaaaaaaaaaaaaaaaaaaaaaaaaaaaaaaaaaaaaaaaaaaaaaaaaaaaaaa

SEQ ID NO: 2915 - RNA, 5419 nt, synthetic construct
  source 1..5419: mol_type = other RNA
aggaaataagagagaaaagaagagtaagaagaaatataagagccaccatggcccctaagaagaagcgtaaagtgagccgggtgaacggcagcggcagcggcggcggcatgaaccacgaccaggagttcgacccccctaaggtgtaccctcccgtccccgccgagaagagaaagcccatccgggtcctgagcctgttcgatggcatcgccaccggtctgctggtgctgaaggacctgggcatccaggtggataggtacattgcctccgaggtgtgcgaggactccatcaccgtgggaatggtgcgtcatcagggcaagatcatgtacgtgggcgacgtgcggagcgtgacacagaagcatatccaggagtggggccctttcgacctggtgatcggcggcagcccttgcaatgacctgagcatcgtgaacccagcccggaagggcctgtacgagggaaccggcagactgttcttcgagttttacagactgctgcacgacgcccggcctaaggaaggcgacgaccggcccttcttttggctgttcgagaatgtggtggccatgggagtcagcgacaagcgggatattagccggttcctggagagcaaccccgtgatgatcgatgccaaggaagtgagcgccgcccaccgggccagatacttctggggcaatctgcctggcatgaacagacccctggccagcaccgtgaacgacaagctggagctgcaggagtgcctggagcacggccggatcgccaagttcagcaaggtgagaaccatcaccacccgaagcaacagcatcaaacaaggcaaggaccagcactttcctgtgttcatgaacgagaaggaggacatcctgtggtgtaccgagatggagagagtgttcgggttcccagtccactacacagatgtcagcaacatgtctagactggccagacagagactgctgggaagaagctggtccgtccctgtgatcagacacctgttcgcccctctgaaggagtacttcgcctgcgtgagcagcggcaacagcaacgccaacagccggggccccagcttctctagcggcctggtgccactgtccctgagagggagccacatgggccccatggagatctacaaaaccgtgagcgcctggaagcggcagcctgtgcgcgtgctgagcctgtttcggaatatcgataaagtcctgaaaagcctgggattcctggagagcggctctggctccggcggtggcaccctgaagtacgtggaggatgtgacaaacgtggtcagacgggatgtggagaagtggggccccttcgatctggtgtacggcagcacccaacccctgggcagctcttgtgaccggtgccctggctggtacatgtttcagttccaccggatcctgcagtacgccctgccgagacaggagtcccagcggccattcttttggattttcatggacaacttgctgctgaccgaggatgaccaggaaactaccactcggttcctgcagaccgaagccgtgaccctgcaggacgtgagaggccgggactaccagaacgccatgcgggtgtggtccaacatccctggactgaaaagcaagcacgcacctctgacccctaaagaagaggagtacctgcaggcccaggtgcggagcagaagcaagctggacgcccctaaggtggatctgctggtgaagaattgcctcctgcccctgagagagtacttcaagtatttcagccagaatagtctgcccctgggcggcccaagcagcggcgcccctcctcccagcggcggcagcccagccggctccccaacctctaccgaggagggcacctctgagtccgccacccccgagagcggccctggcacctccaccgagcccagcgagggcagcgcacccggcagccctgccggcagccccacctccacagaggagggaaccagcaccgagcccagcgaaggcagcgccccaggcaccagcaccgagcctagtgagggcggctctggcggcggcagcgcccaggagattaaacggatcaacaagatcagaagaagacttgtgaaagacagcaacaccaagaaggccggcaagacaggccccatgaaaaccctgctggttagagtgatgacacccgatctgagagagcggctggaaaacctgagaaagaagcctgaaaatatcccccagcccatcagcaatacatctagagccaacctgaataagctgctgaccgattacaccgaaatgaagaaggcgatcctgcatgtgtactgggaagagttccagaaggaccctgtgggcctgatgagccgggtggcccagcctgccagcaagaagatcgatcagaacaagctgaaacctgagatggacgagaagggcaacctgaccaccgccggctttgcctgctctcagtgtggccagcccctgttcgtgtacaagctggagcaggtgtctgagaagggcaaggcttacaccaactacttcggacggtgcaatgtggccgagcacgaaaagctgatcctgctggcccagctgaagcccgagaaggatagcgacgaagccgtgacatatagcctgggaaagtttgggcagagggccctggatttctacagcattcatgtgaccaaggagtccacccaccccgtgaagcccctggcccagatcgccggaaacagatacgcctccggacctgtgggaaaggccctgagcgacgcatgtatgggcacaatcgcctccttcctgtctaagtaccaggacatcatcatcgaacaccagaaggtggtgaagggcaaccagaagagactggagagcctgcgggagctggccggcaaggaaaacctggaataccctagcgtgaccctgccacctcagcctcacaccaaggagggcgttgatgcctacaacgaagtgatcgcccgggtgcgaatgtgggtgaacctgaacctgtggcagaagctgaagctaagcagagatgatgccaagcctctgctgagactgaagggattcccttcctttcctctggtcgagagacaggccaacgaagtggactggtgggacatggtgtgtaacgtgaagaagctgatcaacgagaaaaaggaggatggcaaggtgttttggcagaatctggctggctacaagagacaggaagccctgagaccatacctgagcagcgaggaagatcggaagaagggaaagaaattcgctcggtaccagctgggcgacctgctgctgcacctggaaaagaagcacggcgaggactggggaaaggtgtacgacgaggcctgggagcggattgacaagaaagtggaaggcctgagcaagcacatcaagctggaagaggaacggagaagcgaggacgcccagagcaaggccgccctgaccgactggctgcgggctaaggccagcttcgtgatcgagggcctgaaggaggccgacaaggacgagttctgcagatgcgagctgaagctgcagaagtggtacggggacctgcggggaaagcccttcgccatcgaagccgagaacagcatcctggacatcagcggcttcagcaagcagtacaactgtgccttcatctggcagaaggacggcgtgaagaagctgaacctgtacctgatcatcaactacttcaagggcggcaagctgcggttcaagaagatcaaacctgaagccttcgaagccaacagattctacaccgtgatcaacaaaaagagcggcgagatcgtgcccatggaggtgaacttcaacttcgacgaccccaacctgatcatcctgcctctggcctttggcaagagacagggcagagaattcatctggaacgacctgctgtccctggaaaccggcagcctgaagctggccaacggaagagtgatcgagaagacactgtacaacagaagaacccggcaggatgagcctgccctgttcgtggccctgaccttcgagcggcgggaggtcctggactcctccaatatcaaaccaatgaacctgatcggcgtggcaagaggcgaaaacatccccgccgtgatcgccctgaccgaccccgagggctgcccactgagccggtttaaggatagcctgggaaacccaacccacatcctgagaatcggcgagagctataaggagaagcagcggaccatccaggccaagaaggaggtggagcagcggagagccggcggctacagccggaagtacgccagcaaagccaagaatctggcagacgatatggtgagaaacaccgctagagatctgctgtactacgccgtgacccaggatgccatgctgatcttcgccaacctgagccggggcttcggccggcagggcaagcggaccttcatggccgagagacagtacacacggatggaggactggctgaccgccaagctggcctacgagggcctgagcaagacctacctgtccaagacactggcccagtacacctccaagacatgcagcaactgtgggtttaccatcaccagcgccgactacgacagggtgctggagaagctgaagaagacagcaacaggctggatgaccacaattaacggcaaggagctgaaggtggagggccagattacctactacaacagatacaagagacagaacgtagtcaaggacctgtccgtcgagctggatagactgagcgaagaatctgtgaacaacgacatctcctcctggacaaagggcagaagcggagaagctctgagcctcctgaagaaaagattctcccatagacccgtgcaggagaagttcgtgtgcctgaactgcggcttcgagacacacgcagccgagcaagccgccctgaacatcgccagatcctggctgttcctgcggagccaggagtacaagaaataccagacaaacaagacaaccggcaacaccgataagagagccttcgtcgagacctggcagtccttttaccggaagaagcttaaggaggtgtggaaacctgccgtgcggtctggcggatctggcggaggctccacaagcgcccaggcccccctgagcttcgaggacgtggccgtgagcttcagcagggaggagtggaggctgctggtgcccgcccagaaggacctgtacagggacgtgatgctggagaactacaggaacctggtgagcgtgggctaccaggccagcgagcccggcagcctgttccagctggagcacgccggccccctgagggccgtggagggcgccgcccccaggcccccctgccccgaggagatctgggagaccagccccaagaaaaagagaaaagtctaagctgccttctgcggggcttgccttctggccatgcccttcttctctcccttgcacctgtacctcttggtctttgaataaagcctgagtaggaaggctagcaaaaaaaaaaaaaaaaaaaaaaaaaaaaaaaaaaaaaaaaaaaaaaaaaaaaaaaaaaaaaaaaaaaaaaaaaaaaaaaa

SEQ ID NO: 2916 - RNA, 5419 nt, synthetic construct
  source 1..5419: mol_type = other RNA
aggaaataagagagaaaagaagagtaagaagaaatataagagccaccatggcccctaagaagaagcgtaaagtgagccgggtgaacggcagcggcagcggcggcggcatgaaccacgaccaggagttcgacccccctaaggtgtaccctcccgtccccgccgagaagagaaagcccatccgggtcctgagcctgttcgatggcatcgccaccggtctgctggtgctgaaggacctgggcatccaggtggataggtacattgcctccgaggtgtgcgaggactccatcaccgtgggaatggtgcgtcatcagggcaagatcatgtacgtgggcgacgtgcggagcgtgacacagaagcatatccaggagtggggccctttcgacctggtgatcggcggcagcccttgcaatgacctgagcatcgtgaacccagcccggaagggcctgtacgagggaaccggcagactgttcttcgagttttacagactgctgcacgacgcccggcctaaggaaggcgacgaccggcccttcttttggctgttcgagaatgtggtggccatgggagtcagcgacaagcgggatattagccggttcctggagagcaaccccgtgatgatcgatgccaaggaagtgagcgccgcccaccgggccagatacttctggggcaatctgcctggcatgaacagacccctggccagcaccgtgaacgacaagctggagctgcaggagtgcctggagcacggccggatcgccaagttcagcaaggtgagaaccatcaccacccgaagcaacagcatcaaacaaggcaaggaccagcactttcctgtgttcatgaacgagaaggaggacatcctgtggtgtaccgagatggagagagtgttcgggttcccagtccactacacagatgtcagcaacatgtctagactggccagacagagactgctgggaagaagctggtccgtccctgtgatcagacacctgttcgcccctctgaaggagtacttcgcctgcgtgagcagcggcaacagcaacgccaacagccggggccccagcttctctagcggcctggtgccactgtccctgagagggagccacatgggccccatggagatctacaaaaccgtgagcgcctggaagcggcagcctgtgcgcgtgctgagcctgtttcggaatatcgataaagtcctgaaaagcctgggattcctggagagcggctctggctccggcggtggcaccctgaagtacgtggaggatgtgacaaacgtggtcagacgggatgtggagaagtggggccccttcgatctggtgtacggcagcacccaacccctgggcagctcttgtgaccggtgccctggctggtacatgtttcagttccaccggatcctgcagtacgccctgccgagacaggagtcccagcggccattcttttggattttcatggacaacttgctgctgaccgaggatgaccaggaaactaccactcggttcctgcagaccgaagccgtgaccctgcaggacgtgagaggccgggactaccagaacgccatgcgggtgtggtccaacatccctggactgaaaagcaagcacgcacctctgacccctaaagaagaggagtacctgcaggcccaggtgcggagcagaagcaagctggacgcccctaaggtggatctgctggtgaagaattgcctcctgcccctgagagagtacttcaagtatttcagccagaatagtctgcccctgggcggcccaagcagcggcgcccctcctcccagcggcggcagcccagccggctccccaacctctaccgaggagggcacctctgagtccgccacccccgagagcggccctggcacctccaccgagcccagcgagggcagcgcacccggcagccctgccggcagccccacctccacagaggagggaaccagcaccgagcccagcgaaggcagcgccccaggcaccagcaccgagcctagtgagggcggctctggcggcggcagcgcccaggagattaaacggatcaacaagatcagaagaagacttgtgaaagacagcaacaccaagaaggccggcaagacaggccccatgaaaaccctgctggttagagtgatgacacccgatctgagagagcggctggaaaacctgagaaagaagcctgaaaatatcccccagcccatcagcaatacatctagagccaacctgaataagctgctgaccgattacaccgaaatgaagaaggcgatcctgcatgtgtactgggaagagttccagaaggaccctgtgggcctgatgagccgggtggcccagcctgccagcaagaagatcgatcagaacaagctgaaacctgagatggacgagaagggcaacctgaccaccgccggctttgcctgctctcagtgtggccagcccctgttcgtgtacaagctggagcaggtgtctgagaagggcaaggcttacaccaactacttcggacggtgcaatgtggccgagcacgaaaagctgatcctgctggcccagctgaagcccgagaaggatagcgacgaagccgtgacatatagcctgggaaagtttgggcagagggccctggatttctacagcattcatgtgaccaaggagtccacccaccccgtgaagcccctggcccagatcgccggaaacagatacgcctccggacctgtgggaaaggccctgagcgacgcatgtatgggcacaatcgcctccttcctgtctaagtaccaggacatcatcatcgaacaccagaaggtggtgaagggcaaccagaagagactggagagcctgcgggagctggccggcaaggaaaacctggaataccctagcgtgaccctgccacctcagcctcacaccaaggagggcgttgatgcctacaacgaagtgatcgcccgggtgcgaatgtgggtgaacctgaacctgtggcagaagctgaagctaagcagagatgatgccaagcctctgctgagactgaagggattcccttcctttcctctggtcgagagacaggccaacgaagtggactggtgggacatggtgtgtaacgtgaagaagctgatcaacgagaaaaaggaggatggcaaggtgttttggcagaatctggctggctacaagagacaggaagccctgagaccatacctgagcagcgaggaagatcggaagaagggaaagaaattcgctcggtaccagctgggcgacctgctgctgcacctggaaaagaagcacggcgaggactggggaaaggtgtacgacgaggcctgggagcggattgacaagaaagtggaaggcctgagcaagcacatcaagctggaagaggaacggagaagcgaggacgcccagagcaaggccgccctgaccgactggctgcgggctaaggccagcttcgtgatcgagggcctgaaggaggccgacaaggacgagttctgcagatgcgagctgaagctgcagaagtggtacggggacctgcggggaaagcccttcgccatcgaagccgagaacagcatcctggacatcagcggcttcagcaagcagtacaactgtgccttcatctggcagaaggacggcgtgaagaagctgaacctgtacctgatcatcaactacttcaagggcggcaagctgcggttcaagaagatcaaacctgaagccttcgaagccaacagattctacaccgtgatcaacaaaaagagcggcgagatcgtgcccatggaggtgaacttcaacttcgacgaccccaacctgatcatcctgcctctggcctttggcaagagacagggcagagaattcatctggaacgacctgctgtccctggaaaccggcagcctgaagctggccaacggaagagtgatcgagaagacactgtacaacagaagaacccggcaggatgagcctgccctgttcgtggccctgaccttcgagcggcgggaggtcctggactcctccaatatcaaaccaatgaacctgatcggcgtggcaagaggcgaaaacatccccgccgtgatcgccctgaccgaccccgagggctgcccactgagccggtttaaggatagcctgggaaacccaacccacatcctgagaatcggcgagagctataaggagaagcagcggaccatccaggccaagaaggaggtggagcagcggagagccggcggctacagccggaagtacgccagcaaagccaagaatctggcagacgatatggtgagaaacaccgctagagatctgctgtactacgccgtgacccaggatgccatgctgatcttcgccaacctgagccggggcttcggccggcagggcaagcggaccttcatggccgagagacagtacacacggatggaggactggctgaccgccaagctggcctacgagggcctgagcaagacctacctgtccaagacactggcccagtacacctccaagacatgcagcaactgtgggtttaccatcaccagcgccgactacgacagggtgctggagaagctgaagaagacagcaacaggctggatgaccacaattaacggcaaggagctgaaggtggagggccagattacctactacaacagatacaagagacagaacgtagtcaaggacctgtccgtcgagctggatagactgagcgaagaatctgtgaacaacgacatctcctcctggacaaagggcagaagcggagaagctctgagcctcctgaagaaaagattctcccatagacccgtgcaggagaagttcgtgtgcctgaactgcggcttcgagacacacgcagccgagcaagccgccctgaacatcgccagatcctggctgttcctgcggagccaggagtacaagaaataccagacaaacaagacaaccggcaacaccgataagagagccttcgtcgagacctggcagtccttttaccggaagaagcttaaggaggtgtggaaacctgccgtgcggtctggcggatctggcggaggctccacaagcccccaggagcccgtgaccttcgccgacgtggccgtgctgttcacccccgaggagtggctgttcctggacagcgcccagaagagcctgtacagggacgtgatgctggagaactacaggaacctggccagcgtgggcgaccagctgtgcaagaccaagatgagcagccacatggagcagagggaggagctgtgcgtgaccgagaggggcgtgttccccggcgcccacctgggcccccacctgcagaccagccccaagaaaaagagaaaagtctaagctgccttctgcggggcttgccttctggccatgcccttcttctctcccttgcacctgtacctcttggtctttgaataaagcctgagtaggaaggctagcaaaaaaaaaaaaaaaaaaaaaaaaaaaaaaaaaaaaaaaaaaaaaaaaaaaaaaaaaaaaaaaaaaaaaaaaaaaaaaaa

SEQ ID NO: 2917 - RNA, 5419 nt, synthetic construct
  source 1..5419: mol_type = other RNA
aggaaataagagagaaaagaagagtaagaagaaatataagagccaccatggcccctaagaagaagcgtaaagtgagccgggtgaacggcagcggcagcggcggcggcatgaaccacgaccaggagttcgacccccctaaggtgtaccctcccgtccccgccgagaagagaaagcccatccgggtcctgagcctgttcgatggcatcgccaccggtctgctggtgctgaaggacctgggcatccaggtggataggtacattgcctccgaggtgtgcgaggactccatcaccgtgggaatggtgcgtcatcagggcaagatcatgtacgtgggcgacgtgcggagcgtgacacagaagcatatccaggagtggggccctttcgacctggtgatcggcggcagcccttgcaatgacctgagcatcgtgaacccagcccggaagggcctgtacgagggaaccggcagactgttcttcgagttttacagactgctgcacgacgcccggcctaaggaaggcgacgaccggcccttcttttggctgttcgagaatgtggtggccatgggagtcagcgacaagcgggatattagccggttcctggagagcaaccccgtgatgatcgatgccaaggaagtgagcgccgcccaccgggccagatacttctggggcaatctgcctggcatgaacagacccctggccagcaccgtgaacgacaagctggagctgcaggagtgcctggagcacggccggatcgccaagttcagcaaggtgagaaccatcaccacccgaagcaacagcatcaaacaaggcaaggaccagcactttcctgtgttcatgaacgagaaggaggacatcctgtggtgtaccgagatggagagagtgttcgggttcccagtccactacacagatgtcagcaacatgtctagactggccagacagagactgctgggaagaagctggtccgtccctgtgatcagacacctgttcgcccctctgaaggagtacttcgcctgcgtgagcagcggcaacagcaacgccaacagccggggccccagcttctctagcggcctggtgccactgtccctgagagggagccacatgggccccatggagatctacaaaaccgtgagcgcctggaagcggcagcctgtgcgcgtgctgagcctgtttcggaatatcgataaagtcctgaaaagcctgggattcctggagagcggctctggctccggcggtggcaccctgaagtacgtggaggatgtgacaaacgtggtcagacgggatgtggagaagtggggccccttcgatctggtgtacggcagcacccaacccctgggcagctcttgtgaccggtgccctggctggtacatgtttcagttccaccggatcctgcagtacgccctgccgagacaggagtcccagcggccattcttttggattttcatggacaacttgctgctgaccgaggatgaccaggaaactaccactcggttcctgcagaccgaagccgtgaccctgcaggacgtgagaggccgggactaccagaacgccatgcgggtgtggtccaacatccctggactgaaaagcaagcacgcacctctgacccctaaagaagaggagtacctgcaggcccaggtgcggagcagaagcaagctggacgcccctaaggtggatctgctggtgaagaattgcctcctgcccctgagagagtacttcaagtatttcagccagaatagtctgcccctgggcggcccaagcagcggcgcccctcctcccagcggcggcagcccagccggctccccaacctctaccgaggagggcacctctgagtccgccacccccgagagcggccctggcacctccaccgagcccagcgagggcagcgcacccggcagccctgccggcagccccacctccacagaggagggaaccagcaccgagcccagcgaaggcagcgccccaggcaccagcaccgagcctagtgagggcggctctggcggcggcagcgcccaggagattaaacggatcaacaagatcagaagaagacttgtgaaagacagcaacaccaagaaggccggcaagacaggccccatgaaaaccctgctggttagagtgatgacacccgatctgagagagcggctggaaaacctgagaaagaagcctgaaaatatcccccagcccatcagcaatacatctagagccaacctgaataagctgctgaccgattacaccgaaatgaagaaggcgatcctgcatgtgtactgggaagagttccagaaggaccctgtgggcctgatgagccgggtggcccagcctgccagcaagaagatcgatcagaacaagctgaaacctgagatggacgagaagggcaacctgaccaccgccggctttgcctgctctcagtgtggccagcccctgttcgtgtacaagctggagcaggtgtctgagaagggcaaggcttacaccaactacttcggacggtgcaatgtggccgagcacgaaaagctgatcctgctggcccagctgaagcccgagaaggatagcgacgaagccgtgacatatagcctgggaaagtttgggcagagggccctggatttctacagcattcatgtgaccaaggagtccacccaccccgtgaagcccctggcccagatcgccggaaacagatacgcctccggacctgtgggaaaggccctgagcgacgcatgtatgggcacaatcgcctccttcctgtctaagtaccaggacatcatcatcgaacaccagaaggtggtgaagggcaaccagaagagactggagagcctgcgggagctggccggcaaggaaaacctggaataccctagcgtgaccctgccacctcagcctcacaccaaggagggcgttgatgcctacaacgaagtgatcgcccgggtgcgaatgtgggtgaacctgaacctgtggcagaagctgaagctaagcagagatgatgccaagcctctgctgagactgaagggattcccttcctttcctctggtcgagagacaggccaacgaagtggactggtgggacatggtgtgtaacgtgaagaagctgatcaacgagaaaaaggaggatggcaaggtgttttggcagaatctggctggctacaagagacaggaagccctgagaccatacctgagcagcgaggaagatcggaagaagggaaagaaattcgctcggtaccagctgggcgacctgctgctgcacctggaaaagaagcacggcgaggactggggaaaggtgtacgacgaggcctgggagcggattgacaagaaagtggaaggcctgagcaagcacatcaagctggaagaggaacggagaagcgaggacgcccagagcaaggccgccctgaccgactggctgcgggctaaggccagcttcgtgatcgagggcctgaaggaggccgacaaggacgagttctgcagatgcgagctgaagctgcagaagtggtacggggacctgcggggaaagcccttcgccatcgaagccgagaacagcatcctggacatcagcggcttcagcaagcagtacaactgtgccttcatctggcagaaggacggcgtgaagaagctgaacctgtacctgatcatcaactacttcaagggcggcaagctgcggttcaagaagatcaaacctgaagccttcgaagccaacagattctacaccgtgatcaacaaaaagagcggcgagatcgtgcccatggaggtgaacttcaacttcgacgaccccaacctgatcatcctgcctctggcctttggcaagagacagggcagagaattcatctggaacgacctgctgtccctggaaaccggcagcctgaagctggccaacggaagagtgatcgagaagacactgtacaacagaagaacccggcaggatgagcctgccctgttcgtggccctgaccttcgagcggcgggaggtcctggactcctccaatatcaaaccaatgaacctgatcggcgtggcaagaggcgaaaacatccccgccgtgatcgccctgaccgaccccgagggctgcccactgagccggtttaaggatagcctgggaaacccaacccacatcctgagaatcggcgagagctataaggagaagcagcggaccatccaggccaagaaggaggtggagcagcggagagccggcggctacagccggaagtacgccagcaaagccaagaatctggcagacgatatggtgagaaacaccgctagagatctgctgtactacgccgtgacccaggatgccatgctgatcttcgccaacctgagccggggcttcggccggcagggcaagcggaccttcatggccgagagacagtacacacggatggaggactggctgaccgccaagctggcctacgagggcctgagcaagacctacctgtccaagacactggcccagtacacctccaagacatgcagcaactgtgggtttaccatcaccagcgccgactacgacagggtgctggagaagctgaagaagacagcaacaggctggatgaccacaattaacggcaaggagctgaaggtggagggccagattacctactacaacagatacaagagacagaacgtagtcaaggacctgtccgtcgagctggatagactgagcgaagaatctgtgaacaacgacatctcctcctggacaaagggcagaagcggagaagctctgagcctcctgaagaaaagattctcccatagacccgtgcaggagaagttcgtgtgcctgaactgcggcttcgagacacacgcagccgagcaagccgccctgaacatcgccagatcctggctgttcctgcggagccaggagtacaagaaataccagacaaacaagacaaccggcaacaccgataagagagccttcgtcgagacctggcagtccttttaccggaagaagcttaaggaggtgtggaaacctgccgtgcggtctggcggatctggcggaggctccacaagcatggccttcgaggacgtggccgtgtacttcagccaggaggagtggggcctgctggacaccgcccagagggccctgtacaggcacgtgatgctggagaacttcaccctggtgagcagcctgggcctgagcaccagcaggcccagggtggtggtgcagctggagaggggcgaggagccctgggtgcccagcaggatcgacagcacccccgccaggaacgcccagggcaggaggaaccccggcagcaccagccccaagaaaaagagaaaagtctaagctgccttctgcggggcttgccttctggccatgcccttcttctctcccttgcacctgtacctcttggtctttgaataaagcctgagtaggaaggctagcaaaaaaaaaaaaaaaaaaaaaaaaaaaaaaaaaaaaaaaaaaaaaaaaaaaaaaaaaaaaaaaaaaaaaaaaaaaaaaaa

SEQ ID NO: 2918 - RNA, 5419 nt, synthetic construct
  source 1..5419: mol_type = other RNA
aggaaataagagagaaaagaagagtaagaagaaatataagagccaccatggcccctaagaagaagcgtaaagtgagccgggtgaacggcagcggcagcggcggcggcatgaaccacgaccaggagttcgacccccctaaggtgtaccctcccgtccccgccgagaagagaaagcccatccgggtcctgagcctgttcgatggcatcgccaccggtctgctggtgctgaaggacctgggcatccaggtggataggtacattgcctccgaggtgtgcgaggactccatcaccgtgggaatggtgcgtcatcagggcaagatcatgtacgtgggcgacgtgcggagcgtgacacagaagcatatccaggagtggggccctttcgacctggtgatcggcggcagcccttgcaatgacctgagcatcgtgaacccagcccggaagggcctgtacgagggaaccggcagactgttcttcgagttttacagactgctgcacgacgcccggcctaaggaaggcgacgaccggcccttcttttggctgttcgagaatgtggtggccatgggagtcagcgacaagcgggatattagccggttcctggagagcaaccccgtgatgatcgatgccaaggaagtgagcgccgcccaccgggccagatacttctggggcaatctgcctggcatgaacagacccctggccagcaccgtgaacgacaagctggagctgcaggagtgcctggagcacggccggatcgccaagttcagcaaggtgagaaccatcaccacccgaagcaacagcatcaaacaaggcaaggaccagcactttcctgtgttcatgaacgagaaggaggacatcctgtggtgtaccgagatggagagagtgttcgggttcccagtccactacacagatgtcagcaacatgtctagactggccagacagagactgctgggaagaagctggtccgtccctgtgatcagacacctgttcgcccctctgaaggagtacttcgcctgcgtgagcagcggcaacagcaacgccaacagccggggccccagcttctctagcggcctggtgccactgtccctgagagggagccacatgggccccatggagatctacaaaaccgtgagcgcctggaagcggcagcctgtgcgcgtgctgagcctgtttcggaatatcgataaagtcctgaaaagcctgggattcctggagagcggctctggctccggcggtggcaccctgaagtacgtggaggatgtgacaaacgtggtcagacgggatgtggagaagtggggccccttcgatctggtgtacggcagcacccaacccctgggcagctcttgtgaccggtgccctggctggtacatgtttcagttccaccggatcctgcagtacgccctgccgagacaggagtcccagcggccattcttttggattttcatggacaacttgctgctgaccgaggatgaccaggaaactaccactcggttcctgcagaccgaagccgtgaccctgcaggacgtgagaggccgggactaccagaacgccatgcgggtgtggtccaacatccctggactgaaaagcaagcacgcacctctgacccctaaagaagaggagtacctgcaggcccaggtgcggagcagaagcaagctggacgcccctaaggtggatctgctggtgaagaattgcctcctgcccctgagagagtacttcaagtatttcagccagaatagtctgcccctgggcggcccaagcagcggcgcccctcctcccagcggcggcagcccagccggctccccaacctctaccgaggagggcacctctgagtccgccacccccgagagcggccctggcacctccaccgagcccagcgagggcagcgcacccggcagccctgccggcagccccacctccacagaggagggaaccagcaccgagcccagcgaaggcagcgccccaggcaccagcaccgagcctagtgagggcggctctggcggcggcagcgcccaggagattaaacggatcaacaagatcagaagaagacttgtgaaagacagcaacaccaagaaggccggcaagacaggccccatgaaaaccctgctggttagagtgatgacacccgatctgagagagcggctggaaaacctgagaaagaagcctgaaaatatcccccagcccatcagcaatacatctagagccaacctgaataagctgctgaccgattacaccgaaatgaagaaggcgatcctgcatgtgtactgggaagagttccagaaggaccctgtgggcctgatgagccgggtggcccagcctgccagcaagaagatcgatcagaacaagctgaaacctgagatggacgagaagggcaacctgaccaccgccggctttgcctgctctcagtgtggccagcccctgttcgtgtacaagctggagcaggtgtctgagaagggcaaggcttacaccaactacttcggacggtgcaatgtggccgagcacgaaaagctgatcctgctggcccagctgaagcccgagaaggatagcgacgaagccgtgacatatagcctgggaaagtttgggcagagggccctggatttctacagcattcatgtgaccaaggagtccacccaccccgtgaagcccctggcccagatcgccggaaacagatacgcctccggacctgtgggaaaggccctgagcgacgcatgtatgggcacaatcgcctccttcctgtctaagtaccaggacatcatcatcgaacaccagaaggtggtgaagggcaaccagaagagactggagagcctgcgggagctggccggcaaggaaaacctggaataccctagcgtgaccctgccacctcagcctcacaccaaggagggcgttgatgcctacaacgaagtgatcgcccgggtgcgaatgtgggtgaacctgaacctgtggcagaagctgaagctaagcagagatgatgccaagcctctgctgagactgaagggattcccttcctttcctctggtcgagagacaggccaacgaagtggactggtgggacatggtgtgtaacgtgaagaagctgatcaacgagaaaaaggaggatggcaaggtgttttggcagaatctggctggctacaagagacaggaagccctgagaccatacctgagcagcgaggaagatcggaagaagggaaagaaattcgctcggtaccagctgggcgacctgctgctgcacctggaaaagaagcacggcgaggactggggaaaggtgtacgacgaggcctgggagcggattgacaagaaagtggaaggcctgagcaagcacatcaagctggaagaggaacggagaagcgaggacgcccagagcaaggccgccctgaccgactggctgcgggctaaggccagcttcgtgatcgagggcctgaaggaggccgacaaggacgagttctgcagatgcgagctgaagctgcagaagtggtacggggacctgcggggaaagcccttcgccatcgaagccgagaacagcatcctggacatcagcggcttcagcaagcagtacaactgtgccttcatctggcagaaggacggcgtgaagaagctgaacctgtacctgatcatcaactacttcaagggcggcaagctgcggttcaagaagatcaaacctgaagccttcgaagccaacagattctacaccgtgatcaacaaaaagagcggcgagatcgtgcccatggaggtgaacttcaacttcgacgaccccaacctgatcatcctgcctctggcctttggcaagagacagggcagagaattcatctggaacgacctgctgtccctggaaaccggcagcctgaagctggccaacggaagagtgatcgagaagacactgtacaacagaagaacccggcaggatgagcctgccctgttcgtggccctgaccttcgagcggcgggaggtcctggactcctccaatatcaaaccaatgaacctgatcggcgtggcaagaggcgaaaacatccccgccgtgatcgccctgaccgaccccgagggctgcccactgagccggtttaaggatagcctgggaaacccaacccacatcctgagaatcggcgagagctataaggagaagcagcggaccatccaggccaagaaggaggtggagcagcggagagccggcggctacagccggaagtacgccagcaaagccaagaatctggcagacgatatggtgagaaacaccgctagagatctgctgtactacgccgtgacccaggatgccatgctgatcttcgccaacctgagccggggcttcggccggcagggcaagcggaccttcatggccgagagacagtacacacggatggaggactggctgaccgccaagctggcctacgagggcctgagcaagacctacctgtccaagacactggcccagtacacctccaagacatgcagcaactgtgggtttaccatcaccagcgccgactacgacagggtgctggagaagctgaagaagacagcaacaggctggatgaccacaattaacggcaaggagctgaaggtggagggccagattacctactacaacagatacaagagacagaacgtagtcaaggacctgtccgtcgagctggatagactgagcgaagaatctgtgaacaacgacatctcctcctggacaaagggcagaagcggagaagctctgagcctcctgaagaaaagattctcccatagacccgtgcaggagaagttcgtgtgcctgaactgcggcttcgagacacacgcagccgagcaagccgccctgaacatcgccagatcctggctgttcctgcggagccaggagtacaagaaataccagacaaacaagacaaccggcaacaccgataagagagccttcgtcgagacctggcagtccttttaccggaagaagcttaaggaggtgtggaaacctgccgtgcggtctggcggatctggcggaggctccacaagcagccaggccagcgtgagcttcaaggacgtgaacgtggagttcacccaggacgagtggcagcagatgggccccgcccagaggaacctgtacagggacgtgatgctggagaactacagcaacctggtgagcgtgggctactgcatcttcaagcccaaggtgatcttcaggctggagcagggcgaggagccctggagcagcgaggaggagttcagcagccagaggaggcccaagaactacagggacaccagccccaagaaaaagagaaaagtctaagctgccttctgcggggcttgccttctggccatgcccttcttctctcccttgcacctgtacctcttggtctttgaataaagcctgagtaggaaggctagcaaaaaaaaaaaaaaaaaaaaaaaaaaaaaaaaaaaaaaaaaaaaaaaaaaaaaaaaaaaaaaaaaaaaaaaaaaaaaaaa

SEQ ID NO: 2919 - RNA, 5419 nt, synthetic construct
  source 1..5419: mol_type = other RNA
aggaaataagagagaaaagaagagtaagaagaaatataagagccaccatggcccctaagaagaagcgtaaagtgagccgggtgaacggcagcggcagcggcggcggcatgaaccacgaccaggagttcgacccccctaaggtgtaccctcccgtccccgccgagaagagaaagcccatccgggtcctgagcctgttcgatggcatcgccaccggtctgctggtgctgaaggacctgggcatccaggtggataggtacattgcctccgaggtgtgcgaggactccatcaccgtgggaatggtgcgtcatcagggcaagatcatgtacgtgggcgacgtgcggagcgtgacacagaagcatatccaggagtggggccctttcgacctggtgatcggcggcagcccttgcaatgacctgagcatcgtgaacccagcccggaagggcctgtacgagggaaccggcagactgttcttcgagttttacagactgctgcacgacgcccggcctaaggaaggcgacgaccggcccttcttttggctgttcgagaatgtggtggccatgggagtcagcgacaagcgggatattagccggttcctggagagcaaccccgtgatgatcgatgccaaggaagtgagcgccgcccaccgggccagatacttctggggcaatctgcctggcatgaacagacccctggccagcaccgtgaacgacaagctggagctgcaggagtgcctggagcacggccggatcgccaagttcagcaaggtgagaaccatcaccacccgaagcaacagcatcaaacaaggcaaggaccagcactttcctgtgttcatgaacgagaaggaggacatcctgtggtgtaccgagatggagagagtgttcgggttcccagtccactacacagatgtcagcaacatgtctagactggccagacagagactgctgggaagaagctggtccgtccctgtgatcagacacctgttcgcccctctgaaggagtacttcgcctgcgtgagcagcggcaacagcaacgccaacagccggggccccagcttctctagcggcctggtgccactgtccctgagagggagccacatgggccccatggagatctacaaaaccgtgagcgcctggaagcggcagcctgtgcgcgtgctgagcctgtttcggaatatcgataaagtcctgaaaagcctgggattcctggagagcggctctggctccggcggtggcaccctgaagtacgtggaggatgtgacaaacgtggtcagacgggatgtggagaagtggggccccttcgatctggtgtacggcagcacccaacccctgggcagctcttgtgaccggtgccctggctggtacatgtttcagttccaccggatcctgcagtacgccctgccgagacaggagtcccagcggccattcttttggattttcatggacaacttgctgctgaccgaggatgaccaggaaactaccactcggttcctgcagaccgaagccgtgaccctgcaggacgtgagaggccgggactaccagaacgccatgcgggtgtggtccaacatccctggactgaaaagcaagcacgcacctctgacccctaaagaagaggagtacctgcaggcccaggtgcggagcagaagcaagctggacgcccctaaggtggatctgctggtgaagaattgcctcctgcccctgagagagtacttcaagtatttcagccagaatagtctgcccctgggcggcccaagcagcggcgcccctcctcccagcggcggcagcccagccggctccccaacctctaccgaggagggcacctctgagtccgccacccccgagagcggccctggcacctccaccgagcccagcgagggcagcgcacccggcagccctgccggcagccccacctccacagaggagggaaccagcaccgagcccagcgaaggcagcgccccaggcaccagcaccgagcctagtgagggcggctctggcggcggcagcgcccaggagattaaacggatcaacaagatcagaagaagacttgtgaaagacagcaacaccaagaaggccggcaagacaggccccatgaaaaccctgctggttagagtgatgacacccgatctgagagagcggctggaaaacctgagaaagaagcctgaaaatatcccccagcccatcagcaatacatctagagccaacctgaataagctgctgaccgattacaccgaaatgaagaaggcgatcctgcatgtgtactgggaagagttccagaaggaccctgtgggcctgatgagccgggtggcccagcctgccagcaagaagatcgatcagaacaagctgaaacctgagatggacgagaagggcaacctgaccaccgccggctttgcctgctctcagtgtggccagcccctgttcgtgtacaagctggagcaggtgtctgagaagggcaaggcttacaccaactacttcggacggtgcaatgtggccgagcacgaaaagctgatcctgctggcccagctgaagcccgagaaggatagcgacgaagccgtgacatatagcctgggaaagtttgggcagagggccctggatttctacagcattcatgtgaccaaggagtccacccaccccgtgaagcccctggcccagatcgccggaaacagatacgcctccggacctgtgggaaaggccctgagcgacgcatgtatgggcacaatcgcctccttcctgtctaagtaccaggacatcatcatcgaacaccagaaggtggtgaagggcaaccagaagagactggagagcctgcgggagctggccggcaaggaaaacctggaataccctagcgtgaccctgccacctcagcctcacaccaaggagggcgttgatgcctacaacgaagtgatcgcccgggtgcgaatgtgggtgaacctgaacctgtggcagaagctgaagctaagcagagatgatgccaagcctctgctgagactgaagggattcccttcctttcctctggtcgagagacaggccaacgaagtggactggtgggacatggtgtgtaacgtgaagaagctgatcaacgagaaaaaggaggatggcaaggtgttttggcagaatctggctggctacaagagacaggaagccctgagaccatacctgagcagcgaggaagatcggaagaagggaaagaaattcgctcggtaccagctgggcgacctgctgctgcacctggaaaagaagcacggcgaggactggggaaaggtgtacgacgaggcctgggagcggattgacaagaaagtggaaggcctgagcaagcacatcaagctggaagaggaacggagaagcgaggacgcccagagcaaggccgccctgaccgactggctgcgggctaaggccagcttcgtgatcgagggcctgaaggaggccgacaaggacgagttctgcagatgcgagctgaagctgcagaagtggtacggggacctgcggggaaagcccttcgccatcgaagccgagaacagcatcctggacatcagcggcttcagcaagcagtacaactgtgccttcatctggcagaaggacggcgtgaagaagctgaacctgtacctgatcatcaactacttcaagggcggcaagctgcggttcaagaagatcaaacctgaagccttcgaagccaacagattctacaccgtgatcaacaaaaagagcggcgagatcgtgcccatggaggtgaacttcaacttcgacgaccccaacctgatcatcctgcctctggcctttggcaagagacagggcagagaattcatctggaacgacctgctgtccctggaaaccggcagcctgaagctggccaacggaagagtgatcgagaagacactgtacaacagaagaacccggcaggatgagcctgccctgttcgtggccctgaccttcgagcggcgggaggtcctggactcctccaatatcaaaccaatgaacctgatcggcgtggcaagaggcgaaaacatccccgccgtgatcgccctgaccgaccccgagggctgcccactgagccggtttaaggatagcctgggaaacccaacccacatcctgagaatcggcgagagctataaggagaagcagcggaccatccaggccaagaaggaggtggagcagcggagagccggcggctacagccggaagtacgccagcaaagccaagaatctggcagacgatatggtgagaaacaccgctagagatctgctgtactacgccgtgacccaggatgccatgctgatcttcgccaacctgagccggggcttcggccggcagggcaagcggaccttcatggccgagagacagtacacacggatggaggactggctgaccgccaagctggcctacgagggcctgagcaagacctacctgtccaagacactggcccagtacacctccaagacatgcagcaactgtgggtttaccatcaccagcgccgactacgacagggtgctggagaagctgaagaagacagcaacaggctggatgaccacaattaacggcaaggagctgaaggtggagggccagattacctactacaacagatacaagagacagaacgtagtcaaggacctgtccgtcgagctggatagactgagcgaagaatctgtgaacaacgacatctcctcctggacaaagggcagaagcggagaagctctgagcctcctgaagaaaagattctcccatagacccgtgcaggagaagttcgtgtgcctgaactgcggcttcgagacacacgcagccgagcaagccgccctgaacatcgccagatcctggctgttcctgcggagccaggagtacaagaaataccagacaaacaagacaaccggcaacaccgataagagagccttcgtcgagacctggcagtccttttaccggaagaagcttaaggaggtgtggaaacctgccgtgcggtctggcggatctggcggaggctccacaagcggccaggagagcgtgaccttcaccgacgtggccgtggacttcaccctggaggagtgggcctacctggaccacttccagaaggagctgtacaaggacgtgatgctggagaactacaggaacctgctgtgcctgggcctggccgtgagcaagcccgacgtgatcagccagctggagcagggcgacgccccctggatgagcgagggcggcgtgcccaggagcatctacagcgactgggagaccaggaccagccccaagaaaaagagaaaagtctaagctgccttctgcggggcttgccttctggccatgcccttcttctctcccttgcacctgtacctcttggtctttgaataaagcctgagtaggaaggctagcaaaaaaaaaaaaaaaaaaaaaaaaaaaaaaaaaaaaaaaaaaaaaaaaaaaaaaaaaaaaaaaaaaaaaaaaaaaaaaaa

SEQ ID NO: 2920 - RNA, 5428 nt, synthetic construct
  source 1..5428: mol_type = other RNA
aggaaataagagagaaaagaagagtaagaagaaatataagagccaccatggcccctaagaagaagcgtaaagtgagccgggtgaacggcagcggcagcggcggcggcatgaaccacgaccaggagttcgacccccctaaggtgtaccctcccgtccccgccgagaagagaaagcccatccgggtcctgagcctgttcgatggcatcgccaccggtctgctggtgctgaaggacctgggcatccaggtggataggtacattgcctccgaggtgtgcgaggactccatcaccgtgggaatggtgcgtcatcagggcaagatcatgtacgtgggcgacgtgcggagcgtgacacagaagcatatccaggagtggggccctttcgacctggtgatcggcggcagcccttgcaatgacctgagcatcgtgaacccagcccggaagggcctgtacgagggaaccggcagactgttcttcgagttttacagactgctgcacgacgcccggcctaaggaaggcgacgaccggcccttcttttggctgttcgagaatgtggtggccatgggagtcagcgacaagcgggatattagccggttcctggagagcaaccccgtgatgatcgatgccaaggaagtgagcgccgcccaccgggccagatacttctggggcaatctgcctggcatgaacagacccctggccagcaccgtgaacgacaagctggagctgcaggagtgcctggagcacggccggatcgccaagttcagcaaggtgagaaccatcaccacccgaagcaacagcatcaaacaaggcaaggaccagcactttcctgtgttcatgaacgagaaggaggacatcctgtggtgtaccgagatggagagagtgttcgggttcccagtccactacacagatgtcagcaacatgtctagactggccagacagagactgctgggaagaagctggtccgtccctgtgatcagacacctgttcgcccctctgaaggagtacttcgcctgcgtgagcagcggcaacagcaacgccaacagccggggccccagcttctctagcggcctggtgccactgtccctgagagggagccacatgggccccatggagatctacaaaaccgtgagcgcctggaagcggcagcctgtgcgcgtgctgagcctgtttcggaatatcgataaagtcctgaaaagcctgggattcctggagagcggctctggctccggcggtggcaccctgaagtacgtggaggatgtgacaaacgtggtcagacgggatgtggagaagtggggccccttcgatctggtgtacggcagcacccaacccctgggcagctcttgtgaccggtgccctggctggtacatgtttcagttccaccggatcctgcagtacgccctgccgagacaggagtcccagcggccattcttttggattttcatggacaacttgctgctgaccgaggatgaccaggaaactaccactcggttcctgcagaccgaagccgtgaccctgcaggacgtgagaggccgggactaccagaacgccatgcgggtgtggtccaacatccctggactgaaaagcaagcacgcacctctgacccctaaagaagaggagtacctgcaggcccaggtgcggagcagaagcaagctggacgcccctaaggtggatctgctggtgaagaattgcctcctgcccctgagagagtacttcaagtatttcagccagaatagtctgcccctgggcggcccaagcagcggcgcccctcctcccagcggcggcagcccagccggctccccaacctctaccgaggagggcacctctgagtccgccacccccgagagcggccctggcacctccaccgagcccagcgagggcagcgcacccggcagccctgccggcagccccacctccacagaggagggaaccagcaccgagcccagcgaaggcagcgccccaggcaccagcaccgagcctagtgagggcggctctggcggcggcagcgcccaggagattaaacggatcaacaagatcagaagaagacttgtgaaagacagcaacaccaagaaggccggcaagacaggccccatgaaaaccctgctggttagagtgatgacacccgatctgagagagcggctggaaaacctgagaaagaagcctgaaaatatcccccagcccatcagcaatacatctagagccaacctgaataagctgctgaccgattacaccgaaatgaagaaggcgatcctgcatgtgtactgggaagagttccagaaggaccctgtgggcctgatgagccgggtggcccagcctgccagcaagaagatcgatcagaacaagctgaaacctgagatggacgagaagggcaacctgaccaccgccggctttgcctgctctcagtgtggccagcccctgttcgtgtacaagctggagcaggtgtctgagaagggcaaggcttacaccaactacttcggacggtgcaatgtggccgagcacgaaaagctgatcctgctggcccagctgaagcccgagaaggatagcgacgaagccgtgacatatagcctgggaaagtttgggcagagggccctggatttctacagcattcatgtgaccaaggagtccacccaccccgtgaagcccctggcccagatcgccggaaacagatacgcctccggacctgtgggaaaggccctgagcgacgcatgtatgggcacaatcgcctccttcctgtctaagtaccaggacatcatcatcgaacaccagaaggtggtgaagggcaaccagaagagactggagagcctgcgggagctggccggcaaggaaaacctggaataccctagcgtgaccctgccacctcagcctcacaccaaggagggcgttgatgcctacaacgaagtgatcgcccgggtgcgaatgtgggtgaacctgaacctgtggcagaagctgaagctaagcagagatgatgccaagcctctgctgagactgaagggattcccttcctttcctctggtcgagagacaggccaacgaagtggactggtgggacatggtgtgtaacgtgaagaagctgatcaacgagaaaaaggaggatggcaaggtgttttggcagaatctggctggctacaagagacaggaagccctgagaccatacctgagcagcgaggaagatcggaagaagggaaagaaattcgctcggtaccagctgggcgacctgctgctgcacctggaaaagaagcacggcgaggactggggaaaggtgtacgacgaggcctgggagcggattgacaagaaagtggaaggcctgagcaagcacatcaagctggaagaggaacggagaagcgaggacgcccagagcaaggccgccctgaccgactggctgcgggctaaggccagcttcgtgatcgagggcctgaaggaggccgacaaggacgagttctgcagatgcgagctgaagctgcagaagtggtacggggacctgcggggaaagcccttcgccatcgaagccgagaacagcatcctggacatcagcggcttcagcaagcagtacaactgtgccttcatctggcagaaggacggcgtgaagaagctgaacctgtacctgatcatcaactacttcaagggcggcaagctgcggttcaagaagatcaaacctgaagccttcgaagccaacagattctacaccgtgatcaacaaaaagagcggcgagatcgtgcccatggaggtgaacttcaacttcgacgaccccaacctgatcatcctgcctctggcctttggcaagagacagggcagagaattcatctggaacgacctgctgtccctggaaaccggcagcctgaagctggccaacggaagagtgatcgagaagacactgtacaacagaagaacccggcaggatgagcctgccctgttcgtggccctgaccttcgagcggcgggaggtcctggactcctccaatatcaaaccaatgaacctgatcggcgtggcaagaggcgaaaacatccccgccgtgatcgccctgaccgaccccgagggctgcccactgagccggtttaaggatagcctgggaaacccaacccacatcctgagaatcggcgagagctataaggagaagcagcggaccatccaggccaagaaggaggtggagcagcggagagccggcggctacagccggaagtacgccagcaaagccaagaatctggcagacgatatggtgagaaacaccgctagagatctgctgtactacgccgtgacccaggatgccatgctgatcttcgccaacctgagccggggcttcggccggcagggcaagcggaccttcatggccgagagacagtacacacggatggaggactggctgaccgccaagctggcctacgagggcctgagcaagacctacctgtccaagacactggcccagtacacctccaagacatgcagcaactgtgggtttaccatcaccagcgccgactacgacagggtgctggagaagctgaagaagacagcaacaggctggatgaccacaattaacggcaaggagctgaaggtggagggccagattacctactacaacagatacaagagacagaacgtagtcaaggacctgtccgtcgagctggatagactgagcgaagaatctgtgaacaacgacatctcctcctggacaaagggcagaagcggagaagctctgagcctcctgaagaaaagattctcccatagacccgtgcaggagaagttcgtgtgcctgaactgcggcttcgagacacacgcagccgagcaagccgccctgaacatcgccagatcctggctgttcctgcggagccaggagtacaagaaataccagacaaacaagacaaccggcaacaccgataagagagccttcgtcgagacctggcagtccttttaccggaagaagcttaaggaggtgtggaaacctgccgtgcggtctggcggatctggcggaggctccacaagcgtgacctacgacgacgtgcacatcgacttcacctgggaggagtggaccctgctggaccccagccagaagaacctgtacaaggacgtgatgctggagacctacaggaacctgaccaccgtgggctacagctgggaggaccacctgatcgaggagcactgcaagagcagcaggaagcacgagaggcacgagaggatccccaccggcgagcagcccagcgagagcacccagagcttcagggccttcgcccaccacaccagccccaagaaaaagagaaaagtctaagctgccttctgcggggcttgccttctggccatgcccttcttctctcccttgcacctgtacctcttggtctttgaataaagcctgagtaggaaggctagcaaaaaaaaaaaaaaaaaaaaaaaaaaaaaaaaaaaaaaaaaaaaaaaaaaaaaaaaaaaaaaaaaaaaaaaaaaaaaaaa

SEQ ID NO: 2921 - RNA, 5419 nt, synthetic construct
  source 1..5419: mol_type = other RNA
aggaaataagagagaaaagaagagtaagaagaaatataagagccaccatggcccctaagaagaagcgtaaagtgagccgggtgaacggcagcggcagcggcggcggcatgaaccacgaccaggagttcgacccccctaaggtgtaccctcccgtccccgccgagaagagaaagcccatccgggtcctgagcctgttcgatggcatcgccaccggtctgctggtgctgaaggacctgggcatccaggtggataggtacattgcctccgaggtgtgcgaggactccatcaccgtgggaatggtgcgtcatcagggcaagatcatgtacgtgggcgacgtgcggagcgtgacacagaagcatatccaggagtggggccctttcgacctggtgatcggcggcagcccttgcaatgacctgagcatcgtgaacccagcccggaagggcctgtacgagggaaccggcagactgttcttcgagttttacagactgctgcacgacgcccggcctaaggaaggcgacgaccggcccttcttttggctgttcgagaatgtggtggccatgggagtcagcgacaagcgggatattagccggttcctggagagcaaccccgtgatgatcgatgccaaggaagtgagcgccgcccaccgggccagatacttctggggcaatctgcctggcatgaacagacccctggccagcaccgtgaacgacaagctggagctgcaggagtgcctggagcacggccggatcgccaagttcagcaaggtgagaaccatcaccacccgaagcaacagcatcaaacaaggcaaggaccagcactttcctgtgttcatgaacgagaaggaggacatcctgtggtgtaccgagatggagagagtgttcgggttcccagtccactacacagatgtcagcaacatgtctagactggccagacagagactgctgggaagaagctggtccgtccctgtgatcagacacctgttcgcccctctgaaggagtacttcgcctgcgtgagcagcggcaacagcaacgccaacagccggggccccagcttctctagcggcctggtgccactgtccctgagagggagccacatgggccccatggagatctacaaaaccgtgagcgcctggaagcggcagcctgtgcgcgtgctgagcctgtttcggaatatcgataaagtcctgaaaagcctgggattcctggagagcggctctggctccggcggtggcaccctgaagtacgtggaggatgtgacaaacgtggtcagacgggatgtggagaagtggggccccttcgatctggtgtacggcagcacccaacccctgggcagctcttgtgaccggtgccctggctggtacatgtttcagttccaccggatcctgcagtacgccctgccgagacaggagtcccagcggccattcttttggattttcatggacaacttgctgctgaccgaggatgaccaggaaactaccactcggttcctgcagaccgaagccgtgaccctgcaggacgtgagaggccgggactaccagaacgccatgcgggtgtggtccaacatccctggactgaaaagcaagcacgcacctctgacccctaaagaagaggagtacctgcaggcccaggtgcggagcagaagcaagctggacgcccctaaggtggatctgctggtgaagaattgcctcctgcccctgagagagtacttcaagtatttcagccagaatagtctgcccctgggcggcccaagcagcggcgcccctcctcccagcggcggcagcccagccggctccccaacctctaccgaggagggcacctctgagtccgccacccccgagagcggccctggcacctccaccgagcccagcgagggcagcgcacccggcagccctgccggcagccccacctccacagaggagggaaccagcaccgagcccagcgaaggcagcgccccaggcaccagcaccgagcctagtgagggcggctctggcggcggcagcgcccaggagattaaacggatcaacaagatcagaagaagacttgtgaaagacagcaacaccaagaaggccggcaagacaggccccatgaaaaccctgctggttagagtgatgacacccgatctgagagagcggctggaaaacctgagaaagaagcctgaaaatatcccccagcccatcagcaatacatctagagccaacctgaataagctgctgaccgattacaccgaaatgaagaaggcgatcctgcatgtgtactgggaagagttccagaaggaccctgtgggcctgatgagccgggtggcccagcctgccagcaagaagatcgatcagaacaagctgaaacctgagatggacgagaagggcaacctgaccaccgccggctttgcctgctctcagtgtggccagcccctgttcgtgtacaagctggagcaggtgtctgagaagggcaaggcttacaccaactacttcggacggtgcaatgtggccgagcacgaaaagctgatcctgctggcccagctgaagcccgagaaggatagcgacgaagccgtgacatatagcctgggaaagtttgggcagagggccctggatttctacagcattcatgtgaccaaggagtccacccaccccgtgaagcccctggcccagatcgccggaaacagatacgcctccggacctgtgggaaaggccctgagcgacgcatgtatgggcacaatcgcctccttcctgtctaagtaccaggacatcatcatcgaacaccagaaggtggtgaagggcaaccagaagagactggagagcctgcgggagctggccggcaaggaaaacctggaataccctagcgtgaccctgccacctcagcctcacaccaaggagggcgttgatgcctacaacgaagtgatcgcccgggtgcgaatgtgggtgaacctgaacctgtggcagaagctgaagctaagcagagatgatgccaagcctctgctgagactgaagggattcccttcctttcctctggtcgagagacaggccaacgaagtggactggtgggacatggtgtgtaacgtgaagaagctgatcaacgagaaaaaggaggatggcaaggtgttttggcagaatctggctggctacaagagacaggaagccctgagaccatacctgagcagcgaggaagatcggaagaagggaaagaaattcgctcggtaccagctgggcgacctgctgctgcacctggaaaagaagcacggcgaggactggggaaaggtgtacgacgaggcctgggagcggattgacaagaaagtggaaggcctgagcaagcacatcaagctggaagaggaacggagaagcgaggacgcccagagcaaggccgccctgaccgactggctgcgggctaaggccagcttcgtgatcgagggcctgaaggaggccgacaaggacgagttctgcagatgcgagctgaagctgcagaagtggtacggggacctgcggggaaagcccttcgccatcgaagccgagaacagcatcctggacatcagcggcttcagcaagcagtacaactgtgccttcatctggcagaaggacggcgtgaagaagctgaacctgtacctgatcatcaactacttcaagggcggcaagctgcggttcaagaagatcaaacctgaagccttcgaagccaacagattctacaccgtgatcaacaaaaagagcggcgagatcgtgcccatggaggtgaacttcaacttcgacgaccccaacctgatcatcctgcctctggcctttggcaagagacagggcagagaattcatctggaacgacctgctgtccctggaaaccggcagcctgaagctggccaacggaagagtgatcgagaagacactgtacaacagaagaacccggcaggatgagcctgccctgttcgtggccctgaccttcgagcggcgggaggtcctggactcctccaatatcaaaccaatgaacctgatcggcgtggcaagaggcgaaaacatccccgccgtgatcgccctgaccgaccccgagggctgcccactgagccggtttaaggatagcctgggaaacccaacccacatcctgagaatcggcgagagctataaggagaagcagcggaccatccaggccaagaaggaggtggagcagcggagagccggcggctacagccggaagtacgccagcaaagccaagaatctggcagacgatatggtgagaaacaccgctagagatctgctgtactacgccgtgacccaggatgccatgctgatcttcgccaacctgagccggggcttcggccggcagggcaagcggaccttcatggccgagagacagtacacacggatggaggactggctgaccgccaagctggcctacgagggcctgagcaagacctacctgtccaagacactggcccagtacacctccaagacatgcagcaactgtgggtttaccatcaccagcgccgactacgacagggtgctggagaagctgaagaagacagcaacaggctggatgaccacaattaacggcaaggagctgaaggtggagggccagattacctactacaacagatacaagagacagaacgtagtcaaggacctgtccgtcgagctggatagactgagcgaagaatctgtgaacaacgacatctcctcctggacaaagggcagaagcggagaagctctgagcctcctgaagaaaagattctcccatagacccgtgcaggagaagttcgtgtgcctgaactgcggcttcgagacacacgcagccgagcaagccgccctgaacatcgccagatcctggctgttcctgcggagccaggagtacaagaaataccagacaaacaagacaaccggcaacaccgataagagagccttcgtcgagacctggcagtccttttaccggaagaagcttaaggaggtgtggaaacctgccgtgcggtctggcggatctggcggaggctccacaagcagccaggagctgctgaccttcaaggacatcagcatcgacttcacccaggaggagtggggccagctgacccccgcccaccagaacctgtacagggaggtgatgctggagaactacagcaacctggtgagcgtggccggctaccagctgagcaagcccgtggtgatcagccagctggagaagggcgaggagccctggatgaccgagaaggagggccccggcgaccccagcagcgacctgaagagcaccagccccaagaaaaagagaaaagtctaagctgccttctgcggggcttgccttctggccatgcccttcttctctcccttgcacctgtacctcttggtctttgaataaagcctgagtaggaaggctagcaaaaaaaaaaaaaaaaaaaaaaaaaaaaaaaaaaaaaaaaaaaaaaaaaaaaaaaaaaaaaaaaaaaaaaaaaaaaaaaa

SEQ ID NO: 2922 - RNA, 5419 nt, synthetic construct
  source 1..5419: mol_type = other RNA
aggaaataagagagaaaagaagagtaagaagaaatataagagccaccatggcccctaagaagaagcgtaaagtgagccgggtgaacggcagcggcagcggcggcggcatgaaccacgaccaggagttcgacccccctaaggtgtaccctcccgtccccgccgagaagagaaagcccatccgggtcctgagcctgttcgatggcatcgccaccggtctgctggtgctgaaggacctgggcatccaggtggataggtacattgcctccgaggtgtgcgaggactccatcaccgtgggaatggtgcgtcatcagggcaagatcatgtacgtgggcgacgtgcggagcgtgacacagaagcatatccaggagtggggccctttcgacctggtgatcggcggcagcccttgcaatgacctgagcatcgtgaacccagcccggaagggcctgtacgagggaaccggcagactgttcttcgagttttacagactgctgcacgacgcccggcctaaggaaggcgacgaccggcccttcttttggctgttcgagaatgtggtggccatgggagtcagcgacaagcgggatattagccggttcctggagagcaaccccgtgatgatcgatgccaaggaagtgagcgccgcccaccgggccagatacttctggggcaatctgcctggcatgaacagacccctggccagcaccgtgaacgacaagctggagctgcaggagtgcctggagcacggccggatcgccaagttcagcaaggtgagaaccatcaccacccgaagcaacagcatcaaacaaggcaaggaccagcactttcctgtgttcatgaacgagaaggaggacatcctgtggtgtaccgagatggagagagtgttcgggttcccagtccactacacagatgtcagcaacatgtctagactggccagacagagactgctgggaagaagctggtccgtccctgtgatcagacacctgttcgcccctctgaaggagtacttcgcctgcgtgagcagcggcaacagcaacgccaacagccggggccccagcttctctagcggcctggtgccactgtccctgagagggagccacatgggccccatggagatctacaaaaccgtgagcgcctggaagcggcagcctgtgcgcgtgctgagcctgtttcggaatatcgataaagtcctgaaaagcctgggattcctggagagcggctctggctccggcggtggcaccctgaagtacgtggaggatgtgacaaacgtggtcagacgggatgtggagaagtggggccccttcgatctggtgtacggcagcacccaacccctgggcagctcttgtgaccggtgccctggctggtacatgtttcagttccaccggatcctgcagtacgccctgccgagacaggagtcccagcggccattcttttggattttcatggacaacttgctgctgaccgaggatgaccaggaaactaccactcggttcctgcagaccgaagccgtgaccctgcaggacgtgagaggccgggactaccagaacgccatgcgggtgtggtccaacatccctggactgaaaagcaagcacgcacctctgacccctaaagaagaggagtacctgcaggcccaggtgcggagcagaagcaagctggacgcccctaaggtggatctgctggtgaagaattgcctcctgcccctgagagagtacttcaagtatttcagccagaatagtctgcccctgggcggcccaagcagcggcgcccctcctcccagcggcggcagcccagccggctccccaacctctaccgaggagggcacctctgagtccgccacccccgagagcggccctggcacctccaccgagcccagcgagggcagcgcacccggcagccctgccggcagccccacctccacagaggagggaaccagcaccgagcccagcgaaggcagcgccccaggcaccagcaccgagcctagtgagggcggctctggcggcggcagcgcccaggagattaaacggatcaacaagatcagaagaagacttgtgaaagacagcaacaccaagaaggccggcaagacaggccccatgaaaaccctgctggttagagtgatgacacccgatctgagagagcggctggaaaacctgagaaagaagcctgaaaatatcccccagcccatcagcaatacatctagagccaacctgaataagctgctgaccgattacaccgaaatgaagaaggcgatcctgcatgtgtactgggaagagttccagaaggaccctgtgggcctgatgagccgggtggcccagcctgccagcaagaagatcgatcagaacaagctgaaacctgagatggacgagaagggcaacctgaccaccgccggctttgcctgctctcagtgtggccagcccctgttcgtgtacaagctggagcaggtgtctgagaagggcaaggcttacaccaactacttcggacggtgcaatgtggccgagcacgaaaagctgatcctgctggcccagctgaagcccgagaaggatagcgacgaagccgtgacatatagcctgggaaagtttgggcagagggccctggatttctacagcattcatgtgaccaaggagtccacccaccccgtgaagcccctggcccagatcgccggaaacagatacgcctccggacctgtgggaaaggccctgagcgacgcatgtatgggcacaatcgcctccttcctgtctaagtaccaggacatcatcatcgaacaccagaaggtggtgaagggcaaccagaagagactggagagcctgcgggagctggccggcaaggaaaacctggaataccctagcgtgaccctgccacctcagcctcacaccaaggagggcgttgatgcctacaacgaagtgatcgcccgggtgcgaatgtgggtgaacctgaacctgtggcagaagctgaagctaagcagagatgatgccaagcctctgctgagactgaagggattcccttcctttcctctggtcgagagacaggccaacgaagtggactggtgggacatggtgtgtaacgtgaagaagctgatcaacgagaaaaaggaggatggcaaggtgttttggcagaatctggctggctacaagagacaggaagccctgagaccatacctgagcagcgaggaagatcggaagaagggaaagaaattcgctcggtaccagctgggcgacctgctgctgcacctggaaaagaagcacggcgaggactggggaaaggtgtacgacgaggcctgggagcggattgacaagaaagtggaaggcctgagcaagcacatcaagctggaagaggaacggagaagcgaggacgcccagagcaaggccgccctgaccgactggctgcgggctaaggccagcttcgtgatcgagggcctgaaggaggccgacaaggacgagttctgcagatgcgagctgaagctgcagaagtggtacggggacctgcggggaaagcccttcgccatcgaagccgagaacagcatcctggacatcagcggcttcagcaagcagtacaactgtgccttcatctggcagaaggacggcgtgaagaagctgaacctgtacctgatcatcaactacttcaagggcggcaagctgcggttcaagaagatcaaacctgaagccttcgaagccaacagattctacaccgtgatcaacaaaaagagcggcgagatcgtgcccatggaggtgaacttcaacttcgacgaccccaacctgatcatcctgcctctggcctttggcaagagacagggcagagaattcatctggaacgacctgctgtccctggaaaccggcagcctgaagctggccaacggaagagtgatcgagaagacactgtacaacagaagaacccggcaggatgagcctgccctgttcgtggccctgaccttcgagcggcgggaggtcctggactcctccaatatcaaaccaatgaacctgatcggcgtggcaagaggcgaaaacatccccgccgtgatcgccctgaccgaccccgagggctgcccactgagccggtttaaggatagcctgggaaacccaacccacatcctgagaatcggcgagagctataaggagaagcagcggaccatccaggccaagaaggaggtggagcagcggagagccggcggctacagccggaagtacgccagcaaagccaagaatctggcagacgatatggtgagaaacaccgctagagatctgctgtactacgccgtgacccaggatgccatgctgatcttcgccaacctgagccggggcttcggccggcagggcaagcggaccttcatggccgagagacagtacacacggatggaggactggctgaccgccaagctggcctacgagggcctgagcaagacctacctgtccaagacactggcccagtacacctccaagacatgcagcaactgtgggtttaccatcaccagcgccgactacgacagggtgctggagaagctgaagaagacagcaacaggctggatgaccacaattaacggcaaggagctgaaggtggagggccagattacctactacaacagatacaagagacagaacgtagtcaaggacctgtccgtcgagctggatagactgagcgaagaatctgtgaacaacgacatctcctcctggacaaagggcagaagcggagaagctctgagcctcctgaagaaaagattctcccatagacccgtgcaggagaagttcgtgtgcctgaactgcggcttcgagacacacgcagccgagcaagccgccctgaacatcgccagatcctggctgttcctgcggagccaggagtacaagaaataccagacaaacaagacaaccggcaacaccgataagagagccttcgtcgagacctggcagtccttttaccggaagaagcttaaggaggtgtggaaacctgccgtgcggtctggcggatctggcggaggctccacaagcgaggagctgcccgtggtgttcgaggacgtggccgtgtacttcaccagggaggagtgggccatgctggacaagaggcagaaggagctgtacagggacgtgatgaggatgaactacgagctgctggccagcctgggccccgccgcccccaagcccgacctgatcctgaagctggagaggagggccgccccctggatcaaggaccccaacggccccaagtggggcaagggcaggccccccggcaagaccagccccaagaaaaagagaaaagtctaagctgccttctgcggggcttgccttctggccatgcccttcttctctcccttgcacctgtacctcttggtctttgaataaagcctgagtaggaaggctagcaaaaaaaaaaaaaaaaaaaaaaaaaaaaaaaaaaaaaaaaaaaaaaaaaaaaaaaaaaaaaaaaaaaaaaaaaaaaaaaa

SEQ ID NO: 2923 - RNA, 5419 nt, synthetic construct
  source 1..5419: mol_type = other RNA
aggaaataagagagaaaagaagagtaagaagaaatataagagccaccatggcccctaagaagaagcgtaaagtgagccgggtgaacggcagcggcagcggcggcggcatgaaccacgaccaggagttcgacccccctaaggtgtaccctcccgtccccgccgagaagagaaagcccatccgggtcctgagcctgttcgatggcatcgccaccggtctgctggtgctgaaggacctgggcatccaggtggataggtacattgcctccgaggtgtgcgaggactccatcaccgtgggaatggtgcgtcatcagggcaagatcatgtacgtgggcgacgtgcggagcgtgacacagaagcatatccaggagtggggccctttcgacctggtgatcggcggcagcccttgcaatgacctgagcatcgtgaacccagcccggaagggcctgtacgagggaaccggcagactgttcttcgagttttacagactgctgcacgacgcccggcctaaggaaggcgacgaccggcccttcttttggctgttcgagaatgtggtggccatgggagtcagcgacaagcgggatattagccggttcctggagagcaaccccgtgatgatcgatgccaaggaagtgagcgccgcccaccgggccagatacttctggggcaatctgcctggcatgaacagacccctggccagcaccgtgaacgacaagctggagctgcaggagtgcctggagcacggccggatcgccaagttcagcaaggtgagaaccatcaccacccgaagcaacagcatcaaacaaggcaaggaccagcactttcctgtgttcatgaacgagaaggaggacatcctgtggtgtaccgagatggagagagtgttcgggttcccagtccactacacagatgtcagcaacatgtctagactggccagacagagactgctgggaagaagctggtccgtccctgtgatcagacacctgttcgcccctctgaaggagtacttcgcctgcgtgagcagcggcaacagcaacgccaacagccggggccccagcttctctagcggcctggtgccactgtccctgagagggagccacatgggccccatggagatctacaaaaccgtgagcgcctggaagcggcagcctgtgcgcgtgctgagcctgtttcggaatatcgataaagtcctgaaaagcctgggattcctggagagcggctctggctccggcggtggcaccctgaagtacgtggaggatgtgacaaacgtggtcagacgggatgtggagaagtggggccccttcgatctggtgtacggcagcacccaacccctgggcagctcttgtgaccggtgccctggctggtacatgtttcagttccaccggatcctgcagtacgccctgccgagacaggagtcccagcggccattcttttggattttcatggacaacttgctgctgaccgaggatgaccaggaaactaccactcggttcctgcagaccgaagccgtgaccctgcaggacgtgagaggccgggactaccagaacgccatgcgggtgtggtccaacatccctggactgaaaagcaagcacgcacctctgacccctaaagaagaggagtacctgcaggcccaggtgcggagcagaagcaagctggacgcccctaaggtggatctgctggtgaagaattgcctcctgcccctgagagagtacttcaagtatttcagccagaatagtctgcccctgggcggcccaagcagcggcgcccctcctcccagcggcggcagcccagccggctccccaacctctaccgaggagggcacctctgagtccgccacccccgagagcggccctggcacctccaccgagcccagcgagggcagcgcacccggcagccctgccggcagccccacctccacagaggagggaaccagcaccgagcccagcgaaggcagcgccccaggcaccagcaccgagcctagtgagggcggctctggcggcggcagcgcccaggagattaaacggatcaacaagatcagaagaagacttgtgaaagacagcaacaccaagaaggccggcaagacaggccccatgaaaaccctgctggttagagtgatgacacccgatctgagagagcggctggaaaacctgagaaagaagcctgaaaatatcccccagcccatcagcaatacatctagagccaacctgaataagctgctgaccgattacaccgaaatgaagaaggcgatcctgcatgtgtactgggaagagttccagaaggaccctgtgggcctgatgagccgggtggcccagcctgccagcaagaagatcgatcagaacaagctgaaacctgagatggacgagaagggcaacctgaccaccgccggctttgcctgctctcagtgtggccagcccctgttcgtgtacaagctggagcaggtgtctgagaagggcaaggcttacaccaactacttcggacggtgcaatgtggccgagcacgaaaagctgatcctgctggcccagctgaagcccgagaaggatagcgacgaagccgtgacatatagcctgggaaagtttgggcagagggccctggatttctacagcattcatgtgaccaaggagtccacccaccccgtgaagcccctggcccagatcgccggaaacagatacgcctccggacctgtgggaaaggccctgagcgacgcatgtatgggcacaatcgcctccttcctgtctaagtaccaggacatcatcatcgaacaccagaaggtggtgaagggcaaccagaagagactggagagcctgcgggagctggccggcaaggaaaacctggaataccctagcgtgaccctgccacctcagcctcacaccaaggagggcgttgatgcctacaacgaagtgatcgcccgggtgcgaatgtgggtgaacctgaacctgtggcagaagctgaagctaagcagagatgatgccaagcctctgctgagactgaagggattcccttcctttcctctggtcgagagacaggccaacgaagtggactggtgggacatggtgtgtaacgtgaagaagctgatcaacgagaaaaaggaggatggcaaggtgttttggcagaatctggctggctacaagagacaggaagccctgagaccatacctgagcagcgaggaagatcggaagaagggaaagaaattcgctcggtaccagctgggcgacctgctgctgcacctggaaaagaagcacggcgaggactggggaaaggtgtacgacgaggcctgggagcggattgacaagaaagtggaaggcctgagcaagcacatcaagctggaagaggaacggagaagcgaggacgcccagagcaaggccgccctgaccgactggctgcgggctaaggccagcttcgtgatcgagggcctgaaggaggccgacaaggacgagttctgcagatgcgagctgaagctgcagaagtggtacggggacctgcggggaaagcccttcgccatcgaagccgagaacagcatcctggacatcagcggcttcagcaagcagtacaactgtgccttcatctggcagaaggacggcgtgaagaagctgaacctgtacctgatcatcaactacttcaagggcggcaagctgcggttcaagaagatcaaacctgaagccttcgaagccaacagattctacaccgtgatcaacaaaaagagcggcgagatcgtgcccatggaggtgaacttcaacttcgacgaccccaacctgatcatcctgcctctggcctttggcaagagacagggcagagaattcatctggaacgacctgctgtccctggaaaccggcagcctgaagctggccaacggaagagtgatcgagaagacactgtacaacagaagaacccggcaggatgagcctgccctgttcgtggccctgaccttcgagcggcgggaggtcctggactcctccaatatcaaaccaatgaacctgatcggcgtggcaagaggcgaaaacatccccgccgtgatcgccctgaccgaccccgagggctgcccactgagccggtttaaggatagcctgggaaacccaacccacatcctgagaatcggcgagagctataaggagaagcagcggaccatccaggccaagaaggaggtggagcagcggagagccggcggctacagccggaagtacgccagcaaagccaagaatctggcagacgatatggtgagaaacaccgctagagatctgctgtactacgccgtgacccaggatgccatgctgatcttcgccaacctgagccggggcttcggccggcagggcaagcggaccttcatggccgagagacagtacacacggatggaggactggctgaccgccaagctggcctacgagggcctgagcaagacctacctgtccaagacactggcccagtacacctccaagacatgcagcaactgtgggtttaccatcaccagcgccgactacgacagggtgctggagaagctgaagaagacagcaacaggctggatgaccacaattaacggcaaggagctgaaggtggagggccagattacctactacaacagatacaagagacagaacgtagtcaaggacctgtccgtcgagctggatagactgagcgaagaatctgtgaacaacgacatctcctcctggacaaagggcagaagcggagaagctctgagcctcctgaagaaaagattctcccatagacccgtgcaggagaagttcgtgtgcctgaactgcggcttcgagacacacgcagccgagcaagccgccctgaacatcgccagatcctggctgttcctgcggagccaggagtacaagaaataccagacaaacaagacaaccggcaacaccgataagagagccttcgtcgagacctggcagtccttttaccggaagaagcttaaggaggtgtggaaacctgccgtgcggtctggcggatctggcggaggctccacaagcttccaggaggccgtgaccttcaaggacgtggccgtggccttcaccgaggaggagctgggcatgctggacagcgcccagaagaagctgtacagggacgtgatgctggagaacttcaggaacctggtgagcgtgggccaccagagcttcaagcccgacatgatcagccagctggagagggaggagaagctgtggatgaaggagctgcagacccagaggggcaagcacagcggcgagtactgcgccaccagccccaagaaaaagagaaaagtctaagctgccttctgcggggcttgccttctggccatgcccttcttctctcccttgcacctgtacctcttggtctttgaataaagcctgagtaggaaggctagcaaaaaaaaaaaaaaaaaaaaaaaaaaaaaaaaaaaaaaaaaaaaaaaaaaaaaaaaaaaaaaaaaaaaaaaaaaaaaaaa

SEQ ID NO: 2924 - RNA, 5419 nt, synthetic construct
  source 1..5419: mol_type = other RNA
aggaaataagagagaaaagaagagtaagaagaaatataagagccaccatggcccctaagaagaagcgtaaagtgagccgggtgaacggcagcggcagcggcggcggcatgaaccacgaccaggagttcgacccccctaaggtgtaccctcccgtccccgccgagaagagaaagcccatccgggtcctgagcctgttcgatggcatcgccaccggtctgctggtgctgaaggacctgggcatccaggtggataggtacattgcctccgaggtgtgcgaggactccatcaccgtgggaatggtgcgtcatcagggcaagatcatgtacgtgggcgacgtgcggagcgtgacacagaagcatatccaggagtggggccctttcgacctggtgatcggcggcagcccttgcaatgacctgagcatcgtgaacccagcccggaagggcctgtacgagggaaccggcagactgttcttcgagttttacagactgctgcacgacgcccggcctaaggaaggcgacgaccggcccttcttttggctgttcgagaatgtggtggccatgggagtcagcgacaagcgggatattagccggttcctggagagcaaccccgtgatgatcgatgccaaggaagtgagcgccgcccaccgggccagatacttctggggcaatctgcctggcatgaacagacccctggccagcaccgtgaacgacaagctggagctgcaggagtgcctggagcacggccggatcgccaagttcagcaaggtgagaaccatcaccacccgaagcaacagcatcaaacaaggcaaggaccagcactttcctgtgttcatgaacgagaaggaggacatcctgtggtgtaccgagatggagagagtgttcgggttcccagtccactacacagatgtcagcaacatgtctagactggccagacagagactgctgggaagaagctggtccgtccctgtgatcagacacctgttcgcccctctgaaggagtacttcgcctgcgtgagcagcggcaacagcaacgccaacagccggggccccagcttctctagcggcctggtgccactgtccctgagagggagccacatgggccccatggagatctacaaaaccgtgagcgcctggaagcggcagcctgtgcgcgtgctgagcctgtttcggaatatcgataaagtcctgaaaagcctgggattcctggagagcggctctggctccggcggtggcaccctgaagtacgtggaggatgtgacaaacgtggtcagacgggatgtggagaagtggggccccttcgatctggtgtacggcagcacccaacccctgggcagctcttgtgaccggtgccctggctggtacatgtttcagttccaccggatcctgcagtacgccctgccgagacaggagtcccagcggccattcttttggattttcatggacaacttgctgctgaccgaggatgaccaggaaactaccactcggttcctgcagaccgaagccgtgaccctgcaggacgtgagaggccgggactaccagaacgccatgcgggtgtggtccaacatccctggactgaaaagcaagcacgcacctctgacccctaaagaagaggagtacctgcaggcccaggtgcggagcagaagcaagctggacgcccctaaggtggatctgctggtgaagaattgcctcctgcccctgagagagtacttcaagtatttcagccagaatagtctgcccctgggcggcccaagcagcggcgcccctcctcccagcggcggcagcccagccggctccccaacctctaccgaggagggcacctctgagtccgccacccccgagagcggccctggcacctccaccgagcccagcgagggcagcgcacccggcagccctgccggcagccccacctccacagaggagggaaccagcaccgagcccagcgaaggcagcgccccaggcaccagcaccgagcctagtgagggcggctctggcggcggcagcgcccaggagattaaacggatcaacaagatcagaagaagacttgtgaaagacagcaacaccaagaaggccggcaagacaggccccatgaaaaccctgctggttagagtgatgacacccgatctgagagagcggctggaaaacctgagaaagaagcctgaaaatatcccccagcccatcagcaatacatctagagccaacctgaataagctgctgaccgattacaccgaaatgaagaaggcgatcctgcatgtgtactgggaagagttccagaaggaccctgtgggcctgatgagccgggtggcccagcctgccagcaagaagatcgatcagaacaagctgaaacctgagatggacgagaagggcaacctgaccaccgccggctttgcctgctctcagtgtggccagcccctgttcgtgtacaagctggagcaggtgtctgagaagggcaaggcttacaccaactacttcggacggtgcaatgtggccgagcacgaaaagctgatcctgctggcccagctgaagcccgagaaggatagcgacgaagccgtgacatatagcctgggaaagtttgggcagagggccctggatttctacagcattcatgtgaccaaggagtccacccaccccgtgaagcccctggcccagatcgccggaaacagatacgcctccggacctgtgggaaaggccctgagcgacgcatgtatgggcacaatcgcctccttcctgtctaagtaccaggacatcatcatcgaacaccagaaggtggtgaagggcaaccagaagagactggagagcctgcgggagctggccggcaaggaaaacctggaataccctagcgtgaccctgccacctcagcctcacaccaaggagggcgttgatgcctacaacgaagtgatcgcccgggtgcgaatgtgggtgaacctgaacctgtggcagaagctgaagctaagcagagatgatgccaagcctctgctgagactgaagggattcccttcctttcctctggtcgagagacaggccaacgaagtggactggtgggacatggtgtgtaacgtgaagaagctgatcaacgagaaaaaggaggatggcaaggtgttttggcagaatctggctggctacaagagacaggaagccctgagaccatacctgagcagcgaggaagatcggaagaagggaaagaaattcgctcggtaccagctgggcgacctgctgctgcacctggaaaagaagcacggcgaggactggggaaaggtgtacgacgaggcctgggagcggattgacaagaaagtggaaggcctgagcaagcacatcaagctggaagaggaacggagaagcgaggacgcccagagcaaggccgccctgaccgactggctgcgggctaaggccagcttcgtgatcgagggcctgaaggaggccgacaaggacgagttctgcagatgcgagctgaagctgcagaagtggtacggggacctgcggggaaagcccttcgccatcgaagccgagaacagcatcctggacatcagcggcttcagcaagcagtacaactgtgccttcatctggcagaaggacggcgtgaagaagctgaacctgtacctgatcatcaactacttcaagggcggcaagctgcggttcaagaagatcaaacctgaagccttcgaagccaacagattctacaccgtgatcaacaaaaagagcggcgagatcgtgcccatggaggtgaacttcaacttcgacgaccccaacctgatcatcctgcctctggcctttggcaagagacagggcagagaattcatctggaacgacctgctgtccctggaaaccggcagcctgaagctggccaacggaagagtgatcgagaagacactgtacaacagaagaacccggcaggatgagcctgccctgttcgtggccctgaccttcgagcggcgggaggtcctggactcctccaatatcaaaccaatgaacctgatcggcgtggcaagaggcgaaaacatccccgccgtgatcgccctgaccgaccccgagggctgcccactgagccggtttaaggatagcctgggaaacccaacccacatcctgagaatcggcgagagctataaggagaagcagcggaccatccaggccaagaaggaggtggagcagcggagagccggcggctacagccggaagtacgccagcaaagccaagaatctggcagacgatatggtgagaaacaccgctagagatctgctgtactacgccgtgacccaggatgccatgctgatcttcgccaacctgagccggggcttcggccggcagggcaagcggaccttcatggccgagagacagtacacacggatggaggactggctgaccgccaagctggcctacgagggcctgagcaagacctacctgtccaagacactggcccagtacacctccaagacatgcagcaactgtgggtttaccatcaccagcgccgactacgacagggtgctggagaagctgaagaagacagcaacaggctggatgaccacaattaacggcaaggagctgaaggtggagggccagattacctactacaacagatacaagagacagaacgtagtcaaggacctgtccgtcgagctggatagactgagcgaagaatctgtgaacaacgacatctcctcctggacaaagggcagaagcggagaagctctgagcctcctgaagaaaagattctcccatagacccgtgcaggagaagttcgtgtgcctgaactgcggcttcgagacacacgcagccgagcaagccgccctgaacatcgccagatcctggctgttcctgcggagccaggagtacaagaaataccagacaaacaagacaaccggcaacaccgataagagagccttcgtcgagacctggcagtccttttaccggaagaagcttaaggaggtgtggaaacctgccgtgcggtctggcggatctggcggaggctccacaagcatgggccagctgaccttcaacgacgtgaccatcgagttcagcctggaggagtggcagtgcctggacaagccccagcagaacctgtacagggaggtgatgctggagaactacaggaacctggtgttcctgggcatcgccgtgagcaagcccgacctgatcacctgcctgaagcagggcaaggagccctggaacatcaggaggcacgagatggtgaccaagccccccgccatgtgcagccacttcaccagccccaagaaaaagagaaaagtctaagctgccttctgcggggcttgccttctggccatgcccttcttctctcccttgcacctgtacctcttggtctttgaataaagcctgagtaggaaggctagcaaaaaaaaaaaaaaaaaaaaaaaaaaaaaaaaaaaaaaaaaaaaaaaaaaaaaaaaaaaaaaaaaaaaaaaaaaaaaaaa

SEQ ID NO: 2925 - RNA, 5419 nt, synthetic construct
  source 1..5419: mol_type = other RNA
aggaaataagagagaaaagaagagtaagaagaaatataagagccaccatggcccctaagaagaagcgtaaagtgagccgggtgaacggcagcggcagcggcggcggcatgaaccacgaccaggagttcgacccccctaaggtgtaccctcccgtccccgccgagaagagaaagcccatccgggtcctgagcctgttcgatggcatcgccaccggtctgctggtgctgaaggacctgggcatccaggtggataggtacattgcctccgaggtgtgcgaggactccatcaccgtgggaatggtgcgtcatcagggcaagatcatgtacgtgggcgacgtgcggagcgtgacacagaagcatatccaggagtggggccctttcgacctggtgatcggcggcagcccttgcaatgacctgagcatcgtgaacccagcccggaagggcctgtacgagggaaccggcagactgttcttcgagttttacagactgctgcacgacgcccggcctaaggaaggcgacgaccggcccttcttttggctgttcgagaatgtggtggccatgggagtcagcgacaagcgggatattagccggttcctggagagcaaccccgtgatgatcgatgccaaggaagtgagcgccgcccaccgggccagatacttctggggcaatctgcctggcatgaacagacccctggccagcaccgtgaacgacaagctggagctgcaggagtgcctggagcacggccggatcgccaagttcagcaaggtgagaaccatcaccacccgaagcaacagcatcaaacaaggcaaggaccagcactttcctgtgttcatgaacgagaaggaggacatcctgtggtgtaccgagatggagagagtgttcgggttcccagtccactacacagatgtcagcaacatgtctagactggccagacagagactgctgggaagaagctggtccgtccctgtgatcagacacctgttcgcccctctgaaggagtacttcgcctgcgtgagcagcggcaacagcaacgccaacagccggggccccagcttctctagcggcctggtgccactgtccctgagagggagccacatgggccccatggagatctacaaaaccgtgagcgcctggaagcggcagcctgtgcgcgtgctgagcctgtttcggaatatcgataaagtcctgaaaagcctgggattcctggagagcggctctggctccggcggtggcaccctgaagtacgtggaggatgtgacaaacgtggtcagacgggatgtggagaagtggggccccttcgatctggtgtacggcagcacccaacccctgggcagctcttgtgaccggtgccctggctggtacatgtttcagttccaccggatcctgcagtacgccctgccgagacaggagtcccagcggccattcttttggattttcatggacaacttgctgctgaccgaggatgaccaggaaactaccactcggttcctgcagaccgaagccgtgaccctgcaggacgtgagaggccgggactaccagaacgccatgcgggtgtggtccaacatccctggactgaaaagcaagcacgcacctctgacccctaaagaagaggagtacctgcaggcccaggtgcggagcagaagcaagctggacgcccctaaggtggatctgctggtgaagaattgcctcctgcccctgagagagtacttcaagtatttcagccagaatagtctgcccctgggcggcccaagcagcggcgcccctcctcccagcggcggcagcccagccggctccccaacctctaccgaggagggcacctctgagtccgccacccccgagagcggccctggcacctccaccgagcccagcgagggcagcgcacccggcagccctgccggcagccccacctccacagaggagggaaccagcaccgagcccagcgaaggcagcgccccaggcaccagcaccgagcctagtgagggcggctctggcggcggcagcgcccaggagattaaacggatcaacaagatcagaagaagacttgtgaaagacagcaacaccaagaaggccggcaagacaggccccatgaaaaccctgctggttagagtgatgacacccgatctgagagagcggctggaaaacctgagaaagaagcctgaaaatatcccccagcccatcagcaatacatctagagccaacctgaataagctgctgaccgattacaccgaaatgaagaaggcgatcctgcatgtgtactgggaagagttccagaaggaccctgtgggcctgatgagccgggtggcccagcctgccagcaagaagatcgatcagaacaagctgaaacctgagatggacgagaagggcaacctgaccaccgccggctttgcctgctctcagtgtggccagcccctgttcgtgtacaagctggagcaggtgtctgagaagggcaaggcttacaccaactacttcggacggtgcaatgtggccgagcacgaaaagctgatcctgctggcccagctgaagcccgagaaggatagcgacgaagccgtgacatatagcctgggaaagtttgggcagagggccctggatttctacagcattcatgtgaccaaggagtccacccaccccgtgaagcccctggcccagatcgccggaaacagatacgcctccggacctgtgggaaaggccctgagcgacgcatgtatgggcacaatcgcctccttcctgtctaagtaccaggacatcatcatcgaacaccagaaggtggtgaagggcaaccagaagagactggagagcctgcgggagctggccggcaaggaaaacctggaataccctagcgtgaccctgccacctcagcctcacaccaaggagggcgttgatgcctacaacgaagtgatcgcccgggtgcgaatgtgggtgaacctgaacctgtggcagaagctgaagctaagcagagatgatgccaagcctctgctgagactgaagggattcccttcctttcctctggtcgagagacaggccaacgaagtggactggtgggacatggtgtgtaacgtgaagaagctgatcaacgagaaaaaggaggatggcaaggtgttttggcagaatctggctggctacaagagacaggaagccctgagaccatacctgagcagcgaggaagatcggaagaagggaaagaaattcgctcggtaccagctgggcgacctgctgctgcacctggaaaagaagcacggcgaggactggggaaaggtgtacgacgaggcctgggagcggattgacaagaaagtggaaggcctgagcaagcacatcaagctggaagaggaacggagaagcgaggacgcccagagcaaggccgccctgaccgactggctgcgggctaaggccagcttcgtgatcgagggcctgaaggaggccgacaaggacgagttctgcagatgcgagctgaagctgcagaagtggtacggggacctgcggggaaagcccttcgccatcgaagccgagaacagcatcctggacatcagcggcttcagcaagcagtacaactgtgccttcatctggcagaaggacggcgtgaagaagctgaacctgtacctgatcatcaactacttcaagggcggcaagctgcggttcaagaagatcaaacctgaagccttcgaagccaacagattctacaccgtgatcaacaaaaagagcggcgagatcgtgcccatggaggtgaacttcaacttcgacgaccccaacctgatcatcctgcctctggcctttggcaagagacagggcagagaattcatctggaacgacctgctgtccctggaaaccggcagcctgaagctggccaacggaagagtgatcgagaagacactgtacaacagaagaacccggcaggatgagcctgccctgttcgtggccctgaccttcgagcggcgggaggtcctggactcctccaatatcaaaccaatgaacctgatcggcgtggcaagaggcgaaaacatccccgccgtgatcgccctgaccgaccccgagggctgcccactgagccggtttaaggatagcctgggaaacccaacccacatcctgagaatcggcgagagctataaggagaagcagcggaccatccaggccaagaaggaggtggagcagcggagagccggcggctacagccggaagtacgccagcaaagccaagaatctggcagacgatatggtgagaaacaccgctagagatctgctgtactacgccgtgacccaggatgccatgctgatcttcgccaacctgagccggggcttcggccggcagggcaagcggaccttcatggccgagagacagtacacacggatggaggactggctgaccgccaagctggcctacgagggcctgagcaagacctacctgtccaagacactggcccagtacacctccaagacatgcagcaactgtgggtttaccatcaccagcgccgactacgacagggtgctggagaagctgaagaagacagcaacaggctggatgaccacaattaacggcaaggagctgaaggtggagggccagattacctactacaacagatacaagagacagaacgtagtcaaggacctgtccgtcgagctggatagactgagcgaagaatctgtgaacaacgacatctcctcctggacaaagggcagaagcggagaagctctgagcctcctgaagaaaagattctcccatagacccgtgcaggagaagttcgtgtgcctgaactgcggcttcgagacacacgcagccgagcaagccgccctgaacatcgccagatcctggctgttcctgcggagccaggagtacaagaaataccagacaaacaagacaaccggcaacaccgataagagagccttcgtcgagacctggcagtccttttaccggaagaagcttaaggaggtgtggaaacctgccgtgcggtctggcggatctggcggaggctccacaagcatgcccctgaaggccaggtaccaggagatggtgaccttcgaggacgtggccgtgcacttcaccaagaccgagtggaccggcctgagccccgcccagagggccctgtacaggagcgtgatgctggagaacttcggcaacctgaccgccctgggctaccccgtgcccaagcccgccctgatcagcctgctggagggcggcgacatggcctggggcctggaggcccaggacgacccccccgccgagaccagccccaagaaaaagagaaaagtctaagctgccttctgcggggcttgccttctggccatgcccttcttctctcccttgcacctgtacctcttggtctttgaataaagcctgagtaggaaggctagcaaaaaaaaaaaaaaaaaaaaaaaaaaaaaaaaaaaaaaaaaaaaaaaaaaaaaaaaaaaaaaaaaaaaaaaaaaaaaaaa

SEQ ID NO: 2926 - RNA, 5419 nt, synthetic construct
  source 1..5419: mol_type = other RNA
aggaaataagagagaaaagaagagtaagaagaaatataagagccaccatggcccctaagaagaagcgtaaagtgagccgggtgaacggcagcggcagcggcggcggcatgaaccacgaccaggagttcgacccccctaaggtgtaccctcccgtccccgccgagaagagaaagcccatccgggtcctgagcctgttcgatggcatcgccaccggtctgctggtgctgaaggacctgggcatccaggtggataggtacattgcctccgaggtgtgcgaggactccatcaccgtgggaatggtgcgtcatcagggcaagatcatgtacgtgggcgacgtgcggagcgtgacacagaagcatatccaggagtggggccctttcgacctggtgatcggcggcagcccttgcaatgacctgagcatcgtgaacccagcccggaagggcctgtacgagggaaccggcagactgttcttcgagttttacagactgctgcacgacgcccggcctaaggaaggcgacgaccggcccttcttttggctgttcgagaatgtggtggccatgggagtcagcgacaagcgggatattagccggttcctggagagcaaccccgtgatgatcgatgccaaggaagtgagcgccgcccaccgggccagatacttctggggcaatctgcctggcatgaacagacccctggccagcaccgtgaacgacaagctggagctgcaggagtgcctggagcacggccggatcgccaagttcagcaaggtgagaaccatcaccacccgaagcaacagcatcaaacaaggcaaggaccagcactttcctgtgttcatgaacgagaaggaggacatcctgtggtgtaccgagatggagagagtgttcgggttcccagtccactacacagatgtcagcaacatgtctagactggccagacagagactgctgggaagaagctggtccgtccctgtgatcagacacctgttcgcccctctgaaggagtacttcgcctgcgtgagcagcggcaacagcaacgccaacagccggggccccagcttctctagcggcctggtgccactgtccctgagagggagccacatgggccccatggagatctacaaaaccgtgagcgcctggaagcggcagcctgtgcgcgtgctgagcctgtttcggaatatcgataaagtcctgaaaagcctgggattcctggagagcggctctggctccggcggtggcaccctgaagtacgtggaggatgtgacaaacgtggtcagacgggatgtggagaagtggggccccttcgatctggtgtacggcagcacccaacccctgggcagctcttgtgaccggtgccctggctggtacatgtttcagttccaccggatcctgcagtacgccctgccgagacaggagtcccagcggccattcttttggattttcatggacaacttgctgctgaccgaggatgaccaggaaactaccactcggttcctgcagaccgaagccgtgaccctgcaggacgtgagaggccgggactaccagaacgccatgcgggtgtggtccaacatccctggactgaaaagcaagcacgcacctctgacccctaaagaagaggagtacctgcaggcccaggtgcggagcagaagcaagctggacgcccctaaggtggatctgctggtgaagaattgcctcctgcccctgagagagtacttcaagtatttcagccagaatagtctgcccctgggcggcccaagcagcggcgcccctcctcccagcggcggcagcccagccggctccccaacctctaccgaggagggcacctctgagtccgccacccccgagagcggccctggcacctccaccgagcccagcgagggcagcgcacccggcagccctgccggcagccccacctccacagaggagggaaccagcaccgagcccagcgaaggcagcgccccaggcaccagcaccgagcctagtgagggcggctctggcggcggcagcgcccaggagattaaacggatcaacaagatcagaagaagacttgtgaaagacagcaacaccaagaaggccggcaagacaggccccatgaaaaccctgctggttagagtgatgacacccgatctgagagagcggctggaaaacctgagaaagaagcctgaaaatatcccccagcccatcagcaatacatctagagccaacctgaataagctgctgaccgattacaccgaaatgaagaaggcgatcctgcatgtgtactgggaagagttccagaaggaccctgtgggcctgatgagccgggtggcccagcctgccagcaagaagatcgatcagaacaagctgaaacctgagatggacgagaagggcaacctgaccaccgccggctttgcctgctctcagtgtggccagcccctgttcgtgtacaagctggagcaggtgtctgagaagggcaaggcttacaccaactacttcggacggtgcaatgtggccgagcacgaaaagctgatcctgctggcccagctgaagcccgagaaggatagcgacgaagccgtgacatatagcctgggaaagtttgggcagagggccctggatttctacagcattcatgtgaccaaggagtccacccaccccgtgaagcccctggcccagatcgccggaaacagatacgcctccggacctgtgggaaaggccctgagcgacgcatgtatgggcacaatcgcctccttcctgtctaagtaccaggacatcatcatcgaacaccagaaggtggtgaagggcaaccagaagagactggagagcctgcgggagctggccggcaaggaaaacctggaataccctagcgtgaccctgccacctcagcctcacaccaaggagggcgttgatgcctacaacgaagtgatcgcccgggtgcgaatgtgggtgaacctgaacctgtggcagaagctgaagctaagcagagatgatgccaagcctctgctgagactgaagggattcccttcctttcctctggtcgagagacaggccaacgaagtggactggtgggacatggtgtgtaacgtgaagaagctgatcaacgagaaaaaggaggatggcaaggtgttttggcagaatctggctggctacaagagacaggaagccctgagaccatacctgagcagcgaggaagatcggaagaagggaaagaaattcgctcggtaccagctgggcgacctgctgctgcacctggaaaagaagcacggcgaggactggggaaaggtgtacgacgaggcctgggagcggattgacaagaaagtggaaggcctgagcaagcacatcaagctggaagaggaacggagaagcgaggacgcccagagcaaggccgccctgaccgactggctgcgggctaaggccagcttcgtgatcgagggcctgaaggaggccgacaaggacgagttctgcagatgcgagctgaagctgcagaagtggtacggggacctgcggggaaagcccttcgccatcgaagccgagaacagcatcctggacatcagcggcttcagcaagcagtacaactgtgccttcatctggcagaaggacggcgtgaagaagctgaacctgtacctgatcatcaactacttcaagggcggcaagctgcggttcaagaagatcaaacctgaagccttcgaagccaacagattctacaccgtgatcaacaaaaagagcggcgagatcgtgcccatggaggtgaacttcaacttcgacgaccccaacctgatcatcctgcctctggcctttggcaagagacagggcagagaattcatctggaacgacctgctgtccctggaaaccggcagcctgaagctggccaacggaagagtgatcgagaagacactgtacaacagaagaacccggcaggatgagcctgccctgttcgtggccctgaccttcgagcggcgggaggtcctggactcctccaatatcaaaccaatgaacctgatcggcgtggcaagaggcgaaaacatccccgccgtgatcgccctgaccgaccccgagggctgcccactgagccggtttaaggatagcctgggaaacccaacccacatcctgagaatcggcgagagctataaggagaagcagcggaccatccaggccaagaaggaggtggagcagcggagagccggcggctacagccggaagtacgccagcaaagccaagaatctggcagacgatatggtgagaaacaccgctagagatctgctgtactacgccgtgacccaggatgccatgctgatcttcgccaacctgagccggggcttcggccggcagggcaagcggaccttcatggccgagagacagtacacacggatggaggactggctgaccgccaagctggcctacgagggcctgagcaagacctacctgtccaagacactggcccagtacacctccaagacatgcagcaactgtgggtttaccatcaccagcgccgactacgacagggtgctggagaagctgaagaagacagcaacaggctggatgaccacaattaacggcaaggagctgaaggtggagggccagattacctactacaacagatacaagagacagaacgtagtcaaggacctgtccgtcgagctggatagactgagcgaagaatctgtgaacaacgacatctcctcctggacaaagggcagaagcggagaagctctgagcctcctgaagaaaagattctcccatagacccgtgcaggagaagttcgtgtgcctgaactgcggcttcgagacacacgcagccgagcaagccgccctgaacatcgccagatcctggctgttcctgcggagccaggagtacaagaaataccagacaaacaagacaaccggcaacaccgataagagagccttcgtcgagacctggcagtccttttaccggaagaagcttaaggaggtgtggaaacctgccgtgcggtctggcggatctggcggaggctccacaagcttccaggagagcgtgatgttcgaggacgtggccgtgtacttcacccagaaggagtgggccgacctggcccccgcccagagggccctgtacagggacgtgatgctggagaactacggcaacatggtgagcctggccttccccttccccaagcccgccgtgatcagcaagctggagaggggcgaggagccctggggcctggacccccaggtggtgcccaacgaggagggcctgaagggcttccccaccagccccaagaaaaagagaaaagtctaagctgccttctgcggggcttgccttctggccatgcccttcttctctcccttgcacctgtacctcttggtctttgaataaagcctgagtaggaaggctagcaaaaaaaaaaaaaaaaaaaaaaaaaaaaaaaaaaaaaaaaaaaaaaaaaaaaaaaaaaaaaaaaaaaaaaaaaaaaaaaa

SEQ ID NO: 2927 - RNA, 5419 nt, synthetic construct
  source 1..5419: mol_type = other RNA
aggaaataagagagaaaagaagagtaagaagaaatataagagccaccatggcccctaagaagaagcgtaaagtgagccgggtgaacggcagcggcagcggcggcggcatgaaccacgaccaggagttcgacccccctaaggtgtaccctcccgtccccgccgagaagagaaagcccatccgggtcctgagcctgttcgatggcatcgccaccggtctgctggtgctgaaggacctgggcatccaggtggataggtacattgcctccgaggtgtgcgaggactccatcaccgtgggaatggtgcgtcatcagggcaagatcatgtacgtgggcgacgtgcggagcgtgacacagaagcatatccaggagtggggccctttcgacctggtgatcggcggcagcccttgcaatgacctgagcatcgtgaacccagcccggaagggcctgtacgagggaaccggcagactgttcttcgagttttacagactgctgcacgacgcccggcctaaggaaggcgacgaccggcccttcttttggctgttcgagaatgtggtggccatgggagtcagcgacaagcgggatattagccggttcctggagagcaaccccgtgatgatcgatgccaaggaagtgagcgccgcccaccgggccagatacttctggggcaatctgcctggcatgaacagacccctggccagcaccgtgaacgacaagctggagctgcaggagtgcctggagcacggccggatcgccaagttcagcaaggtgagaaccatcaccacccgaagcaacagcatcaaacaaggcaaggaccagcactttcctgtgttcatgaacgagaaggaggacatcctgtggtgtaccgagatggagagagtgttcgggttcccagtccactacacagatgtcagcaacatgtctagactggccagacagagactgctgggaagaagctggtccgtccctgtgatcagacacctgttcgcccctctgaaggagtacttcgcctgcgtgagcagcggcaacagcaacgccaacagccggggccccagcttctctagcggcctggtgccactgtccctgagagggagccacatgggccccatggagatctacaaaaccgtgagcgcctggaagcggcagcctgtgcgcgtgctgagcctgtttcggaatatcgataaagtcctgaaaagcctgggattcctggagagcggctctggctccggcggtggcaccctgaagtacgtggaggatgtgacaaacgtggtcagacgggatgtggagaagtggggccccttcgatctggtgtacggcagcacccaacccctgggcagctcttgtgaccggtgccctggctggtacatgtttcagttccaccggatcctgcagtacgccctgccgagacaggagtcccagcggccattcttttggattttcatggacaacttgctgctgaccgaggatgaccaggaaactaccactcggttcctgcagaccgaagccgtgaccctgcaggacgtgagaggccgggactaccagaacgccatgcgggtgtggtccaacatccctggactgaaaagcaagcacgcacctctgacccctaaagaagaggagtacctgcaggcccaggtgcggagcagaagcaagctggacgcccctaaggtggatctgctggtgaagaattgcctcctgcccctgagagagtacttcaagtatttcagccagaatagtctgcccctgggcggcccaagcagcggcgcccctcctcccagcggcggcagcccagccggctccccaacctctaccgaggagggcacctctgagtccgccacccccgagagcggccctggcacctccaccgagcccagcgagggcagcgcacccggcagccctgccggcagccccacctccacagaggagggaaccagcaccgagcccagcgaaggcagcgccccaggcaccagcaccgagcctagtgagggcggctctggcggcggcagcgcccaggagattaaacggatcaacaagatcagaagaagacttgtgaaagacagcaacaccaagaaggccggcaagacaggccccatgaaaaccctgctggttagagtgatgacacccgatctgagagagcggctggaaaacctgagaaagaagcctgaaaatatcccccagcccatcagcaatacatctagagccaacctgaataagctgctgaccgattacaccgaaatgaagaaggcgatcctgcatgtgtactgggaagagttccagaaggaccctgtgggcctgatgagccgggtggcccagcctgccagcaagaagatcgatcagaacaagctgaaacctgagatggacgagaagggcaacctgaccaccgccggctttgcctgctctcagtgtggccagcccctgttcgtgtacaagctggagcaggtgtctgagaagggcaaggcttacaccaactacttcggacggtgcaatgtggccgagcacgaaaagctgatcctgctggcccagctgaagcccgagaaggatagcgacgaagccgtgacatatagcctgggaaagtttgggcagagggccctggatttctacagcattcatgtgaccaaggagtccacccaccccgtgaagcccctggcccagatcgccggaaacagatacgcctccggacctgtgggaaaggccctgagcgacgcatgtatgggcacaatcgcctccttcctgtctaagtaccaggacatcatcatcgaacaccagaaggtggtgaagggcaaccagaagagactggagagcctgcgggagctggccggcaaggaaaacctggaataccctagcgtgaccctgccacctcagcctcacaccaaggagggcgttgatgcctacaacgaagtgatcgcccgggtgcgaatgtgggtgaacctgaacctgtggcagaagctgaagctaagcagagatgatgccaagcctctgctgagactgaagggattcccttcctttcctctggtcgagagacaggccaacgaagtggactggtgggacatggtgtgtaacgtgaagaagctgatcaacgagaaaaaggaggatggcaaggtgttttggcagaatctggctggctacaagagacaggaagccctgagaccatacctgagcagcgaggaagatcggaagaagggaaagaaattcgctcggtaccagctgggcgacctgctgctgcacctggaaaagaagcacggcgaggactggggaaaggtgtacgacgaggcctgggagcggattgacaagaaagtggaaggcctgagcaagcacatcaagctggaagaggaacggagaagcgaggacgcccagagcaaggccgccctgaccgactggctgcgggctaaggccagcttcgtgatcgagggcctgaaggaggccgacaaggacgagttctgcagatgcgagctgaagctgcagaagtggtacggggacctgcggggaaagcccttcgccatcgaagccgagaacagcatcctggacatcagcggcttcagcaagcagtacaactgtgccttcatctggcagaaggacggcgtgaagaagctgaacctgtacctgatcatcaactacttcaagggcggcaagctgcggttcaagaagatcaaacctgaagccttcgaagccaacagattctacaccgtgatcaacaaaaagagcggcgagatcgtgcccatggaggtgaacttcaacttcgacgaccccaacctgatcatcctgcctctggcctttggcaagagacagggcagagaattcatctggaacgacctgctgtccctggaaaccggcagcctgaagctggccaacggaagagtgatcgagaagacactgtacaacagaagaacccggcaggatgagcctgccctgttcgtggccctgaccttcgagcggcgggaggtcctggactcctccaatatcaaaccaatgaacctgatcggcgtggcaagaggcgaaaacatccccgccgtgatcgccctgaccgaccccgagggctgcccactgagccggtttaaggatagcctgggaaacccaacccacatcctgagaatcggcgagagctataaggagaagcagcggaccatccaggccaagaaggaggtggagcagcggagagccggcggctacagccggaagtacgccagcaaagccaagaatctggcagacgatatggtgagaaacaccgctagagatctgctgtactacgccgtgacccaggatgccatgctgatcttcgccaacctgagccggggcttcggccggcagggcaagcggaccttcatggccgagagacagtacacacggatggaggactggctgaccgccaagctggcctacgagggcctgagcaagacctacctgtccaagacactggcccagtacacctccaagacatgcagcaactgtgggtttaccatcaccagcgccgactacgacagggtgctggagaagctgaagaagacagcaacaggctggatgaccacaattaacggcaaggagctgaaggtggagggccagattacctactacaacagatacaagagacagaacgtagtcaaggacctgtccgtcgagctggatagactgagcgaagaatctgtgaacaacgacatctcctcctggacaaagggcagaagcggagaagctctgagcctcctgaagaaaagattctcccatagacccgtgcaggagaagttcgtgtgcctgaactgcggcttcgagacacacgcagccgagcaagccgccctgaacatcgccagatcctggctgttcctgcggagccaggagtacaagaaataccagacaaacaagacaaccggcaacaccgataagagagccttcgtcgagacctggcagtccttttaccggaagaagcttaaggaggtgtggaaacctgccgtgcggtctggcggatctggcggaggctccacaagcatggtgttcgaggacgtggccgtgtacttcagcagggaggagtggggcctgctggacagcgcccagagggccctgtacaggcaggtgatgctggagaacttcgccctggtggccagcctgggcctgagcgccagcaggcccaggatcgtgctgcagctggagaggggcgaggagccctgggtgctgagcggcctggacgtggccctggccagggacgcccagaggaggcccggccccggcgagaccagccccaagaaaaagagaaaagtctaagctgccttctgcggggcttgccttctggccatgcccttcttctctcccttgcacctgtacctcttggtctttgaataaagcctgagtaggaaggctagcaaaaaaaaaaaaaaaaaaaaaaaaaaaaaaaaaaaaaaaaaaaaaaaaaaaaaaaaaaaaaaaaaaaaaaaaaaaaaaaa

SEQ ID NO: 2928 - RNA, 5419 nt, synthetic construct
  source 1..5419: mol_type = other RNA
aggaaataagagagaaaagaagagtaagaagaaatataagagccaccatggcccctaagaagaagcgtaaagtgagccgggtgaacggcagcggcagcggcggcggcatgaaccacgaccaggagttcgacccccctaaggtgtaccctcccgtccccgccgagaagagaaagcccatccgggtcctgagcctgttcgatggcatcgccaccggtctgctggtgctgaaggacctgggcatccaggtggataggtacattgcctccgaggtgtgcgaggactccatcaccgtgggaatggtgcgtcatcagggcaagatcatgtacgtgggcgacgtgcggagcgtgacacagaagcatatccaggagtggggccctttcgacctggtgatcggcggcagcccttgcaatgacctgagcatcgtgaacccagcccggaagggcctgtacgagggaaccggcagactgttcttcgagttttacagactgctgcacgacgcccggcctaaggaaggcgacgaccggcccttcttttggctgttcgagaatgtggtggccatgggagtcagcgacaagcgggatattagccggttcctggagagcaaccccgtgatgatcgatgccaaggaagtgagcgccgcccaccgggccagatacttctggggcaatctgcctggcatgaacagacccctggccagcaccgtgaacgacaagctggagctgcaggagtgcctggagcacggccggatcgccaagttcagcaaggtgagaaccatcaccacccgaagcaacagcatcaaacaaggcaaggaccagcactttcctgtgttcatgaacgagaaggaggacatcctgtggtgtaccgagatggagagagtgttcgggttcccagtccactacacagatgtcagcaacatgtctagactggccagacagagactgctgggaagaagctggtccgtccctgtgatcagacacctgttcgcccctctgaaggagtacttcgcctgcgtgagcagcggcaacagcaacgccaacagccggggccccagcttctctagcggcctggtgccactgtccctgagagggagccacatgggccccatggagatctacaaaaccgtgagcgcctggaagcggcagcctgtgcgcgtgctgagcctgtttcggaatatcgataaagtcctgaaaagcctgggattcctggagagcggctctggctccggcggtggcaccctgaagtacgtggaggatgtgacaaacgtggtcagacgggatgtggagaagtggggccccttcgatctggtgtacggcagcacccaacccctgggcagctcttgtgaccggtgccctggctggtacatgtttcagttccaccggatcctgcagtacgccctgccgagacaggagtcccagcggccattcttttggattttcatggacaacttgctgctgaccgaggatgaccaggaaactaccactcggttcctgcagaccgaagccgtgaccctgcaggacgtgagaggccgggactaccagaacgccatgcgggtgtggtccaacatccctggactgaaaagcaagcacgcacctctgacccctaaagaagaggagtacctgcaggcccaggtgcggagcagaagcaagctggacgcccctaaggtggatctgctggtgaagaattgcctcctgcccctgagagagtacttcaagtatttcagccagaatagtctgcccctgggcggcccaagcagcggcgcccctcctcccagcggcggcagcccagccggctccccaacctctaccgaggagggcacctctgagtccgccacccccgagagcggccctggcacctccaccgagcccagcgagggcagcgcacccggcagccctgccggcagccccacctccacagaggagggaaccagcaccgagcccagcgaaggcagcgccccaggcaccagcaccgagcctagtgagggcggctctggcggcggcagcgcccaggagattaaacggatcaacaagatcagaagaagacttgtgaaagacagcaacaccaagaaggccggcaagacaggccccatgaaaaccctgctggttagagtgatgacacccgatctgagagagcggctggaaaacctgagaaagaagcctgaaaatatcccccagcccatcagcaatacatctagagccaacctgaataagctgctgaccgattacaccgaaatgaagaaggcgatcctgcatgtgtactgggaagagttccagaaggaccctgtgggcctgatgagccgggtggcccagcctgccagcaagaagatcgatcagaacaagctgaaacctgagatggacgagaagggcaacctgaccaccgccggctttgcctgctctcagtgtggccagcccctgttcgtgtacaagctggagcaggtgtctgagaagggcaaggcttacaccaactacttcggacggtgcaatgtggccgagcacgaaaagctgatcctgctggcccagctgaagcccgagaaggatagcgacgaagccgtgacatatagcctgggaaagtttgggcagagggccctggatttctacagcattcatgtgaccaaggagtccacccaccccgtgaagcccctggcccagatcgccggaaacagatacgcctccggacctgtgggaaaggccctgagcgacgcatgtatgggcacaatcgcctccttcctgtctaagtaccaggacatcatcatcgaacaccagaaggtggtgaagggcaaccagaagagactggagagcctgcgggagctggccggcaaggaaaacctggaataccctagcgtgaccctgccacctcagcctcacaccaaggagggcgttgatgcctacaacgaagtgatcgcccgggtgcgaatgtgggtgaacctgaacctgtggcagaagctgaagctaagcagagatgatgccaagcctctgctgagactgaagggattcccttcctttcctctggtcgagagacaggccaacgaagtggactggtgggacatggtgtgtaacgtgaagaagctgatcaacgagaaaaaggaggatggcaaggtgttttggcagaatctggctggctacaagagacaggaagccctgagaccatacctgagcagcgaggaagatcggaagaagggaaagaaattcgctcggtaccagctgggcgacctgctgctgcacctggaaaagaagcacggcgaggactggggaaaggtgtacgacgaggcctgggagcggattgacaagaaagtggaaggcctgagcaagcacatcaagctggaagaggaacggagaagcgaggacgcccagagcaaggccgccctgaccgactggctgcgggctaaggccagcttcgtgatcgagggcctgaaggaggccgacaaggacgagttctgcagatgcgagctgaagctgcagaagtggtacggggacctgcggggaaagcccttcgccatcgaagccgagaacagcatcctggacatcagcggcttcagcaagcagtacaactgtgccttcatctggcagaaggacggcgtgaagaagctgaacctgtacctgatcatcaactacttcaagggcggcaagctgcggttcaagaagatcaaacctgaagccttcgaagccaacagattctacaccgtgatcaacaaaaagagcggcgagatcgtgcccatggaggtgaacttcaacttcgacgaccccaacctgatcatcctgcctctggcctttggcaagagacagggcagagaattcatctggaacgacctgctgtccctggaaaccggcagcctgaagctggccaacggaagagtgatcgagaagacactgtacaacagaagaacccggcaggatgagcctgccctgttcgtggccctgaccttcgagcggcgggaggtcctggactcctccaatatcaaaccaatgaacctgatcggcgtggcaagaggcgaaaacatccccgccgtgatcgccctgaccgaccccgagggctgcccactgagccggtttaaggatagcctgggaaacccaacccacatcctgagaatcggcgagagctataaggagaagcagcggaccatccaggccaagaaggaggtggagcagcggagagccggcggctacagccggaagtacgccagcaaagccaagaatctggcagacgatatggtgagaaacaccgctagagatctgctgtactacgccgtgacccaggatgccatgctgatcttcgccaacctgagccggggcttcggccggcagggcaagcggaccttcatggccgagagacagtacacacggatggaggactggctgaccgccaagctggcctacgagggcctgagcaagacctacctgtccaagacactggcccagtacacctccaagacatgcagcaactgtgggtttaccatcaccagcgccgactacgacagggtgctggagaagctgaagaagacagcaacaggctggatgaccacaattaacggcaaggagctgaaggtggagggccagattacctactacaacagatacaagagacagaacgtagtcaaggacctgtccgtcgagctggatagactgagcgaagaatctgtgaacaacgacatctcctcctggacaaagggcagaagcggagaagctctgagcctcctgaagaaaagattctcccatagacccgtgcaggagaagttcgtgtgcctgaactgcggcttcgagacacacgcagccgagcaagccgccctgaacatcgccagatcctggctgttcctgcggagccaggagtacaagaaataccagacaaacaagacaaccggcaacaccgataagagagccttcgtcgagacctggcagtccttttaccggaagaagcttaaggaggtgtggaaacctgccgtgcggtctggcggatctggcggaggctccacaagcagcgtggccttcagggacgtgatcgtggacttcacccaggaggagtggcagcagctgaagcccgcccagaaggacctgtacagggacgtgatgatggagaactactggaacctggtgagcctggacctggagaccaggcccgacaagaaggagagcgacccccaggaggacgactgggaggacaggcccagcatcgccgtggtggccgagggccccatgaggaccggcgaccagggctgcatcaccagccccaagaaaaagagaaaagtctaagctgccttctgcggggcttgccttctggccatgcccttcttctctcccttgcacctgtacctcttggtctttgaataaagcctgagtaggaaggctagcaaaaaaaaaaaaaaaaaaaaaaaaaaaaaaaaaaaaaaaaaaaaaaaaaaaaaaaaaaaaaaaaaaaaaaaaaaaaaaaa

SEQ ID NO: 2929 - RNA, 5419 nt, synthetic construct
  source 1..5419: mol_type = other RNA
aggaaataagagagaaaagaagagtaagaagaaatataagagccaccatggcccctaagaagaagcgtaaagtgagccgggtgaacggcagcggcagcggcggcggcatgaaccacgaccaggagttcgacccccctaaggtgtaccctcccgtccccgccgagaagagaaagcccatccgggtcctgagcctgttcgatggcatcgccaccggtctgctggtgctgaaggacctgggcatccaggtggataggtacattgcctccgaggtgtgcgaggactccatcaccgtgggaatggtgcgtcatcagggcaagatcatgtacgtgggcgacgtgcggagcgtgacacagaagcatatccaggagtggggccctttcgacctggtgatcggcggcagcccttgcaatgacctgagcatcgtgaacccagcccggaagggcctgtacgagggaaccggcagactgttcttcgagttttacagactgctgcacgacgcccggcctaaggaaggcgacgaccggcccttcttttggctgttcgagaatgtggtggccatgggagtcagcgacaagcgggatattagccggttcctggagagcaaccccgtgatgatcgatgccaaggaagtgagcgccgcccaccgggccagatacttctggggcaatctgcctggcatgaacagacccctggccagcaccgtgaacgacaagctggagctgcaggagtgcctggagcacggccggatcgccaagttcagcaaggtgagaaccatcaccacccgaagcaacagcatcaaacaaggcaaggaccagcactttcctgtgttcatgaacgagaaggaggacatcctgtggtgtaccgagatggagagagtgttcgggttcccagtccactacacagatgtcagcaacatgtctagactggccagacagagactgctgggaagaagctggtccgtccctgtgatcagacacctgttcgcccctctgaaggagtacttcgcctgcgtgagcagcggcaacagcaacgccaacagccggggccccagcttctctagcggcctggtgccactgtccctgagagggagccacatgggccccatggagatctacaaaaccgtgagcgcctggaagcggcagcctgtgcgcgtgctgagcctgtttcggaatatcgataaagtcctgaaaagcctgggattcctggagagcggctctggctccggcggtggcaccctgaagtacgtggaggatgtgacaaacgtggtcagacgggatgtggagaagtggggccccttcgatctggtgtacggcagcacccaacccctgggcagctcttgtgaccggtgccctggctggtacatgtttcagttccaccggatcctgcagtacgccctgccgagacaggagtcccagcggccattcttttggattttcatggacaacttgctgctgaccgaggatgaccaggaaactaccactcggttcctgcagaccgaagccgtgaccctgcaggacgtgagaggccgggactaccagaacgccatgcgggtgtggtccaacatccctggactgaaaagcaagcacgcacctctgacccctaaagaagaggagtacctgcaggcccaggtgcggagcagaagcaagctggacgcccctaaggtggatctgctggtgaagaattgcctcctgcccctgagagagtacttcaagtatttcagccagaatagtctgcccctgggcggcccaagcagcggcgcccctcctcccagcggcggcagcccagccggctccccaacctctaccgaggagggcacctctgagtccgccacccccgagagcggccctggcacctccaccgagcccagcgagggcagcgcacccggcagccctgccggcagccccacctccacagaggagggaaccagcaccgagcccagcgaaggcagcgccccaggcaccagcaccgagcctagtgagggcggctctggcggcggcagcgcccaggagattaaacggatcaacaagatcagaagaagacttgtgaaagacagcaacaccaagaaggccggcaagacaggccccatgaaaaccctgctggttagagtgatgacacccgatctgagagagcggctggaaaacctgagaaagaagcctgaaaatatcccccagcccatcagcaatacatctagagccaacctgaataagctgctgaccgattacaccgaaatgaagaaggcgatcctgcatgtgtactgggaagagttccagaaggaccctgtgggcctgatgagccgggtggcccagcctgccagcaagaagatcgatcagaacaagctgaaacctgagatggacgagaagggcaacctgaccaccgccggctttgcctgctctcagtgtggccagcccctgttcgtgtacaagctggagcaggtgtctgagaagggcaaggcttacaccaactacttcggacggtgcaatgtggccgagcacgaaaagctgatcctgctggcccagctgaagcccgagaaggatagcgacgaagccgtgacatatagcctgggaaagtttgggcagagggccctggatttctacagcattcatgtgaccaaggagtccacccaccccgtgaagcccctggcccagatcgccggaaacagatacgcctccggacctgtgggaaaggccctgagcgacgcatgtatgggcacaatcgcctccttcctgtctaagtaccaggacatcatcatcgaacaccagaaggtggtgaagggcaaccagaagagactggagagcctgcgggagctggccggcaaggaaaacctggaataccctagcgtgaccctgccacctcagcctcacaccaaggagggcgttgatgcctacaacgaagtgatcgcccgggtgcgaatgtgggtgaacctgaacctgtggcagaagctgaagctaagcagagatgatgccaagcctctgctgagactgaagggattcccttcctttcctctggtcgagagacaggccaacgaagtggactggtgggacatggtgtgtaacgtgaagaagctgatcaacgagaaaaaggaggatggcaaggtgttttggcagaatctggctggctacaagagacaggaagccctgagaccatacctgagcagcgaggaagatcggaagaagggaaagaaattcgctcggtaccagctgggcgacctgctgctgcacctggaaaagaagcacggcgaggactggggaaaggtgtacgacgaggcctgggagcggattgacaagaaagtggaaggcctgagcaagcacatcaagctggaagaggaacggagaagcgaggacgcccagagcaaggccgccctgaccgactggctgcgggctaaggccagcttcgtgatcgagggcctgaaggaggccgacaaggacgagttctgcagatgcgagctgaagctgcagaagtggtacggggacctgcggggaaagcccttcgccatcgaagccgagaacagcatcctggacatcagcggcttcagcaagcagtacaactgtgccttcatctggcagaaggacggcgtgaagaagctgaacctgtacctgatcatcaactacttcaagggcggcaagctgcggttcaagaagatcaaacctgaagccttcgaagccaacagattctacaccgtgatcaacaaaaagagcggcgagatcgtgcccatggaggtgaacttcaacttcgacgaccccaacctgatcatcctgcctctggcctttggcaagagacagggcagagaattcatctggaacgacctgctgtccctggaaaccggcagcctgaagctggccaacggaagagtgatcgagaagacactgtacaacagaagaacccggcaggatgagcctgccctgttcgtggccctgaccttcgagcggcgggaggtcctggactcctccaatatcaaaccaatgaacctgatcggcgtggcaagaggcgaaaacatccccgccgtgatcgccctgaccgaccccgagggctgcccactgagccggtttaaggatagcctgggaaacccaacccacatcctgagaatcggcgagagctataaggagaagcagcggaccatccaggccaagaaggaggtggagcagcggagagccggcggctacagccggaagtacgccagcaaagccaagaatctggcagacgatatggtgagaaacaccgctagagatctgctgtactacgccgtgacccaggatgccatgctgatcttcgccaacctgagccggggcttcggccggcagggcaagcggaccttcatggccgagagacagtacacacggatggaggactggctgaccgccaagctggcctacgagggcctgagcaagacctacctgtccaagacactggcccagtacacctccaagacatgcagcaactgtgggtttaccatcaccagcgccgactacgacagggtgctggagaagctgaagaagacagcaacaggctggatgaccacaattaacggcaaggagctgaaggtggagggccagattacctactacaacagatacaagagacagaacgtagtcaaggacctgtccgtcgagctggatagactgagcgaagaatctgtgaacaacgacatctcctcctggacaaagggcagaagcggagaagctctgagcctcctgaagaaaagattctcccatagacccgtgcaggagaagttcgtgtgcctgaactgcggcttcgagacacacgcagccgagcaagccgccctgaacatcgccagatcctggctgttcctgcggagccaggagtacaagaaataccagacaaacaagacaaccggcaacaccgataagagagccttcgtcgagacctggcagtccttttaccggaagaagcttaaggaggtgtggaaacctgccgtgcggtctggcggatctggcggaggctccacaagcatggacgccgtgacctacgaggacgtgcacgtgaacttcagccaggaggagtgggccctgctggaccccagccagaagagcctgtacaaggacgtgatgctggagacctactggaacctgacctgcatcggctacaagtgggaggaccacaacatcgaggaccagcaccagagcagcggcaggcacggcaggtgcatcaactgccccagcgcctacggcaagaagcagtgcaccaacctgttcaccagccccaagaaaaagagaaaagtctaagctgccttctgcggggcttgccttctggccatgcccttcttctctcccttgcacctgtacctcttggtctttgaataaagcctgagtaggaaggctagcaaaaaaaaaaaaaaaaaaaaaaaaaaaaaaaaaaaaaaaaaaaaaaaaaaaaaaaaaaaaaaaaaaaaaaaaaaaaaaaa

SEQ ID NO: 2930 - RNA, 5419 nt, synthetic construct
  source 1..5419: mol_type = other RNA
aggaaataagagagaaaagaagagtaagaagaaatataagagccaccatggcccctaagaagaagcgtaaagtgagccgggtgaacggcagcggcagcggcggcggcatgaaccacgaccaggagttcgacccccctaaggtgtaccctcccgtccccgccgagaagagaaagcccatccgggtcctgagcctgttcgatggcatcgccaccggtctgctggtgctgaaggacctgggcatccaggtggataggtacattgcctccgaggtgtgcgaggactccatcaccgtgggaatggtgcgtcatcagggcaagatcatgtacgtgggcgacgtgcggagcgtgacacagaagcatatccaggagtggggccctttcgacctggtgatcggcggcagcccttgcaatgacctgagcatcgtgaacccagcccggaagggcctgtacgagggaaccggcagactgttcttcgagttttacagactgctgcacgacgcccggcctaaggaaggcgacgaccggcccttcttttggctgttcgagaatgtggtggccatgggagtcagcgacaagcgggatattagccggttcctggagagcaaccccgtgatgatcgatgccaaggaagtgagcgccgcccaccgggccagatacttctggggcaatctgcctggcatgaacagacccctggccagcaccgtgaacgacaagctggagctgcaggagtgcctggagcacggccggatcgccaagttcagcaaggtgagaaccatcaccacccgaagcaacagcatcaaacaaggcaaggaccagcactttcctgtgttcatgaacgagaaggaggacatcctgtggtgtaccgagatggagagagtgttcgggttcccagtccactacacagatgtcagcaacatgtctagactggccagacagagactgctgggaagaagctggtccgtccctgtgatcagacacctgttcgcccctctgaaggagtacttcgcctgcgtgagcagcggcaacagcaacgccaacagccggggccccagcttctctagcggcctggtgccactgtccctgagagggagccacatgggccccatggagatctacaaaaccgtgagcgcctggaagcggcagcctgtgcgcgtgctgagcctgtttcggaatatcgataaagtcctgaaaagcctgggattcctggagagcggctctggctccggcggtggcaccctgaagtacgtggaggatgtgacaaacgtggtcagacgggatgtggagaagtggggccccttcgatctggtgtacggcagcacccaacccctgggcagctcttgtgaccggtgccctggctggtacatgtttcagttccaccggatcctgcagtacgccctgccgagacaggagtcccagcggccattcttttggattttcatggacaacttgctgctgaccgaggatgaccaggaaactaccactcggttcctgcagaccgaagccgtgaccctgcaggacgtgagaggccgggactaccagaacgccatgcgggtgtggtccaacatccctggactgaaaagcaagcacgcacctctgacccctaaagaagaggagtacctgcaggcccaggtgcggagcagaagcaagctggacgcccctaaggtggatctgctggtgaagaattgcctcctgcccctgagagagtacttcaagtatttcagccagaatagtctgcccctgggcggcccaagcagcggcgcccctcctcccagcggcggcagcccagccggctccccaacctctaccgaggagggcacctctgagtccgccacccccgagagcggccctggcacctccaccgagcccagcgagggcagcgcacccggcagccctgccggcagccccacctccacagaggagggaaccagcaccgagcccagcgaaggcagcgccccaggcaccagcaccgagcctagtgagggcggctctggcggcggcagcgcccaggagattaaacggatcaacaagatcagaagaagacttgtgaaagacagcaacaccaagaaggccggcaagacaggccccatgaaaaccctgctggttagagtgatgacacccgatctgagagagcggctggaaaacctgagaaagaagcctgaaaatatcccccagcccatcagcaatacatctagagccaacctgaataagctgctgaccgattacaccgaaatgaagaaggcgatcctgcatgtgtactgggaagagttccagaaggaccctgtgggcctgatgagccgggtggcccagcctgccagcaagaagatcgatcagaacaagctgaaacctgagatggacgagaagggcaacctgaccaccgccggctttgcctgctctcagtgtggccagcccctgttcgtgtacaagctggagcaggtgtctgagaagggcaaggcttacaccaactacttcggacggtgcaatgtggccgagcacgaaaagctgatcctgctggcccagctgaagcccgagaaggatagcgacgaagccgtgacatatagcctgggaaagtttgggcagagggccctggatttctacagcattcatgtgaccaaggagtccacccaccccgtgaagcccctggcccagatcgccggaaacagatacgcctccggacctgtgggaaaggccctgagcgacgcatgtatgggcacaatcgcctccttcctgtctaagtaccaggacatcatcatcgaacaccagaaggtggtgaagggcaaccagaagagactggagagcctgcgggagctggccggcaaggaaaacctggaataccctagcgtgaccctgccacctcagcctcacaccaaggagggcgttgatgcctacaacgaagtgatcgcccgggtgcgaatgtgggtgaacctgaacctgtggcagaagctgaagctaagcagagatgatgccaagcctctgctgagactgaagggattcccttcctttcctctggtcgagagacaggccaacgaagtggactggtgggacatggtgtgtaacgtgaagaagctgatcaacgagaaaaaggaggatggcaaggtgttttggcagaatctggctggctacaagagacaggaagccctgagaccatacctgagcagcgaggaagatcggaagaagggaaagaaattcgctcggtaccagctgggcgacctgctgctgcacctggaaaagaagcacggcgaggactggggaaaggtgtacgacgaggcctgggagcggattgacaagaaagtggaaggcctgagcaagcacatcaagctggaagaggaacggagaagcgaggacgcccagagcaaggccgccctgaccgactggctgcgggctaaggccagcttcgtgatcgagggcctgaaggaggccgacaaggacgagttctgcagatgcgagctgaagctgcagaagtggtacggggacctgcggggaaagcccttcgccatcgaagccgagaacagcatcctggacatcagcggcttcagcaagcagtacaactgtgccttcatctggcagaaggacggcgtgaagaagctgaacctgtacctgatcatcaactacttcaagggcggcaagctgcggttcaagaagatcaaacctgaagccttcgaagccaacagattctacaccgtgatcaacaaaaagagcggcgagatcgtgcccatggaggtgaacttcaacttcgacgaccccaacctgatcatcctgcctctggcctttggcaagagacagggcagagaattcatctggaacgacctgctgtccctggaaaccggcagcctgaagctggccaacggaagagtgatcgagaagacactgtacaacagaagaacccggcaggatgagcctgccctgttcgtggccctgaccttcgagcggcgggaggtcctggactcctccaatatcaaaccaatgaacctgatcggcgtggcaagaggcgaaaacatccccgccgtgatcgccctgaccgaccccgagggctgcccactgagccggtttaaggatagcctgggaaacccaacccacatcctgagaatcggcgagagctataaggagaagcagcggaccatccaggccaagaaggaggtggagcagcggagagccggcggctacagccggaagtacgccagcaaagccaagaatctggcagacgatatggtgagaaacaccgctagagatctgctgtactacgccgtgacccaggatgccatgctgatcttcgccaacctgagccggggcttcggccggcagggcaagcggaccttcatggccgagagacagtacacacggatggaggactggctgaccgccaagctggcctacgagggcctgagcaagacctacctgtccaagacactggcccagtacacctccaagacatgcagcaactgtgggtttaccatcaccagcgccgactacgacagggtgctggagaagctgaagaagacagcaacaggctggatgaccacaattaacggcaaggagctgaaggtggagggccagattacctactacaacagatacaagagacagaacgtagtcaaggacctgtccgtcgagctggatagactgagcgaagaatctgtgaacaacgacatctcctcctggacaaagggcagaagcggagaagctctgagcctcctgaagaaaagattctcccatagacccgtgcaggagaagttcgtgtgcctgaactgcggcttcgagacacacgcagccgagcaagccgccctgaacatcgccagatcctggctgttcctgcggagccaggagtacaagaaataccagacaaacaagacaaccggcaacaccgataagagagccttcgtcgagacctggcagtccttttaccggaagaagcttaaggaggtgtggaaacctgccgtgcggtctggcggatctggcggaggctccacaagcaacgagatggtgaccttcaaggacgtggccgtggtgttcagcggcgaggagctggagctgctggacagcgcccagtggaagctgtaccaggacgtgatgctggagaacttcaggaacctgctgagcgtgggcggcaggatccagaccgagctggagaccttccccgaggccggcccccacgaggagctgagctggcagcagatctgggagcagatcgccagcgacagcaccttcagccaggacaccagccccaagaaaaagagaaaagtctaagctgccttctgcggggcttgccttctggccatgcccttcttctctcccttgcacctgtacctcttggtctttgaataaagcctgagtaggaaggctagcaaaaaaaaaaaaaaaaaaaaaaaaaaaaaaaaaaaaaaaaaaaaaaaaaaaaaaaaaaaaaaaaaaaaaaaaaaaaaaaa

SEQ ID NO: 2931 - RNA, 5419 nt, synthetic construct
  source 1..5419: mol_type = other RNA
aggaaataagagagaaaagaagagtaagaagaaatataagagccaccatggcccctaagaagaagcgtaaagtgagccgggtgaacggcagcggcagcggcggcggcatgaaccacgaccaggagttcgacccccctaaggtgtaccctcccgtccccgccgagaagagaaagcccatccgggtcctgagcctgttcgatggcatcgccaccggtctgctggtgctgaaggacctgggcatccaggtggataggtacattgcctccgaggtgtgcgaggactccatcaccgtgggaatggtgcgtcatcagggcaagatcatgtacgtgggcgacgtgcggagcgtgacacagaagcatatccaggagtggggccctttcgacctggtgatcggcggcagcccttgcaatgacctgagcatcgtgaacccagcccggaagggcctgtacgagggaaccggcagactgttcttcgagttttacagactgctgcacgacgcccggcctaaggaaggcgacgaccggcccttcttttggctgttcgagaatgtggtggccatgggagtcagcgacaagcgggatattagccggttcctggagagcaaccccgtgatgatcgatgccaaggaagtgagcgccgcccaccgggccagatacttctggggcaatctgcctggcatgaacagacccctggccagcaccgtgaacgacaagctggagctgcaggagtgcctggagcacggccggatcgccaagttcagcaaggtgagaaccatcaccacccgaagcaacagcatcaaacaaggcaaggaccagcactttcctgtgttcatgaacgagaaggaggacatcctgtggtgtaccgagatggagagagtgttcgggttcccagtccactacacagatgtcagcaacatgtctagactggccagacagagactgctgggaagaagctggtccgtccctgtgatcagacacctgttcgcccctctgaaggagtacttcgcctgcgtgagcagcggcaacagcaacgccaacagccggggccccagcttctctagcggcctggtgccactgtccctgagagggagccacatgggccccatggagatctacaaaaccgtgagcgcctggaagcggcagcctgtgcgcgtgctgagcctgtttcggaatatcgataaagtcctgaaaagcctgggattcctggagagcggctctggctccggcggtggcaccctgaagtacgtggaggatgtgacaaacgtggtcagacgggatgtggagaagtggggccccttcgatctggtgtacggcagcacccaacccctgggcagctcttgtgaccggtgccctggctggtacatgtttcagttccaccggatcctgcagtacgccctgccgagacaggagtcccagcggccattcttttggattttcatggacaacttgctgctgaccgaggatgaccaggaaactaccactcggttcctgcagaccgaagccgtgaccctgcaggacgtgagaggccgggactaccagaacgccatgcgggtgtggtccaacatccctggactgaaaagcaagcacgcacctctgacccctaaagaagaggagtacctgcaggcccaggtgcggagcagaagcaagctggacgcccctaaggtggatctgctggtgaagaattgcctcctgcccctgagagagtacttcaagtatttcagccagaatagtctgcccctgggcggcccaagcagcggcgcccctcctcccagcggcggcagcccagccggctccccaacctctaccgaggagggcacctctgagtccgccacccccgagagcggccctggcacctccaccgagcccagcgagggcagcgcacccggcagccctgccggcagccccacctccacagaggagggaaccagcaccgagcccagcgaaggcagcgccccaggcaccagcaccgagcctagtgagggcggctctggcggcggcagcgcccaggagattaaacggatcaacaagatcagaagaagacttgtgaaagacagcaacaccaagaaggccggcaagacaggccccatgaaaaccctgctggttagagtgatgacacccgatctgagagagcggctggaaaacctgagaaagaagcctgaaaatatcccccagcccatcagcaatacatctagagccaacctgaataagctgctgaccgattacaccgaaatgaagaaggcgatcctgcatgtgtactgggaagagttccagaaggaccctgtgggcctgatgagccgggtggcccagcctgccagcaagaagatcgatcagaacaagctgaaacctgagatggacgagaagggcaacctgaccaccgccggctttgcctgctctcagtgtggccagcccctgttcgtgtacaagctggagcaggtgtctgagaagggcaaggcttacaccaactacttcggacggtgcaatgtggccgagcacgaaaagctgatcctgctggcccagctgaagcccgagaaggatagcgacgaagccgtgacatatagcctgggaaagtttgggcagagggccctggatttctacagcattcatgtgaccaaggagtccacccaccccgtgaagcccctggcccagatcgccggaaacagatacgcctccggacctgtgggaaaggccctgagcgacgcatgtatgggcacaatcgcctccttcctgtctaagtaccaggacatcatcatcgaacaccagaaggtggtgaagggcaaccagaagagactggagagcctgcgggagctggccggcaaggaaaacctggaataccctagcgtgaccctgccacctcagcctcacaccaaggagggcgttgatgcctacaacgaagtgatcgcccgggtgcgaatgtgggtgaacctgaacctgtggcagaagctgaagctaagcagagatgatgccaagcctctgctgagactgaagggattcccttcctttcctctggtcgagagacaggccaacgaagtggactggtgggacatggtgtgtaacgtgaagaagctgatcaacgagaaaaaggaggatggcaaggtgttttggcagaatctggctggctacaagagacaggaagccctgagaccatacctgagcagcgaggaagatcggaagaagggaaagaaattcgctcggtaccagctgggcgacctgctgctgcacctggaaaagaagcacggcgaggactggggaaaggtgtacgacgaggcctgggagcggattgacaagaaagtggaaggcctgagcaagcacatcaagctggaagaggaacggagaagcgaggacgcccagagcaaggccgccctgaccgactggctgcgggctaaggccagcttcgtgatcgagggcctgaaggaggccgacaaggacgagttctgcagatgcgagctgaagctgcagaagtggtacggggacctgcggggaaagcccttcgccatcgaagccgagaacagcatcctggacatcagcggcttcagcaagcagtacaactgtgccttcatctggcagaaggacggcgtgaagaagctgaacctgtacctgatcatcaactacttcaagggcggcaagctgcggttcaagaagatcaaacctgaagccttcgaagccaacagattctacaccgtgatcaacaaaaagagcggcgagatcgtgcccatggaggtgaacttcaacttcgacgaccccaacctgatcatcctgcctctggcctttggcaagagacagggcagagaattcatctggaacgacctgctgtccctggaaaccggcagcctgaagctggccaacggaagagtgatcgagaagacactgtacaacagaagaacccggcaggatgagcctgccctgttcgtggccctgaccttcgagcggcgggaggtcctggactcctccaatatcaaaccaatgaacctgatcggcgtggcaagaggcgaaaacatccccgccgtgatcgccctgaccgaccccgagggctgcccactgagccggtttaaggatagcctgggaaacccaacccacatcctgagaatcggcgagagctataaggagaagcagcggaccatccaggccaagaaggaggtggagcagcggagagccggcggctacagccggaagtacgccagcaaagccaagaatctggcagacgatatggtgagaaacaccgctagagatctgctgtactacgccgtgacccaggatgccatgctgatcttcgccaacctgagccggggcttcggccggcagggcaagcggaccttcatggccgagagacagtacacacggatggaggactggctgaccgccaagctggcctacgagggcctgagcaagacctacctgtccaagacactggcccagtacacctccaagacatgcagcaactgtgggtttaccatcaccagcgccgactacgacagggtgctggagaagctgaagaagacagcaacaggctggatgaccacaattaacggcaaggagctgaaggtggagggccagattacctactacaacagatacaagagacagaacgtagtcaaggacctgtccgtcgagctggatagactgagcgaagaatctgtgaacaacgacatctcctcctggacaaagggcagaagcggagaagctctgagcctcctgaagaaaagattctcccatagacccgtgcaggagaagttcgtgtgcctgaactgcggcttcgagacacacgcagccgagcaagccgccctgaacatcgccagatcctggctgttcctgcggagccaggagtacaagaaataccagacaaacaagacaaccggcaacaccgataagagagccttcgtcgagacctggcagtccttttaccggaagaagcttaaggaggtgtggaaacctgccgtgcggtctggcggatctggcggaggctccacaagcccccaggccgccatgaccttccaggacgtggccgtggacttcaccagggaggagtggaggctgctggagcccccccagaaggagctgtactgggaggtgatgctggagaactacaggaacctggtgtgcctgggcctgaccgtgagcaagcccgacgtgatcagccagctggagcagggcgaggccccctggaggctggagggcggcagcgccaggggcaggtgcctggactggggcatgaggaccagccccaagaaaaagagaaaagtctaagctgccttctgcggggcttgccttctggccatgcccttcttctctcccttgcacctgtacctcttggtctttgaataaagcctgagtaggaaggctagcaaaaaaaaaaaaaaaaaaaaaaaaaaaaaaaaaaaaaaaaaaaaaaaaaaaaaaaaaaaaaaaaaaaaaaaaaaaaaaaa

SEQ ID NO: 2932 - RNA, 5419 nt, synthetic construct
  source 1..5419: mol_type = other RNA
aggaaataagagagaaaagaagagtaagaagaaatataagagccaccatggcccctaagaagaagcgtaaagtgagccgggtgaacggcagcggcagcggcggcggcatgaaccacgaccaggagttcgacccccctaaggtgtaccctcccgtccccgccgagaagagaaagcccatccgggtcctgagcctgttcgatggcatcgccaccggtctgctggtgctgaaggacctgggcatccaggtggataggtacattgcctccgaggtgtgcgaggactccatcaccgtgggaatggtgcgtcatcagggcaagatcatgtacgtgggcgacgtgcggagcgtgacacagaagcatatccaggagtggggccctttcgacctggtgatcggcggcagcccttgcaatgacctgagcatcgtgaacccagcccggaagggcctgtacgagggaaccggcagactgttcttcgagttttacagactgctgcacgacgcccggcctaaggaaggcgacgaccggcccttcttttggctgttcgagaatgtggtggccatgggagtcagcgacaagcgggatattagccggttcctggagagcaaccccgtgatgatcgatgccaaggaagtgagcgccgcccaccgggccagatacttctggggcaatctgcctggcatgaacagacccctggccagcaccgtgaacgacaagctggagctgcaggagtgcctggagcacggccggatcgccaagttcagcaaggtgagaaccatcaccacccgaagcaacagcatcaaacaaggcaaggaccagcactttcctgtgttcatgaacgagaaggaggacatcctgtggtgtaccgagatggagagagtgttcgggttcccagtccactacacagatgtcagcaacatgtctagactggccagacagagactgctgggaagaagctggtccgtccctgtgatcagacacctgttcgcccctctgaaggagtacttcgcctgcgtgagcagcggcaacagcaacgccaacagccggggccccagcttctctagcggcctggtgccactgtccctgagagggagccacatgggccccatggagatctacaaaaccgtgagcgcctggaagcggcagcctgtgcgcgtgctgagcctgtttcggaatatcgataaagtcctgaaaagcctgggattcctggagagcggctctggctccggcggtggcaccctgaagtacgtggaggatgtgacaaacgtggtcagacgggatgtggagaagtggggccccttcgatctggtgtacggcagcacccaacccctgggcagctcttgtgaccggtgccctggctggtacatgtttcagttccaccggatcctgcagtacgccctgccgagacaggagtcccagcggccattcttttggattttcatggacaacttgctgctgaccgaggatgaccaggaaactaccactcggttcctgcagaccgaagccgtgaccctgcaggacgtgagaggccgggactaccagaacgccatgcgggtgtggtccaacatccctggactgaaaagcaagcacgcacctctgacccctaaagaagaggagtacctgcaggcccaggtgcggagcagaagcaagctggacgcccctaaggtggatctgctggtgaagaattgcctcctgcccctgagagagtacttcaagtatttcagccagaatagtctgcccctgggcggcccaagcagcggcgcccctcctcccagcggcggcagcccagccggctccccaacctctaccgaggagggcacctctgagtccgccacccccgagagcggccctggcacctccaccgagcccagcgagggcagcgcacccggcagccctgccggcagccccacctccacagaggagggaaccagcaccgagcccagcgaaggcagcgccccaggcaccagcaccgagcctagtgagggcggctctggcggcggcagcgcccaggagattaaacggatcaacaagatcagaagaagacttgtgaaagacagcaacaccaagaaggccggcaagacaggccccatgaaaaccctgctggttagagtgatgacacccgatctgagagagcggctggaaaacctgagaaagaagcctgaaaatatcccccagcccatcagcaatacatctagagccaacctgaataagctgctgaccgattacaccgaaatgaagaaggcgatcctgcatgtgtactgggaagagttccagaaggaccctgtgggcctgatgagccgggtggcccagcctgccagcaagaagatcgatcagaacaagctgaaacctgagatggacgagaagggcaacctgaccaccgccggctttgcctgctctcagtgtggccagcccctgttcgtgtacaagctggagcaggtgtctgagaagggcaaggcttacaccaactacttcggacggtgcaatgtggccgagcacgaaaagctgatcctgctggcccagctgaagcccgagaaggatagcgacgaagccgtgacatatagcctgggaaagtttgggcagagggccctggatttctacagcattcatgtgaccaaggagtccacccaccccgtgaagcccctggcccagatcgccggaaacagatacgcctccggacctgtgggaaaggccctgagcgacgcatgtatgggcacaatcgcctccttcctgtctaagtaccaggacatcatcatcgaacaccagaaggtggtgaagggcaaccagaagagactggagagcctgcgggagctggccggcaaggaaaacctggaataccctagcgtgaccctgccacctcagcctcacaccaaggagggcgttgatgcctacaacgaagtgatcgcccgggtgcgaatgtgggtgaacctgaacctgtggcagaagctgaagctaagcagagatgatgccaagcctctgctgagactgaagggattcccttcctttcctctggtcgagagacaggccaacgaagtggactggtgggacatggtgtgtaacgtgaagaagctgatcaacgagaaaaaggaggatggcaaggtgttttggcagaatctggctggctacaagagacaggaagccctgagaccatacctgagcagcgaggaagatcggaagaagggaaagaaattcgctcggtaccagctgggcgacctgctgctgcacctggaaaagaagcacggcgaggactggggaaaggtgtacgacgaggcctgggagcggattgacaagaaagtggaaggcctgagcaagcacatcaagctggaagaggaacggagaagcgaggacgcccagagcaaggccgccctgaccgactggctgcgggctaaggccagcttcgtgatcgagggcctgaaggaggccgacaaggacgagttctgcagatgcgagctgaagctgcagaagtggtacggggacctgcggggaaagcccttcgccatcgaagccgagaacagcatcctggacatcagcggcttcagcaagcagtacaactgtgccttcatctggcagaaggacggcgtgaagaagctgaacctgtacctgatcatcaactacttcaagggcggcaagctgcggttcaagaagatcaaacctgaagccttcgaagccaacagattctacaccgtgatcaacaaaaagagcggcgagatcgtgcccatggaggtgaacttcaacttcgacgaccccaacctgatcatcctgcctctggcctttggcaagagacagggcagagaattcatctggaacgacctgctgtccctggaaaccggcagcctgaagctggccaacggaagagtgatcgagaagacactgtacaacagaagaacccggcaggatgagcctgccctgttcgtggccctgaccttcgagcggcgggaggtcctggactcctccaatatcaaaccaatgaacctgatcggcgtggcaagaggcgaaaacatccccgccgtgatcgccctgaccgaccccgagggctgcccactgagccggtttaaggatagcctgggaaacccaacccacatcctgagaatcggcgagagctataaggagaagcagcggaccatccaggccaagaaggaggtggagcagcggagagccggcggctacagccggaagtacgccagcaaagccaagaatctggcagacgatatggtgagaaacaccgctagagatctgctgtactacgccgtgacccaggatgccatgctgatcttcgccaacctgagccggggcttcggccggcagggcaagcggaccttcatggccgagagacagtacacacggatggaggactggctgaccgccaagctggcctacgagggcctgagcaagacctacctgtccaagacactggcccagtacacctccaagacatgcagcaactgtgggtttaccatcaccagcgccgactacgacagggtgctggagaagctgaagaagacagcaacaggctggatgaccacaattaacggcaaggagctgaaggtggagggccagattacctactacaacagatacaagagacagaacgtagtcaaggacctgtccgtcgagctggatagactgagcgaagaatctgtgaacaacgacatctcctcctggacaaagggcagaagcggagaagctctgagcctcctgaagaaaagattctcccatagacccgtgcaggagaagttcgtgtgcctgaactgcggcttcgagacacacgcagccgagcaagccgccctgaacatcgccagatcctggctgttcctgcggagccaggagtacaagaaataccagacaaacaagacaaccggcaacaccgataagagagccttcgtcgagacctggcagtccttttaccggaagaagcttaaggaggtgtggaaacctgccgtgcggtctggcggatctggcggaggctccacaagcgccaagggcctgctgaccttcggcgacgtggccatcgagttcagccaggaggagtgggagtgcctgagccacacccagagggagctgtacagggacgtgatcctggagaactacggccacctgctgttcctgggcgtgatcgtgagcaagcccgacctggtgagcctgctggagcagaggaaggagccctggggcgagaagaggaacaagaccaggatccacgtgggcaagaaccccttcggcaccagccccaagaaaaagagaaaagtctaagctgccttctgcggggcttgccttctggccatgcccttcttctctcccttgcacctgtacctcttggtctttgaataaagcctgagtaggaaggctagcaaaaaaaaaaaaaaaaaaaaaaaaaaaaaaaaaaaaaaaaaaaaaaaaaaaaaaaaaaaaaaaaaaaaaaaaaaaaaaaa

SEQ ID NO: 2933 - RNA, 5419 nt, synthetic construct
  source 1..5419: mol_type = other RNA
aggaaataagagagaaaagaagagtaagaagaaatataagagccaccatggcccctaagaagaagcgtaaagtgagccgggtgaacggcagcggcagcggcggcggcatgaaccacgaccaggagttcgacccccctaaggtgtaccctcccgtccccgccgagaagagaaagcccatccgggtcctgagcctgttcgatggcatcgccaccggtctgctggtgctgaaggacctgggcatccaggtggataggtacattgcctccgaggtgtgcgaggactccatcaccgtgggaatggtgcgtcatcagggcaagatcatgtacgtgggcgacgtgcggagcgtgacacagaagcatatccaggagtggggccctttcgacctggtgatcggcggcagcccttgcaatgacctgagcatcgtgaacccagcccggaagggcctgtacgagggaaccggcagactgttcttcgagttttacagactgctgcacgacgcccggcctaaggaaggcgacgaccggcccttcttttggctgttcgagaatgtggtggccatgggagtcagcgacaagcgggatattagccggttcctggagagcaaccccgtgatgatcgatgccaaggaagtgagcgccgcccaccgggccagatacttctggggcaatctgcctggcatgaacagacccctggccagcaccgtgaacgacaagctggagctgcaggagtgcctggagcacggccggatcgccaagttcagcaaggtgagaaccatcaccacccgaagcaacagcatcaaacaaggcaaggaccagcactttcctgtgttcatgaacgagaaggaggacatcctgtggtgtaccgagatggagagagtgttcgggttcccagtccactacacagatgtcagcaacatgtctagactggccagacagagactgctgggaagaagctggtccgtccctgtgatcagacacctgttcgcccctctgaaggagtacttcgcctgcgtgagcagcggcaacagcaacgccaacagccggggccccagcttctctagcggcctggtgccactgtccctgagagggagccacatgggccccatggagatctacaaaaccgtgagcgcctggaagcggcagcctgtgcgcgtgctgagcctgtttcggaatatcgataaagtcctgaaaagcctgggattcctggagagcggctctggctccggcggtggcaccctgaagtacgtggaggatgtgacaaacgtggtcagacgggatgtggagaagtggggccccttcgatctggtgtacggcagcacccaacccctgggcagctcttgtgaccggtgccctggctggtacatgtttcagttccaccggatcctgcagtacgccctgccgagacaggagtcccagcggccattcttttggattttcatggacaacttgctgctgaccgaggatgaccaggaaactaccactcggttcctgcagaccgaagccgtgaccctgcaggacgtgagaggccgggactaccagaacgccatgcgggtgtggtccaacatccctggactgaaaagcaagcacgcacctctgacccctaaagaagaggagtacctgcaggcccaggtgcggagcagaagcaagctggacgcccctaaggtggatctgctggtgaagaattgcctcctgcccctgagagagtacttcaagtatttcagccagaatagtctgcccctgggcggcccaagcagcggcgcccctcctcccagcggcggcagcccagccggctccccaacctctaccgaggagggcacctctgagtccgccacccccgagagcggccctggcacctccaccgagcccagcgagggcagcgcacccggcagccctgccggcagccccacctccacagaggagggaaccagcaccgagcccagcgaaggcagcgccccaggcaccagcaccgagcctagtgagggcggctctggcggcggcagcgcccaggagattaaacggatcaacaagatcagaagaagacttgtgaaagacagcaacaccaagaaggccggcaagacaggccccatgaaaaccctgctggttagagtgatgacacccgatctgagagagcggctggaaaacctgagaaagaagcctgaaaatatcccccagcccatcagcaatacatctagagccaacctgaataagctgctgaccgattacaccgaaatgaagaaggcgatcctgcatgtgtactgggaagagttccagaaggaccctgtgggcctgatgagccgggtggcccagcctgccagcaagaagatcgatcagaacaagctgaaacctgagatggacgagaagggcaacctgaccaccgccggctttgcctgctctcagtgtggccagcccctgttcgtgtacaagctggagcaggtgtctgagaagggcaaggcttacaccaactacttcggacggtgcaatgtggccgagcacgaaaagctgatcctgctggcccagctgaagcccgagaaggatagcgacgaagccgtgacatatagcctgggaaagtttgggcagagggccctggatttctacagcattcatgtgaccaaggagtccacccaccccgtgaagcccctggcccagatcgccggaaacagatacgcctccggacctgtgggaaaggccctgagcgacgcatgtatgggcacaatcgcctccttcctgtctaagtaccaggacatcatcatcgaacaccagaaggtggtgaagggcaaccagaagagactggagagcctgcgggagctggccggcaaggaaaacctggaataccctagcgtgaccctgccacctcagcctcacaccaaggagggcgttgatgcctacaacgaagtgatcgcccgggtgcgaatgtgggtgaacctgaacctgtggcagaagctgaagctaagcagagatgatgccaagcctctgctgagactgaagggattcccttcctttcctctggtcgagagacaggccaacgaagtggactggtgggacatggtgtgtaacgtgaagaagctgatcaacgagaaaaaggaggatggcaaggtgttttggcagaatctggctggctacaagagacaggaagccctgagaccatacctgagcagcgaggaagatcggaagaagggaaagaaattcgctcggtaccagctgggcgacctgctgctgcacctggaaaagaagcacggcgaggactggggaaaggtgtacgacgaggcctgggagcggattgacaagaaagtggaaggcctgagcaagcacatcaagctggaagaggaacggagaagcgaggacgcccagagcaaggccgccctgaccgactggctgcgggctaaggccagcttcgtgatcgagggcctgaaggaggccgacaaggacgagttctgcagatgcgagctgaagctgcagaagtggtacggggacctgcggggaaagcccttcgccatcgaagccgagaacagcatcctggacatcagcggcttcagcaagcagtacaactgtgccttcatctggcagaaggacggcgtgaagaagctgaacctgtacctgatcatcaactacttcaagggcggcaagctgcggttcaagaagatcaaacctgaagccttcgaagccaacagattctacaccgtgatcaacaaaaagagcggcgagatcgtgcccatggaggtgaacttcaacttcgacgaccccaacctgatcatcctgcctctggcctttggcaagagacagggcagagaattcatctggaacgacctgctgtccctggaaaccggcagcctgaagctggccaacggaagagtgatcgagaagacactgtacaacagaagaacccggcaggatgagcctgccctgttcgtggccctgaccttcgagcggcgggaggtcctggactcctccaatatcaaaccaatgaacctgatcggcgtggcaagaggcgaaaacatccccgccgtgatcgccctgaccgaccccgagggctgcccactgagccggtttaaggatagcctgggaaacccaacccacatcctgagaatcggcgagagctataaggagaagcagcggaccatccaggccaagaaggaggtggagcagcggagagccggcggctacagccggaagtacgccagcaaagccaagaatctggcagacgatatggtgagaaacaccgctagagatctgctgtactacgccgtgacccaggatgccatgctgatcttcgccaacctgagccggggcttcggccggcagggcaagcggaccttcatggccgagagacagtacacacggatggaggactggctgaccgccaagctggcctacgagggcctgagcaagacctacctgtccaagacactggcccagtacacctccaagacatgcagcaactgtgggtttaccatcaccagcgccgactacgacagggtgctggagaagctgaagaagacagcaacaggctggatgaccacaattaacggcaaggagctgaaggtggagggccagattacctactacaacagatacaagagacagaacgtagtcaaggacctgtccgtcgagctggatagactgagcgaagaatctgtgaacaacgacatctcctcctggacaaagggcagaagcggagaagctctgagcctcctgaagaaaagattctcccatagacccgtgcaggagaagttcgtgtgcctgaactgcggcttcgagacacacgcagccgagcaagccgccctgaacatcgccagatcctggctgttcctgcggagccaggagtacaagaaataccagacaaacaagacaaccggcaacaccgataagagagccttcgtcgagacctggcagtccttttaccggaagaagcttaaggaggtgtggaaacctgccgtgcggtctggcggatctggcggaggctccacaagcgaggaggtgcccgtggtgttcgaggacgtggccgtgtacttcaccagggaggagtggggcaccctggacaagaggcagaaggagctgtacagggacgtgatgaggatgaactacgagctgctggccagcctgggccccgccgccgccaagcccgacctgatcagcaagctggagaggagggccgccccctggatcaaggaccccaacggccccaagtggggcaagggcaggccccccggcaagaccagccccaagaaaaagagaaaagtctaagctgccttctgcggggcttgccttctggccatgcccttcttctctcccttgcacctgtacctcttggtctttgaataaagcctgagtaggaaggctagcaaaaaaaaaaaaaaaaaaaaaaaaaaaaaaaaaaaaaaaaaaaaaaaaaaaaaaaaaaaaaaaaaaaaaaaaaaaaaaaa

SEQ ID NO: 2934 - RNA, 5419 nt, synthetic construct
  source 1..5419: mol_type = other RNA
aggaaataagagagaaaagaagagtaagaagaaatataagagccaccatggcccctaagaagaagcgtaaagtgagccgggtgaacggcagcggcagcggcggcggcatgaaccacgaccaggagttcgacccccctaaggtgtaccctcccgtccccgccgagaagagaaagcccatccgggtcctgagcctgttcgatggcatcgccaccggtctgctggtgctgaaggacctgggcatccaggtggataggtacattgcctccgaggtgtgcgaggactccatcaccgtgggaatggtgcgtcatcagggcaagatcatgtacgtgggcgacgtgcggagcgtgacacagaagcatatccaggagtggggccctttcgacctggtgatcggcggcagcccttgcaatgacctgagcatcgtgaacccagcccggaagggcctgtacgagggaaccggcagactgttcttcgagttttacagactgctgcacgacgcccggcctaaggaaggcgacgaccggcccttcttttggctgttcgagaatgtggtggccatgggagtcagcgacaagcgggatattagccggttcctggagagcaaccccgtgatgatcgatgccaaggaagtgagcgccgcccaccgggccagatacttctggggcaatctgcctggcatgaacagacccctggccagcaccgtgaacgacaagctggagctgcaggagtgcctggagcacggccggatcgccaagttcagcaaggtgagaaccatcaccacccgaagcaacagcatcaaacaaggcaaggaccagcactttcctgtgttcatgaacgagaaggaggacatcctgtggtgtaccgagatggagagagtgttcgggttcccagtccactacacagatgtcagcaacatgtctagactggccagacagagactgctgggaagaagctggtccgtccctgtgatcagacacctgttcgcccctctgaaggagtacttcgcctgcgtgagcagcggcaacagcaacgccaacagccggggccccagcttctctagcggcctggtgccactgtccctgagagggagccacatgggccccatggagatctacaaaaccgtgagcgcctggaagcggcagcctgtgcgcgtgctgagcctgtttcggaatatcgataaagtcctgaaaagcctgggattcctggagagcggctctggctccggcggtggcaccctgaagtacgtggaggatgtgacaaacgtggtcagacgggatgtggagaagtggggccccttcgatctggtgtacggcagcacccaacccctgggcagctcttgtgaccggtgccctggctggtacatgtttcagttccaccggatcctgcagtacgccctgccgagacaggagtcccagcggccattcttttggattttcatggacaacttgctgctgaccgaggatgaccaggaaactaccactcggttcctgcagaccgaagccgtgaccctgcaggacgtgagaggccgggactaccagaacgccatgcgggtgtggtccaacatccctggactgaaaagcaagcacgcacctctgacccctaaagaagaggagtacctgcaggcccaggtgcggagcagaagcaagctggacgcccctaaggtggatctgctggtgaagaattgcctcctgcccctgagagagtacttcaagtatttcagccagaatagtctgcccctgggcggcccaagcagcggcgcccctcctcccagcggcggcagcccagccggctccccaacctctaccgaggagggcacctctgagtccgccacccccgagagcggccctggcacctccaccgagcccagcgagggcagcgcacccggcagccctgccggcagccccacctccacagaggagggaaccagcaccgagcccagcgaaggcagcgccccaggcaccagcaccgagcctagtgagggcggctctggcggcggcagcgcccaggagattaaacggatcaacaagatcagaagaagacttgtgaaagacagcaacaccaagaaggccggcaagacaggccccatgaaaaccctgctggttagagtgatgacacccgatctgagagagcggctggaaaacctgagaaagaagcctgaaaatatcccccagcccatcagcaatacatctagagccaacctgaataagctgctgaccgattacaccgaaatgaagaaggcgatcctgcatgtgtactgggaagagttccagaaggaccctgtgggcctgatgagccgggtggcccagcctgccagcaagaagatcgatcagaacaagctgaaacctgagatggacgagaagggcaacctgaccaccgccggctttgcctgctctcagtgtggccagcccctgttcgtgtacaagctggagcaggtgtctgagaagggcaaggcttacaccaactacttcggacggtgcaatgtggccgagcacgaaaagctgatcctgctggcccagctgaagcccgagaaggatagcgacgaagccgtgacatatagcctgggaaagtttgggcagagggccctggatttctacagcattcatgtgaccaaggagtccacccaccccgtgaagcccctggcccagatcgccggaaacagatacgcctccggacctgtgggaaaggccctgagcgacgcatgtatgggcacaatcgcctccttcctgtctaagtaccaggacatcatcatcgaacaccagaaggtggtgaagggcaaccagaagagactggagagcctgcgggagctggccggcaaggaaaacctggaataccctagcgtgaccctgccacctcagcctcacaccaaggagggcgttgatgcctacaacgaagtgatcgcccgggtgcgaatgtgggtgaacctgaacctgtggcagaagctgaagctaagcagagatgatgccaagcctctgctgagactgaagggattcccttcctttcctctggtcgagagacaggccaacgaagtggactggtgggacatggtgtgtaacgtgaagaagctgatcaacgagaaaaaggaggatggcaaggtgttttggcagaatctggctggctacaagagacaggaagccctgagaccatacctgagcagcgaggaagatcggaagaagggaaagaaattcgctcggtaccagctgggcgacctgctgctgcacctggaaaagaagcacggcgaggactggggaaaggtgtacgacgaggcctgggagcggattgacaagaaagtggaaggcctgagcaagcacatcaagctggaagaggaacggagaagcgaggacgcccagagcaaggccgccctgaccgactggctgcgggctaaggccagcttcgtgatcgagggcctgaaggaggccgacaaggacgagttctgcagatgcgagctgaagctgcagaagtggtacggggacctgcggggaaagcccttcgccatcgaagccgagaacagcatcctggacatcagcggcttcagcaagcagtacaactgtgccttcatctggcagaaggacggcgtgaagaagctgaacctgtacctgatcatcaactacttcaagggcggcaagctgcggttcaagaagatcaaacctgaagccttcgaagccaacagattctacaccgtgatcaacaaaaagagcggcgagatcgtgcccatggaggtgaacttcaacttcgacgaccccaacctgatcatcctgcctctggcctttggcaagagacagggcagagaattcatctggaacgacctgctgtccctggaaaccggcagcctgaagctggccaacggaagagtgatcgagaagacactgtacaacagaagaacccggcaggatgagcctgccctgttcgtggccctgaccttcgagcggcgggaggtcctggactcctccaatatcaaaccaatgaacctgatcggcgtggcaagaggcgaaaacatccccgccgtgatcgccctgaccgaccccgagggctgcccactgagccggtttaaggatagcctgggaaacccaacccacatcctgagaatcggcgagagctataaggagaagcagcggaccatccaggccaagaaggaggtggagcagcggagagccggcggctacagccggaagtacgccagcaaagccaagaatctggcagacgatatggtgagaaacaccgctagagatctgctgtactacgccgtgacccaggatgccatgctgatcttcgccaacctgagccggggcttcggccggcagggcaagcggaccttcatggccgagagacagtacacacggatggaggactggctgaccgccaagctggcctacgagggcctgagcaagacctacctgtccaagacactggcccagtacacctccaagacatgcagcaactgtgggtttaccatcaccagcgccgactacgacagggtgctggagaagctgaagaagacagcaacaggctggatgaccacaattaacggcaaggagctgaaggtggagggccagattacctactacaacagatacaagagacagaacgtagtcaaggacctgtccgtcgagctggatagactgagcgaagaatctgtgaacaacgacatctcctcctggacaaagggcagaagcggagaagctctgagcctcctgaagaaaagattctcccatagacccgtgcaggagaagttcgtgtgcctgaactgcggcttcgagacacacgcagccgagcaagccgccctgaacatcgccagatcctggctgttcctgcggagccaggagtacaagaaataccagacaaacaagacaaccggcaacaccgataagagagccttcgtcgagacctggcagtccttttaccggaagaagcttaaggaggtgtggaaacctgccgtgcggtctggcggatctggcggaggctccacaagcccccccgagagcgtgaccttcgaggacgtggccgtgtacttcacccagaaggagtgggccagcctgatgcccgcccagaaggccctgtacagggacgtgatgctggagaactacgaggccgtggccttcctggcccccgccaccagcaagcccgccctgatcagccagctggagcagggcgtggagcccagcttcagccaggcccagggcgacctgagcatgagggacaggggcgccggcctgaccagccccaagaaaaagagaaaagtctaagctgccttctgcggggcttgccttctggccatgcccttcttctctcccttgcacctgtacctcttggtctttgaataaagcctgagtaggaaggctagcaaaaaaaaaaaaaaaaaaaaaaaaaaaaaaaaaaaaaaaaaaaaaaaaaaaaaaaaaaaaaaaaaaaaaaaaaaaaaaaa

SEQ ID NO: 2935 - RNA, 5419 nt, synthetic construct
  source 1..5419: mol_type = other RNA
aggaaataagagagaaaagaagagtaagaagaaatataagagccaccatggcccctaagaagaagcgtaaagtgagccgggtgaacggcagcggcagcggcggcggcatgaaccacgaccaggagttcgacccccctaaggtgtaccctcccgtccccgccgagaagagaaagcccatccgggtcctgagcctgttcgatggcatcgccaccggtctgctggtgctgaaggacctgggcatccaggtggataggtacattgcctccgaggtgtgcgaggactccatcaccgtgggaatggtgcgtcatcagggcaagatcatgtacgtgggcgacgtgcggagcgtgacacagaagcatatccaggagtggggccctttcgacctggtgatcggcggcagcccttgcaatgacctgagcatcgtgaacccagcccggaagggcctgtacgagggaaccggcagactgttcttcgagttttacagactgctgcacgacgcccggcctaaggaaggcgacgaccggcccttcttttggctgttcgagaatgtggtggccatgggagtcagcgacaagcgggatattagccggttcctggagagcaaccccgtgatgatcgatgccaaggaagtgagcgccgcccaccgggccagatacttctggggcaatctgcctggcatgaacagacccctggccagcaccgtgaacgacaagctggagctgcaggagtgcctggagcacggccggatcgccaagttcagcaaggtgagaaccatcaccacccgaagcaacagcatcaaacaaggcaaggaccagcactttcctgtgttcatgaacgagaaggaggacatcctgtggtgtaccgagatggagagagtgttcgggttcccagtccactacacagatgtcagcaacatgtctagactggccagacagagactgctgggaagaagctggtccgtccctgtgatcagacacctgttcgcccctctgaaggagtacttcgcctgcgtgagcagcggcaacagcaacgccaacagccggggccccagcttctctagcggcctggtgccactgtccctgagagggagccacatgggccccatggagatctacaaaaccgtgagcgcctggaagcggcagcctgtgcgcgtgctgagcctgtttcggaatatcgataaagtcctgaaaagcctgggattcctggagagcggctctggctccggcggtggcaccctgaagtacgtggaggatgtgacaaacgtggtcagacgggatgtggagaagtggggccccttcgatctggtgtacggcagcacccaacccctgggcagctcttgtgaccggtgccctggctggtacatgtttcagttccaccggatcctgcagtacgccctgccgagacaggagtcccagcggccattcttttggattttcatggacaacttgctgctgaccgaggatgaccaggaaactaccactcggttcctgcagaccgaagccgtgaccctgcaggacgtgagaggccgggactaccagaacgccatgcgggtgtggtccaacatccctggactgaaaagcaagcacgcacctctgacccctaaagaagaggagtacctgcaggcccaggtgcggagcagaagcaagctggacgcccctaaggtggatctgctggtgaagaattgcctcctgcccctgagagagtacttcaagtatttcagccagaatagtctgcccctgggcggcccaagcagcggcgcccctcctcccagcggcggcagcccagccggctccccaacctctaccgaggagggcacctctgagtccgccacccccgagagcggccctggcacctccaccgagcccagcgagggcagcgcacccggcagccctgccggcagccccacctccacagaggagggaaccagcaccgagcccagcgaaggcagcgccccaggcaccagcaccgagcctagtgagggcggctctggcggcggcagcgcccaggagattaaacggatcaacaagatcagaagaagacttgtgaaagacagcaacaccaagaaggccggcaagacaggccccatgaaaaccctgctggttagagtgatgacacccgatctgagagagcggctggaaaacctgagaaagaagcctgaaaatatcccccagcccatcagcaatacatctagagccaacctgaataagctgctgaccgattacaccgaaatgaagaaggcgatcctgcatgtgtactgggaagagttccagaaggaccctgtgggcctgatgagccgggtggcccagcctgccagcaagaagatcgatcagaacaagctgaaacctgagatggacgagaagggcaacctgaccaccgccggctttgcctgctctcagtgtggccagcccctgttcgtgtacaagctggagcaggtgtctgagaagggcaaggcttacaccaactacttcggacggtgcaatgtggccgagcacgaaaagctgatcctgctggcccagctgaagcccgagaaggatagcgacgaagccgtgacatatagcctgggaaagtttgggcagagggccctggatttctacagcattcatgtgaccaaggagtccacccaccccgtgaagcccctggcccagatcgccggaaacagatacgcctccggacctgtgggaaaggccctgagcgacgcatgtatgggcacaatcgcctccttcctgtctaagtaccaggacatcatcatcgaacaccagaaggtggtgaagggcaaccagaagagactggagagcctgcgggagctggccggcaaggaaaacctggaataccctagcgtgaccctgccacctcagcctcacaccaaggagggcgttgatgcctacaacgaagtgatcgcccgggtgcgaatgtgggtgaacctgaacctgtggcagaagctgaagctaagcagagatgatgccaagcctctgctgagactgaagggattcccttcctttcctctggtcgagagacaggccaacgaagtggactggtgggacatggtgtgtaacgtgaagaagctgatcaacgagaaaaaggaggatggcaaggtgttttggcagaatctggctggctacaagagacaggaagccctgagaccatacctgagcagcgaggaagatcggaagaagggaaagaaattcgctcggtaccagctgggcgacctgctgctgcacctggaaaagaagcacggcgaggactggggaaaggtgtacgacgaggcctgggagcggattgacaagaaagtggaaggcctgagcaagcacatcaagctggaagaggaacggagaagcgaggacgcccagagcaaggccgccctgaccgactggctgcgggctaaggccagcttcgtgatcgagggcctgaaggaggccgacaaggacgagttctgcagatgcgagctgaagctgcagaagtggtacggggacctgcggggaaagcccttcgccatcgaagccgagaacagcatcctggacatcagcggcttcagcaagcagtacaactgtgccttcatctggcagaaggacggcgtgaagaagctgaacctgtacctgatcatcaactacttcaagggcggcaagctgcggttcaagaagatcaaacctgaagccttcgaagccaacagattctacaccgtgatcaacaaaaagagcggcgagatcgtgcccatggaggtgaacttcaacttcgacgaccccaacctgatcatcctgcctctggcctttggcaagagacagggcagagaattcatctggaacgacctgctgtccctggaaaccggcagcctgaagctggccaacggaagagtgatcgagaagacactgtacaacagaagaacccggcaggatgagcctgccctgttcgtggccctgaccttcgagcggcgggaggtcctggactcctccaatatcaaaccaatgaacctgatcggcgtggcaagaggcgaaaacatccccgccgtgatcgccctgaccgaccccgagggctgcccactgagccggtttaaggatagcctgggaaacccaacccacatcctgagaatcggcgagagctataaggagaagcagcggaccatccaggccaagaaggaggtggagcagcggagagccggcggctacagccggaagtacgccagcaaagccaagaatctggcagacgatatggtgagaaacaccgctagagatctgctgtactacgccgtgacccaggatgccatgctgatcttcgccaacctgagccggggcttcggccggcagggcaagcggaccttcatggccgagagacagtacacacggatggaggactggctgaccgccaagctggcctacgagggcctgagcaagacctacctgtccaagacactggcccagtacacctccaagacatgcagcaactgtgggtttaccatcaccagcgccgactacgacagggtgctggagaagctgaagaagacagcaacaggctggatgaccacaattaacggcaaggagctgaaggtggagggccagattacctactacaacagatacaagagacagaacgtagtcaaggacctgtccgtcgagctggatagactgagcgaagaatctgtgaacaacgacatctcctcctggacaaagggcagaagcggagaagctctgagcctcctgaagaaaagattctcccatagacccgtgcaggagaagttcgtgtgcctgaactgcggcttcgagacacacgcagccgagcaagccgccctgaacatcgccagatcctggctgttcctgcggagccaggagtacaagaaataccagacaaacaagacaaccggcaacaccgataagagagccttcgtcgagacctggcagtccttttaccggaagaagcttaaggaggtgtggaaacctgccgtgcggtctggcggatctggcggaggctccacaagcttccagggcagcatcagcttcaaggacgtgaccgtgggcttcacccaggaggagtggcagcacctggaccccagccagagggccctgtacagggacgtgatgctggagaactacagcaacctggtgagcgtgggctactgcgtgcacaagcccgaggtgatcagcaggctggagcagggcgaggagccctggaggctggaggaggagttccccagccagagcttccccgtgtggaccgccgacaccagccccaagaaaaagagaaaagtctaagctgccttctgcggggcttgccttctggccatgcccttcttctctcccttgcacctgtacctcttggtctttgaataaagcctgagtaggaaggctagcaaaaaaaaaaaaaaaaaaaaaaaaaaaaaaaaaaaaaaaaaaaaaaaaaaaaaaaaaaaaaaaaaaaaaaaaaaaaaaaa

SEQ ID NO: 2936 - RNA, 5419 nt, synthetic construct
  source 1..5419: mol_type = other RNA
aggaaataagagagaaaagaagagtaagaagaaatataagagccaccatggcccctaagaagaagcgtaaagtgagccgggtgaacggcagcggcagcggcggcggcatgaaccacgaccaggagttcgacccccctaaggtgtaccctcccgtccccgccgagaagagaaagcccatccgggtcctgagcctgttcgatggcatcgccaccggtctgctggtgctgaaggacctgggcatccaggtggataggtacattgcctccgaggtgtgcgaggactccatcaccgtgggaatggtgcgtcatcagggcaagatcatgtacgtgggcgacgtgcggagcgtgacacagaagcatatccaggagtggggccctttcgacctggtgatcggcggcagcccttgcaatgacctgagcatcgtgaacccagcccggaagggcctgtacgagggaaccggcagactgttcttcgagttttacagactgctgcacgacgcccggcctaaggaaggcgacgaccggcccttcttttggctgttcgagaatgtggtggccatgggagtcagcgacaagcgggatattagccggttcctggagagcaaccccgtgatgatcgatgccaaggaagtgagcgccgcccaccgggccagatacttctggggcaatctgcctggcatgaacagacccctggccagcaccgtgaacgacaagctggagctgcaggagtgcctggagcacggccggatcgccaagttcagcaaggtgagaaccatcaccacccgaagcaacagcatcaaacaaggcaaggaccagcactttcctgtgttcatgaacgagaaggaggacatcctgtggtgtaccgagatggagagagtgttcgggttcccagtccactacacagatgtcagcaacatgtctagactggccagacagagactgctgggaagaagctggtccgtccctgtgatcagacacctgttcgcccctctgaaggagtacttcgcctgcgtgagcagcggcaacagcaacgccaacagccggggccccagcttctctagcggcctggtgccactgtccctgagagggagccacatgggccccatggagatctacaaaaccgtgagcgcctggaagcggcagcctgtgcgcgtgctgagcctgtttcggaatatcgataaagtcctgaaaagcctgggattcctggagagcggctctggctccggcggtggcaccctgaagtacgtggaggatgtgacaaacgtggtcagacgggatgtggagaagtggggccccttcgatctggtgtacggcagcacccaacccctgggcagctcttgtgaccggtgccctggctggtacatgtttcagttccaccggatcctgcagtacgccctgccgagacaggagtcccagcggccattcttttggattttcatggacaacttgctgctgaccgaggatgaccaggaaactaccactcggttcctgcagaccgaagccgtgaccctgcaggacgtgagaggccgggactaccagaacgccatgcgggtgtggtccaacatccctggactgaaaagcaagcacgcacctctgacccctaaagaagaggagtacctgcaggcccaggtgcggagcagaagcaagctggacgcccctaaggtggatctgctggtgaagaattgcctcctgcccctgagagagtacttcaagtatttcagccagaatagtctgcccctgggcggcccaagcagcggcgcccctcctcccagcggcggcagcccagccggctccccaacctctaccgaggagggcacctctgagtccgccacccccgagagcggccctggcacctccaccgagcccagcgagggcagcgcacccggcagccctgccggcagccccacctccacagaggagggaaccagcaccgagcccagcgaaggcagcgccccaggcaccagcaccgagcctagtgagggcggctctggcggcggcagcgcccaggagattaaacggatcaacaagatcagaagaagacttgtgaaagacagcaacaccaagaaggccggcaagacaggccccatgaaaaccctgctggttagagtgatgacacccgatctgagagagcggctggaaaacctgagaaagaagcctgaaaatatcccccagcccatcagcaatacatctagagccaacctgaataagctgctgaccgattacaccgaaatgaagaaggcgatcctgcatgtgtactgggaagagttccagaaggaccctgtgggcctgatgagccgggtggcccagcctgccagcaagaagatcgatcagaacaagctgaaacctgagatggacgagaagggcaacctgaccaccgccggctttgcctgctctcagtgtggccagcccctgttcgtgtacaagctggagcaggtgtctgagaagggcaaggcttacaccaactacttcggacggtgcaatgtggccgagcacgaaaagctgatcctgctggcccagctgaagcccgagaaggatagcgacgaagccgtgacatatagcctgggaaagtttgggcagagggccctggatttctacagcattcatgtgaccaaggagtccacccaccccgtgaagcccctggcccagatcgccggaaacagatacgcctccggacctgtgggaaaggccctgagcgacgcatgtatgggcacaatcgcctccttcctgtctaagtaccaggacatcatcatcgaacaccagaaggtggtgaagggcaaccagaagagactggagagcctgcgggagctggccggcaaggaaaacctggaataccctagcgtgaccctgccacctcagcctcacaccaaggagggcgttgatgcctacaacgaagtgatcgcccgggtgcgaatgtgggtgaacctgaacctgtggcagaagctgaagctaagcagagatgatgccaagcctctgctgagactgaagggattcccttcctttcctctggtcgagagacaggccaacgaagtggactggtgggacatggtgtgtaacgtgaagaagctgatcaacgagaaaaaggaggatggcaaggtgttttggcagaatctggctggctacaagagacaggaagccctgagaccatacctgagcagcgaggaagatcggaagaagggaaagaaattcgctcggtaccagctgggcgacctgctgctgcacctggaaaagaagcacggcgaggactggggaaaggtgtacgacgaggcctgggagcggattgacaagaaagtggaaggcctgagcaagcacatcaagctggaagaggaacggagaagcgaggacgcccagagcaaggccgccctgaccgactggctgcgggctaaggccagcttcgtgatcgagggcctgaaggaggccgacaaggacgagttctgcagatgcgagctgaagctgcagaagtggtacggggacctgcggggaaagcccttcgccatcgaagccgagaacagcatcctggacatcagcggcttcagcaagcagtacaactgtgccttcatctggcagaaggacggcgtgaagaagctgaacctgtacctgatcatcaactacttcaagggcggcaagctgcggttcaagaagatcaaacctgaagccttcgaagccaacagattctacaccgtgatcaacaaaaagagcggcgagatcgtgcccatggaggtgaacttcaacttcgacgaccccaacctgatcatcctgcctctggcctttggcaagagacagggcagagaattcatctggaacgacctgctgtccctggaaaccggcagcctgaagctggccaacggaagagtgatcgagaagacactgtacaacagaagaacccggcaggatgagcctgccctgttcgtggccctgaccttcgagcggcgggaggtcctggactcctccaatatcaaaccaatgaacctgatcggcgtggcaagaggcgaaaacatccccgccgtgatcgccctgaccgaccccgagggctgcccactgagccggtttaaggatagcctgggaaacccaacccacatcctgagaatcggcgagagctataaggagaagcagcggaccatccaggccaagaaggaggtggagcagcggagagccggcggctacagccggaagtacgccagcaaagccaagaatctggcagacgatatggtgagaaacaccgctagagatctgctgtactacgccgtgacccaggatgccatgctgatcttcgccaacctgagccggggcttcggccggcagggcaagcggaccttcatggccgagagacagtacacacggatggaggactggctgaccgccaagctggcctacgagggcctgagcaagacctacctgtccaagacactggcccagtacacctccaagacatgcagcaactgtgggtttaccatcaccagcgccgactacgacagggtgctggagaagctgaagaagacagcaacaggctggatgaccacaattaacggcaaggagctgaaggtggagggccagattacctactacaacagatacaagagacagaacgtagtcaaggacctgtccgtcgagctggatagactgagcgaagaatctgtgaacaacgacatctcctcctggacaaagggcagaagcggagaagctctgagcctcctgaagaaaagattctcccatagacccgtgcaggagaagttcgtgtgcctgaactgcggcttcgagacacacgcagccgagcaagccgccctgaacatcgccagatcctggctgttcctgcggagccaggagtacaagaaataccagacaaacaagacaaccggcaacaccgataagagagccttcgtcgagacctggcagtccttttaccggaagaagcttaaggaggtgtggaaacctgccgtgcggtctggcggatctggcggaggctccacaagcagccagggcctggtgaccttcggcgacgtggccgtggacttcagccaggaggagtgggagtggctggactgcgcccagaggaccctgtacaggagcgtgatgctggagaactacaggagcctggtgagcctgggcctgtgcgtgagcaagcccgagatgatcagcagcctggagcagaggaaggagccctggaccgtgaagaggaagtggaccaggggccagtgccccgacagcgaggccgtgaccagccccaagaaaaagagaaaagtctaagctgccttctgcggggcttgccttctggccatgcccttcttctctcccttgcacctgtacctcttggtctttgaataaagcctgagtaggaaggctagcaaaaaaaaaaaaaaaaaaaaaaaaaaaaaaaaaaaaaaaaaaaaaaaaaaaaaaaaaaaaaaaaaaaaaaaaaaaaaaaa

SEQ ID NO: 2937 - RNA, 5419 nt, synthetic construct
  source 1..5419: mol_type = other RNA
aggaaataagagagaaaagaagagtaagaagaaatataagagccaccatggcccctaagaagaagcgtaaagtgagccgggtgaacggcagcggcagcggcggcggcatgaaccacgaccaggagttcgacccccctaaggtgtaccctcccgtccccgccgagaagagaaagcccatccgggtcctgagcctgttcgatggcatcgccaccggtctgctggtgctgaaggacctgggcatccaggtggataggtacattgcctccgaggtgtgcgaggactccatcaccgtgggaatggtgcgtcatcagggcaagatcatgtacgtgggcgacgtgcggagcgtgacacagaagcatatccaggagtggggccctttcgacctggtgatcggcggcagcccttgcaatgacctgagcatcgtgaacccagcccggaagggcctgtacgagggaaccggcagactgttcttcgagttttacagactgctgcacgacgcccggcctaaggaaggcgacgaccggcccttcttttggctgttcgagaatgtggtggccatgggagtcagcgacaagcgggatattagccggttcctggagagcaaccccgtgatgatcgatgccaaggaagtgagcgccgcccaccgggccagatacttctggggcaatctgcctggcatgaacagacccctggccagcaccgtgaacgacaagctggagctgcaggagtgcctggagcacggccggatcgccaagttcagcaaggtgagaaccatcaccacccgaagcaacagcatcaaacaaggcaaggaccagcactttcctgtgttcatgaacgagaaggaggacatcctgtggtgtaccgagatggagagagtgttcgggttcccagtccactacacagatgtcagcaacatgtctagactggccagacagagactgctgggaagaagctggtccgtccctgtgatcagacacctgttcgcccctctgaaggagtacttcgcctgcgtgagcagcggcaacagcaacgccaacagccggggccccagcttctctagcggcctggtgccactgtccctgagagggagccacatgggccccatggagatctacaaaaccgtgagcgcctggaagcggcagcctgtgcgcgtgctgagcctgtttcggaatatcgataaagtcctgaaaagcctgggattcctggagagcggctctggctccggcggtggcaccctgaagtacgtggaggatgtgacaaacgtggtcagacgggatgtggagaagtggggccccttcgatctggtgtacggcagcacccaacccctgggcagctcttgtgaccggtgccctggctggtacatgtttcagttccaccggatcctgcagtacgccctgccgagacaggagtcccagcggccattcttttggattttcatggacaacttgctgctgaccgaggatgaccaggaaactaccactcggttcctgcagaccgaagccgtgaccctgcaggacgtgagaggccgggactaccagaacgccatgcgggtgtggtccaacatccctggactgaaaagcaagcacgcacctctgacccctaaagaagaggagtacctgcaggcccaggtgcggagcagaagcaagctggacgcccctaaggtggatctgctggtgaagaattgcctcctgcccctgagagagtacttcaagtatttcagccagaatagtctgcccctgggcggcccaagcagcggcgcccctcctcccagcggcggcagcccagccggctccccaacctctaccgaggagggcacctctgagtccgccacccccgagagcggccctggcacctccaccgagcccagcgagggcagcgcacccggcagccctgccggcagccccacctccacagaggagggaaccagcaccgagcccagcgaaggcagcgccccaggcaccagcaccgagcctagtgagggcggctctggcggcggcagcgcccaggagattaaacggatcaacaagatcagaagaagacttgtgaaagacagcaacaccaagaaggccggcaagacaggccccatgaaaaccctgctggttagagtgatgacacccgatctgagagagcggctggaaaacctgagaaagaagcctgaaaatatcccccagcccatcagcaatacatctagagccaacctgaataagctgctgaccgattacaccgaaatgaagaaggcgatcctgcatgtgtactgggaagagttccagaaggaccctgtgggcctgatgagccgggtggcccagcctgccagcaagaagatcgatcagaacaagctgaaacctgagatggacgagaagggcaacctgaccaccgccggctttgcctgctctcagtgtggccagcccctgttcgtgtacaagctggagcaggtgtctgagaagggcaaggcttacaccaactacttcggacggtgcaatgtggccgagcacgaaaagctgatcctgctggcccagctgaagcccgagaaggatagcgacgaagccgtgacatatagcctgggaaagtttgggcagagggccctggatttctacagcattcatgtgaccaaggagtccacccaccccgtgaagcccctggcccagatcgccggaaacagatacgcctccggacctgtgggaaaggccctgagcgacgcatgtatgggcacaatcgcctccttcctgtctaagtaccaggacatcatcatcgaacaccagaaggtggtgaagggcaaccagaagagactggagagcctgcgggagctggccggcaaggaaaacctggaataccctagcgtgaccctgccacctcagcctcacaccaaggagggcgttgatgcctacaacgaagtgatcgcccgggtgcgaatgtgggtgaacctgaacctgtggcagaagctgaagctaagcagagatgatgccaagcctctgctgagactgaagggattcccttcctttcctctggtcgagagacaggccaacgaagtggactggtgggacatggtgtgtaacgtgaagaagctgatcaacgagaaaaaggaggatggcaaggtgttttggcagaatctggctggctacaagagacaggaagccctgagaccatacctgagcagcgaggaagatcggaagaagggaaagaaattcgctcggtaccagctgggcgacctgctgctgcacctggaaaagaagcacggcgaggactggggaaaggtgtacgacgaggcctgggagcggattgacaagaaagtggaaggcctgagcaagcacatcaagctggaagaggaacggagaagcgaggacgcccagagcaaggccgccctgaccgactggctgcgggctaaggccagcttcgtgatcgagggcctgaaggaggccgacaaggacgagttctgcagatgcgagctgaagctgcagaagtggtacggggacctgcggggaaagcccttcgccatcgaagccgagaacagcatcctggacatcagcggcttcagcaagcagtacaactgtgccttcatctggcagaaggacggcgtgaagaagctgaacctgtacctgatcatcaactacttcaagggcggcaagctgcggttcaagaagatcaaacctgaagccttcgaagccaacagattctacaccgtgatcaacaaaaagagcggcgagatcgtgcccatggaggtgaacttcaacttcgacgaccccaacctgatcatcctgcctctggcctttggcaagagacagggcagagaattcatctggaacgacctgctgtccctggaaaccggcagcctgaagctggccaacggaagagtgatcgagaagacactgtacaacagaagaacccggcaggatgagcctgccctgttcgtggccctgaccttcgagcggcgggaggtcctggactcctccaatatcaaaccaatgaacctgatcggcgtggcaagaggcgaaaacatccccgccgtgatcgccctgaccgaccccgagggctgcccactgagccggtttaaggatagcctgggaaacccaacccacatcctgagaatcggcgagagctataaggagaagcagcggaccatccaggccaagaaggaggtggagcagcggagagccggcggctacagccggaagtacgccagcaaagccaagaatctggcagacgatatggtgagaaacaccgctagagatctgctgtactacgccgtgacccaggatgccatgctgatcttcgccaacctgagccggggcttcggccggcagggcaagcggaccttcatggccgagagacagtacacacggatggaggactggctgaccgccaagctggcctacgagggcctgagcaagacctacctgtccaagacactggcccagtacacctccaagacatgcagcaactgtgggtttaccatcaccagcgccgactacgacagggtgctggagaagctgaagaagacagcaacaggctggatgaccacaattaacggcaaggagctgaaggtggagggccagattacctactacaacagatacaagagacagaacgtagtcaaggacctgtccgtcgagctggatagactgagcgaagaatctgtgaacaacgacatctcctcctggacaaagggcagaagcggagaagctctgagcctcctgaagaaaagattctcccatagacccgtgcaggagaagttcgtgtgcctgaactgcggcttcgagacacacgcagccgagcaagccgccctgaacatcgccagatcctggctgttcctgcggagccaggagtacaagaaataccagacaaacaagacaaccggcaacaccgataagagagccttcgtcgagacctggcagtccttttaccggaagaagcttaaggaggtgtggaaacctgccgtgcggtctggcggatctggcggaggctccacaagcatgatcgagtaccagatccccgtgagcttcaaggacgtggtggtgggcttcacccaggaggagtggcaccagctgagccccgcccagagggccctgtacagggacgtgatgctggagacctacagcaacctggtgagcgtgggctacgagggcaccaagcccgacgtgatcctgaggctggagcaggaggaggccccctggatcggcgaggccgcctgcctgggctgccactgctggggcaagaccagccccaagaaaaagagaaaagtctaagctgccttctgcggggcttgccttctggccatgcccttcttctctcccttgcacctgtacctcttggtctttgaataaagcctgagtaggaaggctagcaaaaaaaaaaaaaaaaaaaaaaaaaaaaaaaaaaaaaaaaaaaaaaaaaaaaaaaaaaaaaaaaaaaaaaaaaaaaaaaa

SEQ ID NO: 2938 - RNA, 5419 nt, synthetic construct
  source 1..5419: mol_type = other RNA
aggaaataagagagaaaagaagagtaagaagaaatataagagccaccatggcccctaagaagaagcgtaaagtgagccgggtgaacggcagcggcagcggcggcggcatgaaccacgaccaggagttcgacccccctaaggtgtaccctcccgtccccgccgagaagagaaagcccatccgggtcctgagcctgttcgatggcatcgccaccggtctgctggtgctgaaggacctgggcatccaggtggataggtacattgcctccgaggtgtgcgaggactccatcaccgtgggaatggtgcgtcatcagggcaagatcatgtacgtgggcgacgtgcggagcgtgacacagaagcatatccaggagtggggccctttcgacctggtgatcggcggcagcccttgcaatgacctgagcatcgtgaacccagcccggaagggcctgtacgagggaaccggcagactgttcttcgagttttacagactgctgcacgacgcccggcctaaggaaggcgacgaccggcccttcttttggctgttcgagaatgtggtggccatgggagtcagcgacaagcgggatattagccggttcctggagagcaaccccgtgatgatcgatgccaaggaagtgagcgccgcccaccgggccagatacttctggggcaatctgcctggcatgaacagacccctggccagcaccgtgaacgacaagctggagctgcaggagtgcctggagcacggccggatcgccaagttcagcaaggtgagaaccatcaccacccgaagcaacagcatcaaacaaggcaaggaccagcactttcctgtgttcatgaacgagaaggaggacatcctgtggtgtaccgagatggagagagtgttcgggttcccagtccactacacagatgtcagcaacatgtctagactggccagacagagactgctgggaagaagctggtccgtccctgtgatcagacacctgttcgcccctctgaaggagtacttcgcctgcgtgagcagcggcaacagcaacgccaacagccggggccccagcttctctagcggcctggtgccactgtccctgagagggagccacatgggccccatggagatctacaaaaccgtgagcgcctggaagcggcagcctgtgcgcgtgctgagcctgtttcggaatatcgataaagtcctgaaaagcctgggattcctggagagcggctctggctccggcggtggcaccctgaagtacgtggaggatgtgacaaacgtggtcagacgggatgtggagaagtggggccccttcgatctggtgtacggcagcacccaacccctgggcagctcttgtgaccggtgccctggctggtacatgtttcagttccaccggatcctgcagtacgccctgccgagacaggagtcccagcggccattcttttggattttcatggacaacttgctgctgaccgaggatgaccaggaaactaccactcggttcctgcagaccgaagccgtgaccctgcaggacgtgagaggccgggactaccagaacgccatgcgggtgtggtccaacatccctggactgaaaagcaagcacgcacctctgacccctaaagaagaggagtacctgcaggcccaggtgcggagcagaagcaagctggacgcccctaaggtggatctgctggtgaagaattgcctcctgcccctgagagagtacttcaagtatttcagccagaatagtctgcccctgggcggcccaagcagcggcgcccctcctcccagcggcggcagcccagccggctccccaacctctaccgaggagggcacctctgagtccgccacccccgagagcggccctggcacctccaccgagcccagcgagggcagcgcacccggcagccctgccggcagccccacctccacagaggagggaaccagcaccgagcccagcgaaggcagcgccccaggcaccagcaccgagcctagtgagggcggctctggcggcggcagcgcccaggagattaaacggatcaacaagatcagaagaagacttgtgaaagacagcaacaccaagaaggccggcaagacaggccccatgaaaaccctgctggttagagtgatgacacccgatctgagagagcggctggaaaacctgagaaagaagcctgaaaatatcccccagcccatcagcaatacatctagagccaacctgaataagctgctgaccgattacaccgaaatgaagaaggcgatcctgcatgtgtactgggaagagttccagaaggaccctgtgggcctgatgagccgggtggcccagcctgccagcaagaagatcgatcagaacaagctgaaacctgagatggacgagaagggcaacctgaccaccgccggctttgcctgctctcagtgtggccagcccctgttcgtgtacaagctggagcaggtgtctgagaagggcaaggcttacaccaactacttcggacggtgcaatgtggccgagcacgaaaagctgatcctgctggcccagctgaagcccgagaaggatagcgacgaagccgtgacatatagcctgggaaagtttgggcagagggccctggatttctacagcattcatgtgaccaaggagtccacccaccccgtgaagcccctggcccagatcgccggaaacagatacgcctccggacctgtgggaaaggccctgagcgacgcatgtatgggcacaatcgcctccttcctgtctaagtaccaggacatcatcatcgaacaccagaaggtggtgaagggcaaccagaagagactggagagcctgcgggagctggccggcaaggaaaacctggaataccctagcgtgaccctgccacctcagcctcacaccaaggagggcgttgatgcctacaacgaagtgatcgcccgggtgcgaatgtgggtgaacctgaacctgtggcagaagctgaagctaagcagagatgatgccaagcctctgctgagactgaagggattcccttcctttcctctggtcgagagacaggccaacgaagtggactggtgggacatggtgtgtaacgtgaagaagctgatcaacgagaaaaaggaggatggcaaggtgttttggcagaatctggctggctacaagagacaggaagccctgagaccatacctgagcagcgaggaagatcggaagaagggaaagaaattcgctcggtaccagctgggcgacctgctgctgcacctggaaaagaagcacggcgaggactggggaaaggtgtacgacgaggcctgggagcggattgacaagaaagtggaaggcctgagcaagcacatcaagctggaagaggaacggagaagcgaggacgcccagagcaaggccgccctgaccgactggctgcgggctaaggccagcttcgtgatcgagggcctgaaggaggccgacaaggacgagttctgcagatgcgagctgaagctgcagaagtggtacggggacctgcggggaaagcccttcgccatcgaagccgagaacagcatcctggacatcagcggcttcagcaagcagtacaactgtgccttcatctggcagaaggacggcgtgaagaagctgaacctgtacctgatcatcaactacttcaagggcggcaagctgcggttcaagaagatcaaacctgaagccttcgaagccaacagattctacaccgtgatcaacaaaaagagcggcgagatcgtgcccatggaggtgaacttcaacttcgacgaccccaacctgatcatcctgcctctggcctttggcaagagacagggcagagaattcatctggaacgacctgctgtccctggaaaccggcagcctgaagctggccaacggaagagtgatcgagaagacactgtacaacagaagaacccggcaggatgagcctgccctgttcgtggccctgaccttcgagcggcgggaggtcctggactcctccaatatcaaaccaatgaacctgatcggcgtggcaagaggcgaaaacatccccgccgtgatcgccctgaccgaccccgagggctgcccactgagccggtttaaggatagcctgggaaacccaacccacatcctgagaatcggcgagagctataaggagaagcagcggaccatccaggccaagaaggaggtggagcagcggagagccggcggctacagccggaagtacgccagcaaagccaagaatctggcagacgatatggtgagaaacaccgctagagatctgctgtactacgccgtgacccaggatgccatgctgatcttcgccaacctgagccggggcttcggccggcagggcaagcggaccttcatggccgagagacagtacacacggatggaggactggctgaccgccaagctggcctacgagggcctgagcaagacctacctgtccaagacactggcccagtacacctccaagacatgcagcaactgtgggtttaccatcaccagcgccgactacgacagggtgctggagaagctgaagaagacagcaacaggctggatgaccacaattaacggcaaggagctgaaggtggagggccagattacctactacaacagatacaagagacagaacgtagtcaaggacctgtccgtcgagctggatagactgagcgaagaatctgtgaacaacgacatctcctcctggacaaagggcagaagcggagaagctctgagcctcctgaagaaaagattctcccatagacccgtgcaggagaagttcgtgtgcctgaactgcggcttcgagacacacgcagccgagcaagccgccctgaacatcgccagatcctggctgttcctgcggagccaggagtacaagaaataccagacaaacaagacaaccggcaacaccgataagagagccttcgtcgagacctggcagtccttttaccggaagaagcttaaggaggtgtggaaacctgccgtgcggtctggcggatctggcggaggctccacaagctacgaggagatggtgaccttcgaggacgtggccgtgcacttcaccaagaccgagtggaccggcctgagccccgcccagagggccctgtacaggagcgtgatgctggagaacttcggcaacctgaccgccctgggctaccccgtgcccaagcccgccctgatcagcctgctggagggcggcgacatggcctggggcctggaggcccaggacgaccccctggccgagatgaccaagaacgtgtgcaccagccccaagaaaaagagaaaagtctaagctgccttctgcggggcttgccttctggccatgcccttcttctctcccttgcacctgtacctcttggtctttgaataaagcctgagtaggaaggctagcaaaaaaaaaaaaaaaaaaaaaaaaaaaaaaaaaaaaaaaaaaaaaaaaaaaaaaaaaaaaaaaaaaaaaaaaaaaaaaaa

SEQ ID NO: 2939 - RNA, 5419 nt, synthetic construct
  source 1..5419: mol_type = other RNA
aggaaataagagagaaaagaagagtaagaagaaatataagagccaccatggcccctaagaagaagcgtaaagtgagccgggtgaacggcagcggcagcggcggcggcatgaaccacgaccaggagttcgacccccctaaggtgtaccctcccgtccccgccgagaagagaaagcccatccgggtcctgagcctgttcgatggcatcgccaccggtctgctggtgctgaaggacctgggcatccaggtggataggtacattgcctccgaggtgtgcgaggactccatcaccgtgggaatggtgcgtcatcagggcaagatcatgtacgtgggcgacgtgcggagcgtgacacagaagcatatccaggagtggggccctttcgacctggtgatcggcggcagcccttgcaatgacctgagcatcgtgaacccagcccggaagggcctgtacgagggaaccggcagactgttcttcgagttttacagactgctgcacgacgcccggcctaaggaaggcgacgaccggcccttcttttggctgttcgagaatgtggtggccatgggagtcagcgacaagcgggatattagccggttcctggagagcaaccccgtgatgatcgatgccaaggaagtgagcgccgcccaccgggccagatacttctggggcaatctgcctggcatgaacagacccctggccagcaccgtgaacgacaagctggagctgcaggagtgcctggagcacggccggatcgccaagttcagcaaggtgagaaccatcaccacccgaagcaacagcatcaaacaaggcaaggaccagcactttcctgtgttcatgaacgagaaggaggacatcctgtggtgtaccgagatggagagagtgttcgggttcccagtccactacacagatgtcagcaacatgtctagactggccagacagagactgctgggaagaagctggtccgtccctgtgatcagacacctgttcgcccctctgaaggagtacttcgcctgcgtgagcagcggcaacagcaacgccaacagccggggccccagcttctctagcggcctggtgccactgtccctgagagggagccacatgggccccatggagatctacaaaaccgtgagcgcctggaagcggcagcctgtgcgcgtgctgagcctgtttcggaatatcgataaagtcctgaaaagcctgggattcctggagagcggctctggctccggcggtggcaccctgaagtacgtggaggatgtgacaaacgtggtcagacgggatgtggagaagtggggccccttcgatctggtgtacggcagcacccaacccctgggcagctcttgtgaccggtgccctggctggtacatgtttcagttccaccggatcctgcagtacgccctgccgagacaggagtcccagcggccattcttttggattttcatggacaacttgctgctgaccgaggatgaccaggaaactaccactcggttcctgcagaccgaagccgtgaccctgcaggacgtgagaggccgggactaccagaacgccatgcgggtgtggtccaacatccctggactgaaaagcaagcacgcacctctgacccctaaagaagaggagtacctgcaggcccaggtgcggagcagaagcaagctggacgcccctaaggtggatctgctggtgaagaattgcctcctgcccctgagagagtacttcaagtatttcagccagaatagtctgcccctgggcggcccaagcagcggcgcccctcctcccagcggcggcagcccagccggctccccaacctctaccgaggagggcacctctgagtccgccacccccgagagcggccctggcacctccaccgagcccagcgagggcagcgcacccggcagccctgccggcagccccacctccacagaggagggaaccagcaccgagcccagcgaaggcagcgccccaggcaccagcaccgagcctagtgagggcggctctggcggcggcagcgcccaggagattaaacggatcaacaagatcagaagaagacttgtgaaagacagcaacaccaagaaggccggcaagacaggccccatgaaaaccctgctggttagagtgatgacacccgatctgagagagcggctggaaaacctgagaaagaagcctgaaaatatcccccagcccatcagcaatacatctagagccaacctgaataagctgctgaccgattacaccgaaatgaagaaggcgatcctgcatgtgtactgggaagagttccagaaggaccctgtgggcctgatgagccgggtggcccagcctgccagcaagaagatcgatcagaacaagctgaaacctgagatggacgagaagggcaacctgaccaccgccggctttgcctgctctcagtgtggccagcccctgttcgtgtacaagctggagcaggtgtctgagaagggcaaggcttacaccaactacttcggacggtgcaatgtggccgagcacgaaaagctgatcctgctggcccagctgaagcccgagaaggatagcgacgaagccgtgacatatagcctgggaaagtttgggcagagggccctggatttctacagcattcatgtgaccaaggagtccacccaccccgtgaagcccctggcccagatcgccggaaacagatacgcctccggacctgtgggaaaggccctgagcgacgcatgtatgggcacaatcgcctccttcctgtctaagtaccaggacatcatcatcgaacaccagaaggtggtgaagggcaaccagaagagactggagagcctgcgggagctggccggcaaggaaaacctggaataccctagcgtgaccctgccacctcagcctcacaccaaggagggcgttgatgcctacaacgaagtgatcgcccgggtgcgaatgtgggtgaacctgaacctgtggcagaagctgaagctaagcagagatgatgccaagcctctgctgagactgaagggattcccttcctttcctctggtcgagagacaggccaacgaagtggactggtgggacatggtgtgtaacgtgaagaagctgatcaacgagaaaaaggaggatggcaaggtgttttggcagaatctggctggctacaagagacaggaagccctgagaccatacctgagcagcgaggaagatcggaagaagggaaagaaattcgctcggtaccagctgggcgacctgctgctgcacctggaaaagaagcacggcgaggactggggaaaggtgtacgacgaggcctgggagcggattgacaagaaagtggaaggcctgagcaagcacatcaagctggaagaggaacggagaagcgaggacgcccagagcaaggccgccctgaccgactggctgcgggctaaggccagcttcgtgatcgagggcctgaaggaggccgacaaggacgagttctgcagatgcgagctgaagctgcagaagtggtacggggacctgcggggaaagcccttcgccatcgaagccgagaacagcatcctggacatcagcggcttcagcaagcagtacaactgtgccttcatctggcagaaggacggcgtgaagaagctgaacctgtacctgatcatcaactacttcaagggcggcaagctgcggttcaagaagatcaaacctgaagccttcgaagccaacagattctacaccgtgatcaacaaaaagagcggcgagatcgtgcccatggaggtgaacttcaacttcgacgaccccaacctgatcatcctgcctctggcctttggcaagagacagggcagagaattcatctggaacgacctgctgtccctggaaaccggcagcctgaagctggccaacggaagagtgatcgagaagacactgtacaacagaagaacccggcaggatgagcctgccctgttcgtggccctgaccttcgagcggcgggaggtcctggactcctccaatatcaaaccaatgaacctgatcggcgtggcaagaggcgaaaacatccccgccgtgatcgccctgaccgaccccgagggctgcccactgagccggtttaaggatagcctgggaaacccaacccacatcctgagaatcggcgagagctataaggagaagcagcggaccatccaggccaagaaggaggtggagcagcggagagccggcggctacagccggaagtacgccagcaaagccaagaatctggcagacgatatggtgagaaacaccgctagagatctgctgtactacgccgtgacccaggatgccatgctgatcttcgccaacctgagccggggcttcggccggcagggcaagcggaccttcatggccgagagacagtacacacggatggaggactggctgaccgccaagctggcctacgagggcctgagcaagacctacctgtccaagacactggcccagtacacctccaagacatgcagcaactgtgggtttaccatcaccagcgccgactacgacagggtgctggagaagctgaagaagacagcaacaggctggatgaccacaattaacggcaaggagctgaaggtggagggccagattacctactacaacagatacaagagacagaacgtagtcaaggacctgtccgtcgagctggatagactgagcgaagaatctgtgaacaacgacatctcctcctggacaaagggcagaagcggagaagctctgagcctcctgaagaaaagattctcccatagacccgtgcaggagaagttcgtgtgcctgaactgcggcttcgagacacacgcagccgagcaagccgccctgaacatcgccagatcctggctgttcctgcggagccaggagtacaagaaataccagacaaacaagacaaccggcaacaccgataagagagccttcgtcgagacctggcagtccttttaccggaagaagcttaaggaggtgtggaaacctgccgtgcggtctggcggatctggcggaggctccacaagcagccccaccctggtgaccttcaaggacatccacgtgaacttcaccagggaggagtggaacctgctggacgccgcccagcagatcatgtacaaggacgtgatgctggagaactacaagaacctggtgagcgtgggccaccagctgcccaagcccgacgtgatcctgcagctggagaagggcgaggagccctggctggtggagaggggcgtgaggcaggacaccaggcccgactgggacaccgccaccagccccaagaaaaagagaaaagtctaagctgccttctgcggggcttgccttctggccatgcccttcttctctcccttgcacctgtacctcttggtctttgaataaagcctgagtaggaaggctagcaaaaaaaaaaaaaaaaaaaaaaaaaaaaaaaaaaaaaaaaaaaaaaaaaaaaaaaaaaaaaaaaaaaaaaaaaaaaaaaa

SEQ ID NO: 2940 - RNA, 5419 nt, synthetic construct
  source 1..5419: mol_type = other RNA
aggaaataagagagaaaagaagagtaagaagaaatataagagccaccatggcccctaagaagaagcgtaaagtgagccgggtgaacggcagcggcagcggcggcggcatgaaccacgaccaggagttcgacccccctaaggtgtaccctcccgtccccgccgagaagagaaagcccatccgggtcctgagcctgttcgatggcatcgccaccggtctgctggtgctgaaggacctgggcatccaggtggataggtacattgcctccgaggtgtgcgaggactccatcaccgtgggaatggtgcgtcatcagggcaagatcatgtacgtgggcgacgtgcggagcgtgacacagaagcatatccaggagtggggccctttcgacctggtgatcggcggcagcccttgcaatgacctgagcatcgtgaacccagcccggaagggcctgtacgagggaaccggcagactgttcttcgagttttacagactgctgcacgacgcccggcctaaggaaggcgacgaccggcccttcttttggctgttcgagaatgtggtggccatgggagtcagcgacaagcgggatattagccggttcctggagagcaaccccgtgatgatcgatgccaaggaagtgagcgccgcccaccgggccagatacttctggggcaatctgcctggcatgaacagacccctggccagcaccgtgaacgacaagctggagctgcaggagtgcctggagcacggccggatcgccaagttcagcaaggtgagaaccatcaccacccgaagcaacagcatcaaacaaggcaaggaccagcactttcctgtgttcatgaacgagaaggaggacatcctgtggtgtaccgagatggagagagtgttcgggttcccagtccactacacagatgtcagcaacatgtctagactggccagacagagactgctgggaagaagctggtccgtccctgtgatcagacacctgttcgcccctctgaaggagtacttcgcctgcgtgagcagcggcaacagcaacgccaacagccggggccccagcttctctagcggcctggtgccactgtccctgagagggagccacatgggccccatggagatctacaaaaccgtgagcgcctggaagcggcagcctgtgcgcgtgctgagcctgtttcggaatatcgataaagtcctgaaaagcctgggattcctggagagcggctctggctccggcggtggcaccctgaagtacgtggaggatgtgacaaacgtggtcagacgggatgtggagaagtggggccccttcgatctggtgtacggcagcacccaacccctgggcagctcttgtgaccggtgccctggctggtacatgtttcagttccaccggatcctgcagtacgccctgccgagacaggagtcccagcggccattcttttggattttcatggacaacttgctgctgaccgaggatgaccaggaaactaccactcggttcctgcagaccgaagccgtgaccctgcaggacgtgagaggccgggactaccagaacgccatgcgggtgtggtccaacatccctggactgaaaagcaagcacgcacctctgacccctaaagaagaggagtacctgcaggcccaggtgcggagcagaagcaagctggacgcccctaaggtggatctgctggtgaagaattgcctcctgcccctgagagagtacttcaagtatttcagccagaatagtctgcccctgggcggcccaagcagcggcgcccctcctcccagcggcggcagcccagccggctccccaacctctaccgaggagggcacctctgagtccgccacccccgagagcggccctggcacctccaccgagcccagcgagggcagcgcacccggcagccctgccggcagccccacctccacagaggagggaaccagcaccgagcccagcgaaggcagcgccccaggcaccagcaccgagcctagtgagggcggctctggcggcggcagcgcccaggagattaaacggatcaacaagatcagaagaagacttgtgaaagacagcaacaccaagaaggccggcaagacaggccccatgaaaaccctgctggttagagtgatgacacccgatctgagagagcggctggaaaacctgagaaagaagcctgaaaatatcccccagcccatcagcaatacatctagagccaacctgaataagctgctgaccgattacaccgaaatgaagaaggcgatcctgcatgtgtactgggaagagttccagaaggaccctgtgggcctgatgagccgggtggcccagcctgccagcaagaagatcgatcagaacaagctgaaacctgagatggacgagaagggcaacctgaccaccgccggctttgcctgctctcagtgtggccagcccctgttcgtgtacaagctggagcaggtgtctgagaagggcaaggcttacaccaactacttcggacggtgcaatgtggccgagcacgaaaagctgatcctgctggcccagctgaagcccgagaaggatagcgacgaagccgtgacatatagcctgggaaagtttgggcagagggccctggatttctacagcattcatgtgaccaaggagtccacccaccccgtgaagcccctggcccagatcgccggaaacagatacgcctccggacctgtgggaaaggccctgagcgacgcatgtatgggcacaatcgcctccttcctgtctaagtaccaggacatcatcatcgaacaccagaaggtggtgaagggcaaccagaagagactggagagcctgcgggagctggccggcaaggaaaacctggaataccctagcgtgaccctgccacctcagcctcacaccaaggagggcgttgatgcctacaacgaagtgatcgcccgggtgcgaatgtgggtgaacctgaacctgtggcagaagctgaagctaagcagagatgatgccaagcctctgctgagactgaagggattcccttcctttcctctggtcgagagacaggccaacgaagtggactggtgggacatggtgtgtaacgtgaagaagctgatcaacgagaaaaaggaggatggcaaggtgttttggcagaatctggctggctacaagagacaggaagccctgagaccatacctgagcagcgaggaagatcggaagaagggaaagaaattcgctcggtaccagctgggcgacctgctgctgcacctggaaaagaagcacggcgaggactggggaaaggtgtacgacgaggcctgggagcggattgacaagaaagtggaaggcctgagcaagcacatcaagctggaagaggaacggagaagcgaggacgcccagagcaaggccgccctgaccgactggctgcgggctaaggccagcttcgtgatcgagggcctgaaggaggccgacaaggacgagttctgcagatgcgagctgaagctgcagaagtggtacggggacctgcggggaaagcccttcgccatcgaagccgagaacagcatcctggacatcagcggcttcagcaagcagtacaactgtgccttcatctggcagaaggacggcgtgaagaagctgaacctgtacctgatcatcaactacttcaagggcggcaagctgcggttcaagaagatcaaacctgaagccttcgaagccaacagattctacaccgtgatcaacaaaaagagcggcgagatcgtgcccatggaggtgaacttcaacttcgacgaccccaacctgatcatcctgcctctggcctttggcaagagacagggcagagaattcatctggaacgacctgctgtccctggaaaccggcagcctgaagctggccaacggaagagtgatcgagaagacactgtacaacagaagaacccggcaggatgagcctgccctgttcgtggccctgaccttcgagcggcgggaggtcctggactcctccaatatcaaaccaatgaacctgatcggcgtggcaagaggcgaaaacatccccgccgtgatcgccctgaccgaccccgagggctgcccactgagccggtttaaggatagcctgggaaacccaacccacatcctgagaatcggcgagagctataaggagaagcagcggaccatccaggccaagaaggaggtggagcagcggagagccggcggctacagccggaagtacgccagcaaagccaagaatctggcagacgatatggtgagaaacaccgctagagatctgctgtactacgccgtgacccaggatgccatgctgatcttcgccaacctgagccggggcttcggccggcagggcaagcggaccttcatggccgagagacagtacacacggatggaggactggctgaccgccaagctggcctacgagggcctgagcaagacctacctgtccaagacactggcccagtacacctccaagacatgcagcaactgtgggtttaccatcaccagcgccgactacgacagggtgctggagaagctgaagaagacagcaacaggctggatgaccacaattaacggcaaggagctgaaggtggagggccagattacctactacaacagatacaagagacagaacgtagtcaaggacctgtccgtcgagctggatagactgagcgaagaatctgtgaacaacgacatctcctcctggacaaagggcagaagcggagaagctctgagcctcctgaagaaaagattctcccatagacccgtgcaggagaagttcgtgtgcctgaactgcggcttcgagacacacgcagccgagcaagccgccctgaacatcgccagatcctggctgttcctgcggagccaggagtacaagaaataccagacaaacaagacaaccggcaacaccgataagagagccttcgtcgagacctggcagtccttttaccggaagaagcttaaggaggtgtggaaacctgccgtgcggtctggcggatctggcggaggctccacaagcgccagggagagcgtgatgttcagcgacgtgagcatcgacttcagcctggaggagtgggagttcctgaacctggagcagagggacctgtacagggacgtgatgctggagaactacagcaacctggtgagcctgggctgcttcatcagcaagcccgacgtgatcagcctgctggagcagggcaaggagccctggaacgtggtgaggaagggcaggaggcagtaccccgacctggagaccaactacaccagccccaagaaaaagagaaaagtctaagctgccttctgcggggcttgccttctggccatgcccttcttctctcccttgcacctgtacctcttggtctttgaataaagcctgagtaggaaggctagcaaaaaaaaaaaaaaaaaaaaaaaaaaaaaaaaaaaaaaaaaaaaaaaaaaaaaaaaaaaaaaaaaaaaaaaaaaaaaaaa

SEQ ID NO: 2941 - RNA, 5419 nt, synthetic construct
  source 1..5419: mol_type = other RNA
aggaaataagagagaaaagaagagtaagaagaaatataagagccaccatggcccctaagaagaagcgtaaagtgagccgggtgaacggcagcggcagcggcggcggcatgaaccacgaccaggagttcgacccccctaaggtgtaccctcccgtccccgccgagaagagaaagcccatccgggtcctgagcctgttcgatggcatcgccaccggtctgctggtgctgaaggacctgggcatccaggtggataggtacattgcctccgaggtgtgcgaggactccatcaccgtgggaatggtgcgtcatcagggcaagatcatgtacgtgggcgacgtgcggagcgtgacacagaagcatatccaggagtggggccctttcgacctggtgatcggcggcagcccttgcaatgacctgagcatcgtgaacccagcccggaagggcctgtacgagggaaccggcagactgttcttcgagttttacagactgctgcacgacgcccggcctaaggaaggcgacgaccggcccttcttttggctgttcgagaatgtggtggccatgggagtcagcgacaagcgggatattagccggttcctggagagcaaccccgtgatgatcgatgccaaggaagtgagcgccgcccaccgggccagatacttctggggcaatctgcctggcatgaacagacccctggccagcaccgtgaacgacaagctggagctgcaggagtgcctggagcacggccggatcgccaagttcagcaaggtgagaaccatcaccacccgaagcaacagcatcaaacaaggcaaggaccagcactttcctgtgttcatgaacgagaaggaggacatcctgtggtgtaccgagatggagagagtgttcgggttcccagtccactacacagatgtcagcaacatgtctagactggccagacagagactgctgggaagaagctggtccgtccctgtgatcagacacctgttcgcccctctgaaggagtacttcgcctgcgtgagcagcggcaacagcaacgccaacagccggggccccagcttctctagcggcctggtgccactgtccctgagagggagccacatgggccccatggagatctacaaaaccgtgagcgcctggaagcggcagcctgtgcgcgtgctgagcctgtttcggaatatcgataaagtcctgaaaagcctgggattcctggagagcggctctggctccggcggtggcaccctgaagtacgtggaggatgtgacaaacgtggtcagacgggatgtggagaagtggggccccttcgatctggtgtacggcagcacccaacccctgggcagctcttgtgaccggtgccctggctggtacatgtttcagttccaccggatcctgcagtacgccctgccgagacaggagtcccagcggccattcttttggattttcatggacaacttgctgctgaccgaggatgaccaggaaactaccactcggttcctgcagaccgaagccgtgaccctgcaggacgtgagaggccgggactaccagaacgccatgcgggtgtggtccaacatccctggactgaaaagcaagcacgcacctctgacccctaaagaagaggagtacctgcaggcccaggtgcggagcagaagcaagctggacgcccctaaggtggatctgctggtgaagaattgcctcctgcccctgagagagtacttcaagtatttcagccagaatagtctgcccctgggcggcccaagcagcggcgcccctcctcccagcggcggcagcccagccggctccccaacctctaccgaggagggcacctctgagtccgccacccccgagagcggccctggcacctccaccgagcccagcgagggcagcgcacccggcagccctgccggcagccccacctccacagaggagggaaccagcaccgagcccagcgaaggcagcgccccaggcaccagcaccgagcctagtgagggcggctctggcggcggcagcgcccaggagattaaacggatcaacaagatcagaagaagacttgtgaaagacagcaacaccaagaaggccggcaagacaggccccatgaaaaccctgctggttagagtgatgacacccgatctgagagagcggctggaaaacctgagaaagaagcctgaaaatatcccccagcccatcagcaatacatctagagccaacctgaataagctgctgaccgattacaccgaaatgaagaaggcgatcctgcatgtgtactgggaagagttccagaaggaccctgtgggcctgatgagccgggtggcccagcctgccagcaagaagatcgatcagaacaagctgaaacctgagatggacgagaagggcaacctgaccaccgccggctttgcctgctctcagtgtggccagcccctgttcgtgtacaagctggagcaggtgtctgagaagggcaaggcttacaccaactacttcggacggtgcaatgtggccgagcacgaaaagctgatcctgctggcccagctgaagcccgagaaggatagcgacgaagccgtgacatatagcctgggaaagtttgggcagagggccctggatttctacagcattcatgtgaccaaggagtccacccaccccgtgaagcccctggcccagatcgccggaaacagatacgcctccggacctgtgggaaaggccctgagcgacgcatgtatgggcacaatcgcctccttcctgtctaagtaccaggacatcatcatcgaacaccagaaggtggtgaagggcaaccagaagagactggagagcctgcgggagctggccggcaaggaaaacctggaataccctagcgtgaccctgccacctcagcctcacaccaaggagggcgttgatgcctacaacgaagtgatcgcccgggtgcgaatgtgggtgaacctgaacctgtggcagaagctgaagctaagcagagatgatgccaagcctctgctgagactgaagggattcccttcctttcctctggtcgagagacaggccaacgaagtggactggtgggacatggtgtgtaacgtgaagaagctgatcaacgagaaaaaggaggatggcaaggtgttttggcagaatctggctggctacaagagacaggaagccctgagaccatacctgagcagcgaggaagatcggaagaagggaaagaaattcgctcggtaccagctgggcgacctgctgctgcacctggaaaagaagcacggcgaggactggggaaaggtgtacgacgaggcctgggagcggattgacaagaaagtggaaggcctgagcaagcacatcaagctggaagaggaacggagaagcgaggacgcccagagcaaggccgccctgaccgactggctgcgggctaaggccagcttcgtgatcgagggcctgaaggaggccgacaaggacgagttctgcagatgcgagctgaagctgcagaagtggtacggggacctgcggggaaagcccttcgccatcgaagccgagaacagcatcctggacatcagcggcttcagcaagcagtacaactgtgccttcatctggcagaaggacggcgtgaagaagctgaacctgtacctgatcatcaactacttcaagggcggcaagctgcggttcaagaagatcaaacctgaagccttcgaagccaacagattctacaccgtgatcaacaaaaagagcggcgagatcgtgcccatggaggtgaacttcaacttcgacgaccccaacctgatcatcctgcctctggcctttggcaagagacagggcagagaattcatctggaacgacctgctgtccctggaaaccggcagcctgaagctggccaacggaagagtgatcgagaagacactgtacaacagaagaacccggcaggatgagcctgccctgttcgtggccctgaccttcgagcggcgggaggtcctggactcctccaatatcaaaccaatgaacctgatcggcgtggcaagaggcgaaaacatccccgccgtgatcgccctgaccgaccccgagggctgcccactgagccggtttaaggatagcctgggaaacccaacccacatcctgagaatcggcgagagctataaggagaagcagcggaccatccaggccaagaaggaggtggagcagcggagagccggcggctacagccggaagtacgccagcaaagccaagaatctggcagacgatatggtgagaaacaccgctagagatctgctgtactacgccgtgacccaggatgccatgctgatcttcgccaacctgagccggggcttcggccggcagggcaagcggaccttcatggccgagagacagtacacacggatggaggactggctgaccgccaagctggcctacgagggcctgagcaagacctacctgtccaagacactggcccagtacacctccaagacatgcagcaactgtgggtttaccatcaccagcgccgactacgacagggtgctggagaagctgaagaagacagcaacaggctggatgaccacaattaacggcaaggagctgaaggtggagggccagattacctactacaacagatacaagagacagaacgtagtcaaggacctgtccgtcgagctggatagactgagcgaagaatctgtgaacaacgacatctcctcctggacaaagggcagaagcggagaagctctgagcctcctgaagaaaagattctcccatagacccgtgcaggagaagttcgtgtgcctgaactgcggcttcgagacacacgcagccgagcaagccgccctgaacatcgccagatcctggctgttcctgcggagccaggagtacaagaaataccagacaaacaagacaaccggcaacaccgataagagagccttcgtcgagacctggcagtccttttaccggaagaagcttaaggaggtgtggaaacctgccgtgcggtctggcggatctggcggaggctccacaagctgccaggagaccctgaccttcaaggacgtggccgtggacttcaccagggaggagtggggccacctgggccccgcccagagggacctgtacaaggaggtgatgctggacaactacaggaacctggtgagcctgggcctgcaggtgagcaagcccgacgtgatcttccagctggagaggggcgagagccccagcatgctggagggcaaggacagcagcgacccctgccccgagttcctgagccagaccagccccaagaaaaagagaaaagtctaagctgccttctgcggggcttgccttctggccatgcccttcttctctcccttgcacctgtacctcttggtctttgaataaagcctgagtaggaaggctagcaaaaaaaaaaaaaaaaaaaaaaaaaaaaaaaaaaaaaaaaaaaaaaaaaaaaaaaaaaaaaaaaaaaaaaaaaaaaaaaa

SEQ ID NO: 2942 - RNA, 5419 nt, synthetic construct
  source 1..5419: mol_type = other RNA
aggaaataagagagaaaagaagagtaagaagaaatataagagccaccatggcccctaagaagaagcgtaaagtgagccgggtgaacggcagcggcagcggcggcggcatgaaccacgaccaggagttcgacccccctaaggtgtaccctcccgtccccgccgagaagagaaagcccatccgggtcctgagcctgttcgatggcatcgccaccggtctgctggtgctgaaggacctgggcatccaggtggataggtacattgcctccgaggtgtgcgaggactccatcaccgtgggaatggtgcgtcatcagggcaagatcatgtacgtgggcgacgtgcggagcgtgacacagaagcatatccaggagtggggccctttcgacctggtgatcggcggcagcccttgcaatgacctgagcatcgtgaacccagcccggaagggcctgtacgagggaaccggcagactgttcttcgagttttacagactgctgcacgacgcccggcctaaggaaggcgacgaccggcccttcttttggctgttcgagaatgtggtggccatgggagtcagcgacaagcgggatattagccggttcctggagagcaaccccgtgatgatcgatgccaaggaagtgagcgccgcccaccgggccagatacttctggggcaatctgcctggcatgaacagacccctggccagcaccgtgaacgacaagctggagctgcaggagtgcctggagcacggccggatcgccaagttcagcaaggtgagaaccatcaccacccgaagcaacagcatcaaacaaggcaaggaccagcactttcctgtgttcatgaacgagaaggaggacatcctgtggtgtaccgagatggagagagtgttcgggttcccagtccactacacagatgtcagcaacatgtctagactggccagacagagactgctgggaagaagctggtccgtccctgtgatcagacacctgttcgcccctctgaaggagtacttcgcctgcgtgagcagcggcaacagcaacgccaacagccggggccccagcttctctagcggcctggtgccactgtccctgagagggagccacatgggccccatggagatctacaaaaccgtgagcgcctggaagcggcagcctgtgcgcgtgctgagcctgtttcggaatatcgataaagtcctgaaaagcctgggattcctggagagcggctctggctccggcggtggcaccctgaagtacgtggaggatgtgacaaacgtggtcagacgggatgtggagaagtggggccccttcgatctggtgtacggcagcacccaacccctgggcagctcttgtgaccggtgccctggctggtacatgtttcagttccaccggatcctgcagtacgccctgccgagacaggagtcccagcggccattcttttggattttcatggacaacttgctgctgaccgaggatgaccaggaaactaccactcggttcctgcagaccgaagccgtgaccctgcaggacgtgagaggccgggactaccagaacgccatgcgggtgtggtccaacatccctggactgaaaagcaagcacgcacctctgacccctaaagaagaggagtacctgcaggcccaggtgcggagcagaagcaagctggacgcccctaaggtggatctgctggtgaagaattgcctcctgcccctgagagagtacttcaagtatttcagccagaatagtctgcccctgggcggcccaagcagcggcgcccctcctcccagcggcggcagcccagccggctccccaacctctaccgaggagggcacctctgagtccgccacccccgagagcggccctggcacctccaccgagcccagcgagggcagcgcacccggcagccctgccggcagccccacctccacagaggagggaaccagcaccgagcccagcgaaggcagcgccccaggcaccagcaccgagcctagtgagggcggctctggcggcggcagcgcccaggagattaaacggatcaacaagatcagaagaagacttgtgaaagacagcaacaccaagaaggccggcaagacaggccccatgaaaaccctgctggttagagtgatgacacccgatctgagagagcggctggaaaacctgagaaagaagcctgaaaatatcccccagcccatcagcaatacatctagagccaacctgaataagctgctgaccgattacaccgaaatgaagaaggcgatcctgcatgtgtactgggaagagttccagaaggaccctgtgggcctgatgagccgggtggcccagcctgccagcaagaagatcgatcagaacaagctgaaacctgagatggacgagaagggcaacctgaccaccgccggctttgcctgctctcagtgtggccagcccctgttcgtgtacaagctggagcaggtgtctgagaagggcaaggcttacaccaactacttcggacggtgcaatgtggccgagcacgaaaagctgatcctgctggcccagctgaagcccgagaaggatagcgacgaagccgtgacatatagcctgggaaagtttgggcagagggccctggatttctacagcattcatgtgaccaaggagtccacccaccccgtgaagcccctggcccagatcgccggaaacagatacgcctccggacctgtgggaaaggccctgagcgacgcatgtatgggcacaatcgcctccttcctgtctaagtaccaggacatcatcatcgaacaccagaaggtggtgaagggcaaccagaagagactggagagcctgcgggagctggccggcaaggaaaacctggaataccctagcgtgaccctgccacctcagcctcacaccaaggagggcgttgatgcctacaacgaagtgatcgcccgggtgcgaatgtgggtgaacctgaacctgtggcagaagctgaagctaagcagagatgatgccaagcctctgctgagactgaagggattcccttcctttcctctggtcgagagacaggccaacgaagtggactggtgggacatggtgtgtaacgtgaagaagctgatcaacgagaaaaaggaggatggcaaggtgttttggcagaatctggctggctacaagagacaggaagccctgagaccatacctgagcagcgaggaagatcggaagaagggaaagaaattcgctcggtaccagctgggcgacctgctgctgcacctggaaaagaagcacggcgaggactggggaaaggtgtacgacgaggcctgggagcggattgacaagaaagtggaaggcctgagcaagcacatcaagctggaagaggaacggagaagcgaggacgcccagagcaaggccgccctgaccgactggctgcgggctaaggccagcttcgtgatcgagggcctgaaggaggccgacaaggacgagttctgcagatgcgagctgaagctgcagaagtggtacggggacctgcggggaaagcccttcgccatcgaagccgagaacagcatcctggacatcagcggcttcagcaagcagtacaactgtgccttcatctggcagaaggacggcgtgaagaagctgaacctgtacctgatcatcaactacttcaagggcggcaagctgcggttcaagaagatcaaacctgaagccttcgaagccaacagattctacaccgtgatcaacaaaaagagcggcgagatcgtgcccatggaggtgaacttcaacttcgacgaccccaacctgatcatcctgcctctggcctttggcaagagacagggcagagaattcatctggaacgacctgctgtccctggaaaccggcagcctgaagctggccaacggaagagtgatcgagaagacactgtacaacagaagaacccggcaggatgagcctgccctgttcgtggccctgaccttcgagcggcgggaggtcctggactcctccaatatcaaaccaatgaacctgatcggcgtggcaagaggcgaaaacatccccgccgtgatcgccctgaccgaccccgagggctgcccactgagccggtttaaggatagcctgggaaacccaacccacatcctgagaatcggcgagagctataaggagaagcagcggaccatccaggccaagaaggaggtggagcagcggagagccggcggctacagccggaagtacgccagcaaagccaagaatctggcagacgatatggtgagaaacaccgctagagatctgctgtactacgccgtgacccaggatgccatgctgatcttcgccaacctgagccggggcttcggccggcagggcaagcggaccttcatggccgagagacagtacacacggatggaggactggctgaccgccaagctggcctacgagggcctgagcaagacctacctgtccaagacactggcccagtacacctccaagacatgcagcaactgtgggtttaccatcaccagcgccgactacgacagggtgctggagaagctgaagaagacagcaacaggctggatgaccacaattaacggcaaggagctgaaggtggagggccagattacctactacaacagatacaagagacagaacgtagtcaaggacctgtccgtcgagctggatagactgagcgaagaatctgtgaacaacgacatctcctcctggacaaagggcagaagcggagaagctctgagcctcctgaagaaaagattctcccatagacccgtgcaggagaagttcgtgtgcctgaactgcggcttcgagacacacgcagccgagcaagccgccctgaacatcgccagatcctggctgttcctgcggagccaggagtacaagaaataccagacaaacaagacaaccggcaacaccgataagagagccttcgtcgagacctggcagtccttttaccggaagaagcttaaggaggtgtggaaacctgccgtgcggtctggcggatctggcggaggctccacaagcaagcccggcgtgctgaccttcgccgacgtggccgtgtacttcagcagcgaggagtggggctgcctgaggcccgcccagagggccctgtacagggacgtgatgagggagacctacggccacctgggcgccctgggctgcgccggccccaagcccgccctgatcagctggctggagaggaacaccgacgactgggagcccgccgccctggacccccaggagtgccccaagagggtgaccgtgcagaccagccccaagaaaaagagaaaagtctaagctgccttctgcggggcttgccttctggccatgcccttcttctctcccttgcacctgtacctcttggtctttgaataaagcctgagtaggaaggctagcaaaaaaaaaaaaaaaaaaaaaaaaaaaaaaaaaaaaaaaaaaaaaaaaaaaaaaaaaaaaaaaaaaaaaaaaaaaaaaaa

SEQ ID NO: 2943 - RNA, 5419 nt, synthetic construct
  source 1..5419: mol_type = other RNA
aggaaataagagagaaaagaagagtaagaagaaatataagagccaccatggcccctaagaagaagcgtaaagtgagccgggtgaacggcagcggcagcggcggcggcatgaaccacgaccaggagttcgacccccctaaggtgtaccctcccgtccccgccgagaagagaaagcccatccgggtcctgagcctgttcgatggcatcgccaccggtctgctggtgctgaaggacctgggcatccaggtggataggtacattgcctccgaggtgtgcgaggactccatcaccgtgggaatggtgcgtcatcagggcaagatcatgtacgtgggcgacgtgcggagcgtgacacagaagcatatccaggagtggggccctttcgacctggtgatcggcggcagcccttgcaatgacctgagcatcgtgaacccagcccggaagggcctgtacgagggaaccggcagactgttcttcgagttttacagactgctgcacgacgcccggcctaaggaaggcgacgaccggcccttcttttggctgttcgagaatgtggtggccatgggagtcagcgacaagcgggatattagccggttcctggagagcaaccccgtgatgatcgatgccaaggaagtgagcgccgcccaccgggccagatacttctggggcaatctgcctggcatgaacagacccctggccagcaccgtgaacgacaagctggagctgcaggagtgcctggagcacggccggatcgccaagttcagcaaggtgagaaccatcaccacccgaagcaacagcatcaaacaaggcaaggaccagcactttcctgtgttcatgaacgagaaggaggacatcctgtggtgtaccgagatggagagagtgttcgggttcccagtccactacacagatgtcagcaacatgtctagactggccagacagagactgctgggaagaagctggtccgtccctgtgatcagacacctgttcgcccctctgaaggagtacttcgcctgcgtgagcagcggcaacagcaacgccaacagccggggccccagcttctctagcggcctggtgccactgtccctgagagggagccacatgggccccatggagatctacaaaaccgtgagcgcctggaagcggcagcctgtgcgcgtgctgagcctgtttcggaatatcgataaagtcctgaaaagcctgggattcctggagagcggctctggctccggcggtggcaccctgaagtacgtggaggatgtgacaaacgtggtcagacgggatgtggagaagtggggccccttcgatctggtgtacggcagcacccaacccctgggcagctcttgtgaccggtgccctggctggtacatgtttcagttccaccggatcctgcagtacgccctgccgagacaggagtcccagcggccattcttttggattttcatggacaacttgctgctgaccgaggatgaccaggaaactaccactcggttcctgcagaccgaagccgtgaccctgcaggacgtgagaggccgggactaccagaacgccatgcgggtgtggtccaacatccctggactgaaaagcaagcacgcacctctgacccctaaagaagaggagtacctgcaggcccaggtgcggagcagaagcaagctggacgcccctaaggtggatctgctggtgaagaattgcctcctgcccctgagagagtacttcaagtatttcagccagaatagtctgcccctgggcggcccaagcagcggcgcccctcctcccagcggcggcagcccagccggctccccaacctctaccgaggagggcacctctgagtccgccacccccgagagcggccctggcacctccaccgagcccagcgagggcagcgcacccggcagccctgccggcagccccacctccacagaggagggaaccagcaccgagcccagcgaaggcagcgccccaggcaccagcaccgagcctagtgagggcggctctggcggcggcagcgcccaggagattaaacggatcaacaagatcagaagaagacttgtgaaagacagcaacaccaagaaggccggcaagacaggccccatgaaaaccctgctggttagagtgatgacacccgatctgagagagcggctggaaaacctgagaaagaagcctgaaaatatcccccagcccatcagcaatacatctagagccaacctgaataagctgctgaccgattacaccgaaatgaagaaggcgatcctgcatgtgtactgggaagagttccagaaggaccctgtgggcctgatgagccgggtggcccagcctgccagcaagaagatcgatcagaacaagctgaaacctgagatggacgagaagggcaacctgaccaccgccggctttgcctgctctcagtgtggccagcccctgttcgtgtacaagctggagcaggtgtctgagaagggcaaggcttacaccaactacttcggacggtgcaatgtggccgagcacgaaaagctgatcctgctggcccagctgaagcccgagaaggatagcgacgaagccgtgacatatagcctgggaaagtttgggcagagggccctggatttctacagcattcatgtgaccaaggagtccacccaccccgtgaagcccctggcccagatcgccggaaacagatacgcctccggacctgtgggaaaggccctgagcgacgcatgtatgggcacaatcgcctccttcctgtctaagtaccaggacatcatcatcgaacaccagaaggtggtgaagggcaaccagaagagactggagagcctgcgggagctggccggcaaggaaaacctggaataccctagcgtgaccctgccacctcagcctcacaccaaggagggcgttgatgcctacaacgaagtgatcgcccgggtgcgaatgtgggtgaacctgaacctgtggcagaagctgaagctaagcagagatgatgccaagcctctgctgagactgaagggattcccttcctttcctctggtcgagagacaggccaacgaagtggactggtgggacatggtgtgtaacgtgaagaagctgatcaacgagaaaaaggaggatggcaaggtgttttggcagaatctggctggctacaagagacaggaagccctgagaccatacctgagcagcgaggaagatcggaagaagggaaagaaattcgctcggtaccagctgggcgacctgctgctgcacctggaaaagaagcacggcgaggactggggaaaggtgtacgacgaggcctgggagcggattgacaagaaagtggaaggcctgagcaagcacatcaagctggaagaggaacggagaagcgaggacgcccagagcaaggccgccctgaccgactggctgcgggctaaggccagcttcgtgatcgagggcctgaaggaggccgacaaggacgagttctgcagatgcgagctgaagctgcagaagtggtacggggacctgcggggaaagcccttcgccatcgaagccgagaacagcatcctggacatcagcggcttcagcaagcagtacaactgtgccttcatctggcagaaggacggcgtgaagaagctgaacctgtacctgatcatcaactacttcaagggcggcaagctgcggttcaagaagatcaaacctgaagccttcgaagccaacagattctacaccgtgatcaacaaaaagagcggcgagatcgtgcccatggaggtgaacttcaacttcgacgaccccaacctgatcatcctgcctctggcctttggcaagagacagggcagagaattcatctggaacgacctgctgtccctggaaaccggcagcctgaagctggccaacggaagagtgatcgagaagacactgtacaacagaagaacccggcaggatgagcctgccctgttcgtggccctgaccttcgagcggcgggaggtcctggactcctccaatatcaaaccaatgaacctgatcggcgtggcaagaggcgaaaacatccccgccgtgatcgccctgaccgaccccgagggctgcccactgagccggtttaaggatagcctgggaaacccaacccacatcctgagaatcggcgagagctataaggagaagcagcggaccatccaggccaagaaggaggtggagcagcggagagccggcggctacagccggaagtacgccagcaaagccaagaatctggcagacgatatggtgagaaacaccgctagagatctgctgtactacgccgtgacccaggatgccatgctgatcttcgccaacctgagccggggcttcggccggcagggcaagcggaccttcatggccgagagacagtacacacggatggaggactggctgaccgccaagctggcctacgagggcctgagcaagacctacctgtccaagacactggcccagtacacctccaagacatgcagcaactgtgggtttaccatcaccagcgccgactacgacagggtgctggagaagctgaagaagacagcaacaggctggatgaccacaattaacggcaaggagctgaaggtggagggccagattacctactacaacagatacaagagacagaacgtagtcaaggacctgtccgtcgagctggatagactgagcgaagaatctgtgaacaacgacatctcctcctggacaaagggcagaagcggagaagctctgagcctcctgaagaaaagattctcccatagacccgtgcaggagaagttcgtgtgcctgaactgcggcttcgagacacacgcagccgagcaagccgccctgaacatcgccagatcctggctgttcctgcggagccaggagtacaagaaataccagacaaacaagacaaccggcaacaccgataagagagccttcgtcgagacctggcagtccttttaccggaagaagcttaaggaggtgtggaaacctgccgtgcggtctggcggatctggcggaggctccacaagccagccccaggaggccgtgaccttcaaggacgtggaggtgaccttcagccaggacgagtggggctggctggacgccagccagaggaacctgtacagggacgtgatgctggagaactacggcaacgtgaccagcctggtgggccccttcaccaagcccgccctgatcagctggctggaggccagggagccctggggcctgaacgtgcagggcgcccaccccaagggcagccccagcgccgcccccaccagccccaagaaaaagagaaaagtctaagctgccttctgcggggcttgccttctggccatgcccttcttctctcccttgcacctgtacctcttggtctttgaataaagcctgagtaggaaggctagcaaaaaaaaaaaaaaaaaaaaaaaaaaaaaaaaaaaaaaaaaaaaaaaaaaaaaaaaaaaaaaaaaaaaaaaaaaaaaaaa

SEQ ID NO: 2944 - RNA, 5419 nt, synthetic construct
  source 1..5419: mol_type = other RNA
aggaaataagagagaaaagaagagtaagaagaaatataagagccaccatggcccctaagaagaagcgtaaagtgagccgggtgaacggcagcggcagcggcggcggcatgaaccacgaccaggagttcgacccccctaaggtgtaccctcccgtccccgccgagaagagaaagcccatccgggtcctgagcctgttcgatggcatcgccaccggtctgctggtgctgaaggacctgggcatccaggtggataggtacattgcctccgaggtgtgcgaggactccatcaccgtgggaatggtgcgtcatcagggcaagatcatgtacgtgggcgacgtgcggagcgtgacacagaagcatatccaggagtggggccctttcgacctggtgatcggcggcagcccttgcaatgacctgagcatcgtgaacccagcccggaagggcctgtacgagggaaccggcagactgttcttcgagttttacagactgctgcacgacgcccggcctaaggaaggcgacgaccggcccttcttttggctgttcgagaatgtggtggccatgggagtcagcgacaagcgggatattagccggttcctggagagcaaccccgtgatgatcgatgccaaggaagtgagcgccgcccaccgggccagatacttctggggcaatctgcctggcatgaacagacccctggccagcaccgtgaacgacaagctggagctgcaggagtgcctggagcacggccggatcgccaagttcagcaaggtgagaaccatcaccacccgaagcaacagcatcaaacaaggcaaggaccagcactttcctgtgttcatgaacgagaaggaggacatcctgtggtgtaccgagatggagagagtgttcgggttcccagtccactacacagatgtcagcaacatgtctagactggccagacagagactgctgggaagaagctggtccgtccctgtgatcagacacctgttcgcccctctgaaggagtacttcgcctgcgtgagcagcggcaacagcaacgccaacagccggggccccagcttctctagcggcctggtgccactgtccctgagagggagccacatgggccccatggagatctacaaaaccgtgagcgcctggaagcggcagcctgtgcgcgtgctgagcctgtttcggaatatcgataaagtcctgaaaagcctgggattcctggagagcggctctggctccggcggtggcaccctgaagtacgtggaggatgtgacaaacgtggtcagacgggatgtggagaagtggggccccttcgatctggtgtacggcagcacccaacccctgggcagctcttgtgaccggtgccctggctggtacatgtttcagttccaccggatcctgcagtacgccctgccgagacaggagtcccagcggccattcttttggattttcatggacaacttgctgctgaccgaggatgaccaggaaactaccactcggttcctgcagaccgaagccgtgaccctgcaggacgtgagaggccgggactaccagaacgccatgcgggtgtggtccaacatccctggactgaaaagcaagcacgcacctctgacccctaaagaagaggagtacctgcaggcccaggtgcggagcagaagcaagctggacgcccctaaggtggatctgctggtgaagaattgcctcctgcccctgagagagtacttcaagtatttcagccagaatagtctgcccctgggcggcccaagcagcggcgcccctcctcccagcggcggcagcccagccggctccccaacctctaccgaggagggcacctctgagtccgccacccccgagagcggccctggcacctccaccgagcccagcgagggcagcgcacccggcagccctgccggcagccccacctccacagaggagggaaccagcaccgagcccagcgaaggcagcgccccaggcaccagcaccgagcctagtgagggcggctctggcggcggcagcgcccaggagattaaacggatcaacaagatcagaagaagacttgtgaaagacagcaacaccaagaaggccggcaagacaggccccatgaaaaccctgctggttagagtgatgacacccgatctgagagagcggctggaaaacctgagaaagaagcctgaaaatatcccccagcccatcagcaatacatctagagccaacctgaataagctgctgaccgattacaccgaaatgaagaaggcgatcctgcatgtgtactgggaagagttccagaaggaccctgtgggcctgatgagccgggtggcccagcctgccagcaagaagatcgatcagaacaagctgaaacctgagatggacgagaagggcaacctgaccaccgccggctttgcctgctctcagtgtggccagcccctgttcgtgtacaagctggagcaggtgtctgagaagggcaaggcttacaccaactacttcggacggtgcaatgtggccgagcacgaaaagctgatcctgctggcccagctgaagcccgagaaggatagcgacgaagccgtgacatatagcctgggaaagtttgggcagagggccctggatttctacagcattcatgtgaccaaggagtccacccaccccgtgaagcccctggcccagatcgccggaaacagatacgcctccggacctgtgggaaaggccctgagcgacgcatgtatgggcacaatcgcctccttcctgtctaagtaccaggacatcatcatcgaacaccagaaggtggtgaagggcaaccagaagagactggagagcctgcgggagctggccggcaaggaaaacctggaataccctagcgtgaccctgccacctcagcctcacaccaaggagggcgttgatgcctacaacgaagtgatcgcccgggtgcgaatgtgggtgaacctgaacctgtggcagaagctgaagctaagcagagatgatgccaagcctctgctgagactgaagggattcccttcctttcctctggtcgagagacaggccaacgaagtggactggtgggacatggtgtgtaacgtgaagaagctgatcaacgagaaaaaggaggatggcaaggtgttttggcagaatctggctggctacaagagacaggaagccctgagaccatacctgagcagcgaggaagatcggaagaagggaaagaaattcgctcggtaccagctgggcgacctgctgctgcacctggaaaagaagcacggcgaggactggggaaaggtgtacgacgaggcctgggagcggattgacaagaaagtggaaggcctgagcaagcacatcaagctggaagaggaacggagaagcgaggacgcccagagcaaggccgccctgaccgactggctgcgggctaaggccagcttcgtgatcgagggcctgaaggaggccgacaaggacgagttctgcagatgcgagctgaagctgcagaagtggtacggggacctgcggggaaagcccttcgccatcgaagccgagaacagcatcctggacatcagcggcttcagcaagcagtacaactgtgccttcatctggcagaaggacggcgtgaagaagctgaacctgtacctgatcatcaactacttcaagggcggcaagctgcggttcaagaagatcaaacctgaagccttcgaagccaacagattctacaccgtgatcaacaaaaagagcggcgagatcgtgcccatggaggtgaacttcaacttcgacgaccccaacctgatcatcctgcctctggcctttggcaagagacagggcagagaattcatctggaacgacctgctgtccctggaaaccggcagcctgaagctggccaacggaagagtgatcgagaagacactgtacaacagaagaacccggcaggatgagcctgccctgttcgtggccctgaccttcgagcggcgggaggtcctggactcctccaatatcaaaccaatgaacctgatcggcgtggcaagaggcgaaaacatccccgccgtgatcgccctgaccgaccccgagggctgcccactgagccggtttaaggatagcctgggaaacccaacccacatcctgagaatcggcgagagctataaggagaagcagcggaccatccaggccaagaaggaggtggagcagcggagagccggcggctacagccggaagtacgccagcaaagccaagaatctggcagacgatatggtgagaaacaccgctagagatctgctgtactacgccgtgacccaggatgccatgctgatcttcgccaacctgagccggggcttcggccggcagggcaagcggaccttcatggccgagagacagtacacacggatggaggactggctgaccgccaagctggcctacgagggcctgagcaagacctacctgtccaagacactggcccagtacacctccaagacatgcagcaactgtgggtttaccatcaccagcgccgactacgacagggtgctggagaagctgaagaagacagcaacaggctggatgaccacaattaacggcaaggagctgaaggtggagggccagattacctactacaacagatacaagagacagaacgtagtcaaggacctgtccgtcgagctggatagactgagcgaagaatctgtgaacaacgacatctcctcctggacaaagggcagaagcggagaagctctgagcctcctgaagaaaagattctcccatagacccgtgcaggagaagttcgtgtgcctgaactgcggcttcgagacacacgcagccgagcaagccgccctgaacatcgccagatcctggctgttcctgcggagccaggagtacaagaaataccagacaaacaagacaaccggcaacaccgataagagagccttcgtcgagacctggcagtccttttaccggaagaagcttaaggaggtgtggaaacctgccgtgcggtctggcggatctggcggaggctccacaagcagccaggagcccgtgaccttcgaggacgtggccgtgtacttcacccagaaccagtgggccagcctggaccccatgcagagggccctgtacctggaggtgatgctggagaactacgccaacatcaccagcctggccctgcccttccccaagcccgacctgatcctgcagctggagcagggcgaggccccctggggcctggacccctggacccccctggacggcgaggccctgggcggcgtgcacaccagccccaagaaaaagagaaaagtctaagctgccttctgcggggcttgccttctggccatgcccttcttctctcccttgcacctgtacctcttggtctttgaataaagcctgagtaggaaggctagcaaaaaaaaaaaaaaaaaaaaaaaaaaaaaaaaaaaaaaaaaaaaaaaaaaaaaaaaaaaaaaaaaaaaaaaaaaaaaaaa

SEQ ID NO: 2945 - RNA, 5419 nt, synthetic construct
  source 1..5419: mol_type = other RNA
aggaaataagagagaaaagaagagtaagaagaaatataagagccaccatggcccctaagaagaagcgtaaagtgagccgggtgaacggcagcggcagcggcggcggcatgaaccacgaccaggagttcgacccccctaaggtgtaccctcccgtccccgccgagaagagaaagcccatccgggtcctgagcctgttcgatggcatcgccaccggtctgctggtgctgaaggacctgggcatccaggtggataggtacattgcctccgaggtgtgcgaggactccatcaccgtgggaatggtgcgtcatcagggcaagatcatgtacgtgggcgacgtgcggagcgtgacacagaagcatatccaggagtggggccctttcgacctggtgatcggcggcagcccttgcaatgacctgagcatcgtgaacccagcccggaagggcctgtacgagggaaccggcagactgttcttcgagttttacagactgctgcacgacgcccggcctaaggaaggcgacgaccggcccttcttttggctgttcgagaatgtggtggccatgggagtcagcgacaagcgggatattagccggttcctggagagcaaccccgtgatgatcgatgccaaggaagtgagcgccgcccaccgggccagatacttctggggcaatctgcctggcatgaacagacccctggccagcaccgtgaacgacaagctggagctgcaggagtgcctggagcacggccggatcgccaagttcagcaaggtgagaaccatcaccacccgaagcaacagcatcaaacaaggcaaggaccagcactttcctgtgttcatgaacgagaaggaggacatcctgtggtgtaccgagatggagagagtgttcgggttcccagtccactacacagatgtcagcaacatgtctagactggccagacagagactgctgggaagaagctggtccgtccctgtgatcagacacctgttcgcccctctgaaggagtacttcgcctgcgtgagcagcggcaacagcaacgccaacagccggggccccagcttctctagcggcctggtgccactgtccctgagagggagccacatgggccccatggagatctacaaaaccgtgagcgcctggaagcggcagcctgtgcgcgtgctgagcctgtttcggaatatcgataaagtcctgaaaagcctgggattcctggagagcggctctggctccggcggtggcaccctgaagtacgtggaggatgtgacaaacgtggtcagacgggatgtggagaagtggggccccttcgatctggtgtacggcagcacccaacccctgggcagctcttgtgaccggtgccctggctggtacatgtttcagttccaccggatcctgcagtacgccctgccgagacaggagtcccagcggccattcttttggattttcatggacaacttgctgctgaccgaggatgaccaggaaactaccactcggttcctgcagaccgaagccgtgaccctgcaggacgtgagaggccgggactaccagaacgccatgcgggtgtggtccaacatccctggactgaaaagcaagcacgcacctctgacccctaaagaagaggagtacctgcaggcccaggtgcggagcagaagcaagctggacgcccctaaggtggatctgctggtgaagaattgcctcctgcccctgagagagtacttcaagtatttcagccagaatagtctgcccctgggcggcccaagcagcggcgcccctcctcccagcggcggcagcccagccggctccccaacctctaccgaggagggcacctctgagtccgccacccccgagagcggccctggcacctccaccgagcccagcgagggcagcgcacccggcagccctgccggcagccccacctccacagaggagggaaccagcaccgagcccagcgaaggcagcgccccaggcaccagcaccgagcctagtgagggcggctctggcggcggcagcgcccaggagattaaacggatcaacaagatcagaagaagacttgtgaaagacagcaacaccaagaaggccggcaagacaggccccatgaaaaccctgctggttagagtgatgacacccgatctgagagagcggctggaaaacctgagaaagaagcctgaaaatatcccccagcccatcagcaatacatctagagccaacctgaataagctgctgaccgattacaccgaaatgaagaaggcgatcctgcatgtgtactgggaagagttccagaaggaccctgtgggcctgatgagccgggtggcccagcctgccagcaagaagatcgatcagaacaagctgaaacctgagatggacgagaagggcaacctgaccaccgccggctttgcctgctctcagtgtggccagcccctgttcgtgtacaagctggagcaggtgtctgagaagggcaaggcttacaccaactacttcggacggtgcaatgtggccgagcacgaaaagctgatcctgctggcccagctgaagcccgagaaggatagcgacgaagccgtgacatatagcctgggaaagtttgggcagagggccctggatttctacagcattcatgtgaccaaggagtccacccaccccgtgaagcccctggcccagatcgccggaaacagatacgcctccggacctgtgggaaaggccctgagcgacgcatgtatgggcacaatcgcctccttcctgtctaagtaccaggacatcatcatcgaacaccagaaggtggtgaagggcaaccagaagagactggagagcctgcgggagctggccggcaaggaaaacctggaataccctagcgtgaccctgccacctcagcctcacaccaaggagggcgttgatgcctacaacgaagtgatcgcccgggtgcgaatgtgggtgaacctgaacctgtggcagaagctgaagctaagcagagatgatgccaagcctctgctgagactgaagggattcccttcctttcctctggtcgagagacaggccaacgaagtggactggtgggacatggtgtgtaacgtgaagaagctgatcaacgagaaaaaggaggatggcaaggtgttttggcagaatctggctggctacaagagacaggaagccctgagaccatacctgagcagcgaggaagatcggaagaagggaaagaaattcgctcggtaccagctgggcgacctgctgctgcacctggaaaagaagcacggcgaggactggggaaaggtgtacgacgaggcctgggagcggattgacaagaaagtggaaggcctgagcaagcacatcaagctggaagaggaacggagaagcgaggacgcccagagcaaggccgccctgaccgactggctgcgggctaaggccagcttcgtgatcgagggcctgaaggaggccgacaaggacgagttctgcagatgcgagctgaagctgcagaagtggtacggggacctgcggggaaagcccttcgccatcgaagccgagaacagcatcctggacatcagcggcttcagcaagcagtacaactgtgccttcatctggcagaaggacggcgtgaagaagctgaacctgtacctgatcatcaactacttcaagggcggcaagctgcggttcaagaagatcaaacctgaagccttcgaagccaacagattctacaccgtgatcaacaaaaagagcggcgagatcgtgcccatggaggtgaacttcaacttcgacgaccccaacctgatcatcctgcctctggcctttggcaagagacagggcagagaattcatctggaacgacctgctgtccctggaaaccggcagcctgaagctggccaacggaagagtgatcgagaagacactgtacaacagaagaacccggcaggatgagcctgccctgttcgtggccctgaccttcgagcggcgggaggtcctggactcctccaatatcaaaccaatgaacctgatcggcgtggcaagaggcgaaaacatccccgccgtgatcgccctgaccgaccccgagggctgcccactgagccggtttaaggatagcctgggaaacccaacccacatcctgagaatcggcgagagctataaggagaagcagcggaccatccaggccaagaaggaggtggagcagcggagagccggcggctacagccggaagtacgccagcaaagccaagaatctggcagacgatatggtgagaaacaccgctagagatctgctgtactacgccgtgacccaggatgccatgctgatcttcgccaacctgagccggggcttcggccggcagggcaagcggaccttcatggccgagagacagtacacacggatggaggactggctgaccgccaagctggcctacgagggcctgagcaagacctacctgtccaagacactggcccagtacacctccaagacatgcagcaactgtgggtttaccatcaccagcgccgactacgacagggtgctggagaagctgaagaagacagcaacaggctggatgaccacaattaacggcaaggagctgaaggtggagggccagattacctactacaacagatacaagagacagaacgtagtcaaggacctgtccgtcgagctggatagactgagcgaagaatctgtgaacaacgacatctcctcctggacaaagggcagaagcggagaagctctgagcctcctgaagaaaagattctcccatagacccgtgcaggagaagttcgtgtgcctgaactgcggcttcgagacacacgcagccgagcaagccgccctgaacatcgccagatcctggctgttcctgcggagccaggagtacaagaaataccagacaaacaagacaaccggcaacaccgataagagagccttcgtcgagacctggcagtccttttaccggaagaagcttaaggaggtgtggaaacctgccgtgcggtctggcggatctggcggaggctccacaagcgcccagatgctggtgaccttcaaggacgtggccgtgaccttcacccaggaggagtggaggcagctggacctgacccagaggaccctgtacagggaggtgatgctggagacctgcggcctgctggtgagcctgggccacagggtgcccaagcccgagctggtgcacctgctggagcacggccaggagctgtggaccgtgaagaccggcctgagccagcccacctgcgccggcgacaggacccagaccagccccaagaaaaagagaaaagtctaagctgccttctgcggggcttgccttctggccatgcccttcttctctcccttgcacctgtacctcttggtctttgaataaagcctgagtaggaaggctagcaaaaaaaaaaaaaaaaaaaaaaaaaaaaaaaaaaaaaaaaaaaaaaaaaaaaaaaaaaaaaaaaaaaaaaaaaaaaaaaa

SEQ ID NO: 2946 - RNA, 5419 nt, synthetic construct
  source 1..5419: mol_type = other RNA
aggaaataagagagaaaagaagagtaagaagaaatataagagccaccatggcccctaagaagaagcgtaaagtgagccgggtgaacggcagcggcagcggcggcggcatgaaccacgaccaggagttcgacccccctaaggtgtaccctcccgtccccgccgagaagagaaagcccatccgggtcctgagcctgttcgatggcatcgccaccggtctgctggtgctgaaggacctgggcatccaggtggataggtacattgcctccgaggtgtgcgaggactccatcaccgtgggaatggtgcgtcatcagggcaagatcatgtacgtgggcgacgtgcggagcgtgacacagaagcatatccaggagtggggccctttcgacctggtgatcggcggcagcccttgcaatgacctgagcatcgtgaacccagcccggaagggcctgtacgagggaaccggcagactgttcttcgagttttacagactgctgcacgacgcccggcctaaggaaggcgacgaccggcccttcttttggctgttcgagaatgtggtggccatgggagtcagcgacaagcgggatattagccggttcctggagagcaaccccgtgatgatcgatgccaaggaagtgagcgccgcccaccgggccagatacttctggggcaatctgcctggcatgaacagacccctggccagcaccgtgaacgacaagctggagctgcaggagtgcctggagcacggccggatcgccaagttcagcaaggtgagaaccatcaccacccgaagcaacagcatcaaacaaggcaaggaccagcactttcctgtgttcatgaacgagaaggaggacatcctgtggtgtaccgagatggagagagtgttcgggttcccagtccactacacagatgtcagcaacatgtctagactggccagacagagactgctgggaagaagctggtccgtccctgtgatcagacacctgttcgcccctctgaaggagtacttcgcctgcgtgagcagcggcaacagcaacgccaacagccggggccccagcttctctagcggcctggtgccactgtccctgagagggagccacatgggccccatggagatctacaaaaccgtgagcgcctggaagcggcagcctgtgcgcgtgctgagcctgtttcggaatatcgataaagtcctgaaaagcctgggattcctggagagcggctctggctccggcggtggcaccctgaagtacgtggaggatgtgacaaacgtggtcagacgggatgtggagaagtggggccccttcgatctggtgtacggcagcacccaacccctgggcagctcttgtgaccggtgccctggctggtacatgtttcagttccaccggatcctgcagtacgccctgccgagacaggagtcccagcggccattcttttggattttcatggacaacttgctgctgaccgaggatgaccaggaaactaccactcggttcctgcagaccgaagccgtgaccctgcaggacgtgagaggccgggactaccagaacgccatgcgggtgtggtccaacatccctggactgaaaagcaagcacgcacctctgacccctaaagaagaggagtacctgcaggcccaggtgcggagcagaagcaagctggacgcccctaaggtggatctgctggtgaagaattgcctcctgcccctgagagagtacttcaagtatttcagccagaatagtctgcccctgggcggcccaagcagcggcgcccctcctcccagcggcggcagcccagccggctccccaacctctaccgaggagggcacctctgagtccgccacccccgagagcggccctggcacctccaccgagcccagcgagggcagcgcacccggcagccctgccggcagccccacctccacagaggagggaaccagcaccgagcccagcgaaggcagcgccccaggcaccagcaccgagcctagtgagggcggctctggcggcggcagcgcccaggagattaaacggatcaacaagatcagaagaagacttgtgaaagacagcaacaccaagaaggccggcaagacaggccccatgaaaaccctgctggttagagtgatgacacccgatctgagagagcggctggaaaacctgagaaagaagcctgaaaatatcccccagcccatcagcaatacatctagagccaacctgaataagctgctgaccgattacaccgaaatgaagaaggcgatcctgcatgtgtactgggaagagttccagaaggaccctgtgggcctgatgagccgggtggcccagcctgccagcaagaagatcgatcagaacaagctgaaacctgagatggacgagaagggcaacctgaccaccgccggctttgcctgctctcagtgtggccagcccctgttcgtgtacaagctggagcaggtgtctgagaagggcaaggcttacaccaactacttcggacggtgcaatgtggccgagcacgaaaagctgatcctgctggcccagctgaagcccgagaaggatagcgacgaagccgtgacatatagcctgggaaagtttgggcagagggccctggatttctacagcattcatgtgaccaaggagtccacccaccccgtgaagcccctggcccagatcgccggaaacagatacgcctccggacctgtgggaaaggccctgagcgacgcatgtatgggcacaatcgcctccttcctgtctaagtaccaggacatcatcatcgaacaccagaaggtggtgaagggcaaccagaagagactggagagcctgcgggagctggccggcaaggaaaacctggaataccctagcgtgaccctgccacctcagcctcacaccaaggagggcgttgatgcctacaacgaagtgatcgcccgggtgcgaatgtgggtgaacctgaacctgtggcagaagctgaagctaagcagagatgatgccaagcctctgctgagactgaagggattcccttcctttcctctggtcgagagacaggccaacgaagtggactggtgggacatggtgtgtaacgtgaagaagctgatcaacgagaaaaaggaggatggcaaggtgttttggcagaatctggctggctacaagagacaggaagccctgagaccatacctgagcagcgaggaagatcggaagaagggaaagaaattcgctcggtaccagctgggcgacctgctgctgcacctggaaaagaagcacggcgaggactggggaaaggtgtacgacgaggcctgggagcggattgacaagaaagtggaaggcctgagcaagcacatcaagctggaagaggaacggagaagcgaggacgcccagagcaaggccgccctgaccgactggctgcgggctaaggccagcttcgtgatcgagggcctgaaggaggccgacaaggacgagttctgcagatgcgagctgaagctgcagaagtggtacggggacctgcggggaaagcccttcgccatcgaagccgagaacagcatcctggacatcagcggcttcagcaagcagtacaactgtgccttcatctggcagaaggacggcgtgaagaagctgaacctgtacctgatcatcaactacttcaagggcggcaagctgcggttcaagaagatcaaacctgaagccttcgaagccaacagattctacaccgtgatcaacaaaaagagcggcgagatcgtgcccatggaggtgaacttcaacttcgacgaccccaacctgatcatcctgcctctggcctttggcaagagacagggcagagaattcatctggaacgacctgctgtccctggaaaccggcagcctgaagctggccaacggaagagtgatcgagaagacactgtacaacagaagaacccggcaggatgagcctgccctgttcgtggccctgaccttcgagcggcgggaggtcctggactcctccaatatcaaaccaatgaacctgatcggcgtggcaagaggcgaaaacatccccgccgtgatcgccctgaccgaccccgagggctgcccactgagccggtttaaggatagcctgggaaacccaacccacatcctgagaatcggcgagagctataaggagaagcagcggaccatccaggccaagaaggaggtggagcagcggagagccggcggctacagccggaagtacgccagcaaagccaagaatctggcagacgatatggtgagaaacaccgctagagatctgctgtactacgccgtgacccaggatgccatgctgatcttcgccaacctgagccggggcttcggccggcagggcaagcggaccttcatggccgagagacagtacacacggatggaggactggctgaccgccaagctggcctacgagggcctgagcaagacctacctgtccaagacactggcccagtacacctccaagacatgcagcaactgtgggtttaccatcaccagcgccgactacgacagggtgctggagaagctgaagaagacagcaacaggctggatgaccacaattaacggcaaggagctgaaggtggagggccagattacctactacaacagatacaagagacagaacgtagtcaaggacctgtccgtcgagctggatagactgagcgaagaatctgtgaacaacgacatctcctcctggacaaagggcagaagcggagaagctctgagcctcctgaagaaaagattctcccatagacccgtgcaggagaagttcgtgtgcctgaactgcggcttcgagacacacgcagccgagcaagccgccctgaacatcgccagatcctggctgttcctgcggagccaggagtacaagaaataccagacaaacaagacaaccggcaacaccgataagagagccttcgtcgagacctggcagtccttttaccggaagaagcttaaggaggtgtggaaacctgccgtgcggtctggcggatctggcggaggctccacaagcagcggcagccaggacgccgtgacctacgaggacgtgcacgtgaacttcacccccgaggagtgggccctgctggacagcagccagaagagcctgtacaaggaggtgatgctggagacctacaggaacctgaccagcatcggctacaagtgggaggacctgaacatcgaggagcactgccagagcagcaggaggctgaagaggtacatcatcggccacagcaggtacaagccctgcgacagggagaccagccccaagaaaaagagaaaagtctaagctgccttctgcggggcttgccttctggccatgcccttcttctctcccttgcacctgtacctcttggtctttgaataaagcctgagtaggaaggctagcaaaaaaaaaaaaaaaaaaaaaaaaaaaaaaaaaaaaaaaaaaaaaaaaaaaaaaaaaaaaaaaaaaaaaaaaaaaaaaaa

SEQ ID NO: 2947 - RNA, 5419 nt, synthetic construct
  source 1..5419: mol_type = other RNA
aggaaataagagagaaaagaagagtaagaagaaatataagagccaccatggcccctaagaagaagcgtaaagtgagccgggtgaacggcagcggcagcggcggcggcatgaaccacgaccaggagttcgacccccctaaggtgtaccctcccgtccccgccgagaagagaaagcccatccgggtcctgagcctgttcgatggcatcgccaccggtctgctggtgctgaaggacctgggcatccaggtggataggtacattgcctccgaggtgtgcgaggactccatcaccgtgggaatggtgcgtcatcagggcaagatcatgtacgtgggcgacgtgcggagcgtgacacagaagcatatccaggagtggggccctttcgacctggtgatcggcggcagcccttgcaatgacctgagcatcgtgaacccagcccggaagggcctgtacgagggaaccggcagactgttcttcgagttttacagactgctgcacgacgcccggcctaaggaaggcgacgaccggcccttcttttggctgttcgagaatgtggtggccatgggagtcagcgacaagcgggatattagccggttcctggagagcaaccccgtgatgatcgatgccaaggaagtgagcgccgcccaccgggccagatacttctggggcaatctgcctggcatgaacagacccctggccagcaccgtgaacgacaagctggagctgcaggagtgcctggagcacggccggatcgccaagttcagcaaggtgagaaccatcaccacccgaagcaacagcatcaaacaaggcaaggaccagcactttcctgtgttcatgaacgagaaggaggacatcctgtggtgtaccgagatggagagagtgttcgggttcccagtccactacacagatgtcagcaacatgtctagactggccagacagagactgctgggaagaagctggtccgtccctgtgatcagacacctgttcgcccctctgaaggagtacttcgcctgcgtgagcagcggcaacagcaacgccaacagccggggccccagcttctctagcggcctggtgccactgtccctgagagggagccacatgggccccatggagatctacaaaaccgtgagcgcctggaagcggcagcctgtgcgcgtgctgagcctgtttcggaatatcgataaagtcctgaaaagcctgggattcctggagagcggctctggctccggcggtggcaccctgaagtacgtggaggatgtgacaaacgtggtcagacgggatgtggagaagtggggccccttcgatctggtgtacggcagcacccaacccctgggcagctcttgtgaccggtgccctggctggtacatgtttcagttccaccggatcctgcagtacgccctgccgagacaggagtcccagcggccattcttttggattttcatggacaacttgctgctgaccgaggatgaccaggaaactaccactcggttcctgcagaccgaagccgtgaccctgcaggacgtgagaggccgggactaccagaacgccatgcgggtgtggtccaacatccctggactgaaaagcaagcacgcacctctgacccctaaagaagaggagtacctgcaggcccaggtgcggagcagaagcaagctggacgcccctaaggtggatctgctggtgaagaattgcctcctgcccctgagagagtacttcaagtatttcagccagaatagtctgcccctgggcggcccaagcagcggcgcccctcctcccagcggcggcagcccagccggctccccaacctctaccgaggagggcacctctgagtccgccacccccgagagcggccctggcacctccaccgagcccagcgagggcagcgcacccggcagccctgccggcagccccacctccacagaggagggaaccagcaccgagcccagcgaaggcagcgccccaggcaccagcaccgagcctagtgagggcggctctggcggcggcagcgcccaggagattaaacggatcaacaagatcagaagaagacttgtgaaagacagcaacaccaagaaggccggcaagacaggccccatgaaaaccctgctggttagagtgatgacacccgatctgagagagcggctggaaaacctgagaaagaagcctgaaaatatcccccagcccatcagcaatacatctagagccaacctgaataagctgctgaccgattacaccgaaatgaagaaggcgatcctgcatgtgtactgggaagagttccagaaggaccctgtgggcctgatgagccgggtggcccagcctgccagcaagaagatcgatcagaacaagctgaaacctgagatggacgagaagggcaacctgaccaccgccggctttgcctgctctcagtgtggccagcccctgttcgtgtacaagctggagcaggtgtctgagaagggcaaggcttacaccaactacttcggacggtgcaatgtggccgagcacgaaaagctgatcctgctggcccagctgaagcccgagaaggatagcgacgaagccgtgacatatagcctgggaaagtttgggcagagggccctggatttctacagcattcatgtgaccaaggagtccacccaccccgtgaagcccctggcccagatcgccggaaacagatacgcctccggacctgtgggaaaggccctgagcgacgcatgtatgggcacaatcgcctccttcctgtctaagtaccaggacatcatcatcgaacaccagaaggtggtgaagggcaaccagaagagactggagagcctgcgggagctggccggcaaggaaaacctggaataccctagcgtgaccctgccacctcagcctcacaccaaggagggcgttgatgcctacaacgaagtgatcgcccgggtgcgaatgtgggtgaacctgaacctgtggcagaagctgaagctaagcagagatgatgccaagcctctgctgagactgaagggattcccttcctttcctctggtcgagagacaggccaacgaagtggactggtgggacatggtgtgtaacgtgaagaagctgatcaacgagaaaaaggaggatggcaaggtgttttggcagaatctggctggctacaagagacaggaagccctgagaccatacctgagcagcgaggaagatcggaagaagggaaagaaattcgctcggtaccagctgggcgacctgctgctgcacctggaaaagaagcacggcgaggactggggaaaggtgtacgacgaggcctgggagcggattgacaagaaagtggaaggcctgagcaagcacatcaagctggaagaggaacggagaagcgaggacgcccagagcaaggccgccctgaccgactggctgcgggctaaggccagcttcgtgatcgagggcctgaaggaggccgacaaggacgagttctgcagatgcgagctgaagctgcagaagtggtacggggacctgcggggaaagcccttcgccatcgaagccgagaacagcatcctggacatcagcggcttcagcaagcagtacaactgtgccttcatctggcagaaggacggcgtgaagaagctgaacctgtacctgatcatcaactacttcaagggcggcaagctgcggttcaagaagatcaaacctgaagccttcgaagccaacagattctacaccgtgatcaacaaaaagagcggcgagatcgtgcccatggaggtgaacttcaacttcgacgaccccaacctgatcatcctgcctctggcctttggcaagagacagggcagagaattcatctggaacgacctgctgtccctggaaaccggcagcctgaagctggccaacggaagagtgatcgagaagacactgtacaacagaagaacccggcaggatgagcctgccctgttcgtggccctgaccttcgagcggcgggaggtcctggactcctccaatatcaaaccaatgaacctgatcggcgtggcaagaggcgaaaacatccccgccgtgatcgccctgaccgaccccgagggctgcccactgagccggtttaaggatagcctgggaaacccaacccacatcctgagaatcggcgagagctataaggagaagcagcggaccatccaggccaagaaggaggtggagcagcggagagccggcggctacagccggaagtacgccagcaaagccaagaatctggcagacgatatggtgagaaacaccgctagagatctgctgtactacgccgtgacccaggatgccatgctgatcttcgccaacctgagccggggcttcggccggcagggcaagcggaccttcatggccgagagacagtacacacggatggaggactggctgaccgccaagctggcctacgagggcctgagcaagacctacctgtccaagacactggcccagtacacctccaagacatgcagcaactgtgggtttaccatcaccagcgccgactacgacagggtgctggagaagctgaagaagacagcaacaggctggatgaccacaattaacggcaaggagctgaaggtggagggccagattacctactacaacagatacaagagacagaacgtagtcaaggacctgtccgtcgagctggatagactgagcgaagaatctgtgaacaacgacatctcctcctggacaaagggcagaagcggagaagctctgagcctcctgaagaaaagattctcccatagacccgtgcaggagaagttcgtgtgcctgaactgcggcttcgagacacacgcagccgagcaagccgccctgaacatcgccagatcctggctgttcctgcggagccaggagtacaagaaataccagacaaacaagacaaccggcaacaccgataagagagccttcgtcgagacctggcagtccttttaccggaagaagcttaaggaggtgtggaaacctgccgtgcggtctggcggatctggcggaggctccacaagcccccaggagagcgtggccttcgacgacgtggccgtgtacttcaccaagaaggagtgggccatcatggtgcccgaccagagggccctgtacagggacgtgatgctggagaactacgaggccgtggccttcgtggtgccccccaccagcaagcccgccctgatcagccacctggagcagggcaaggagccctgcttcacccagccccagggcgtgctgagcaggagggactggagggccggcttcaccagccccaagaaaaagagaaaagtctaagctgccttctgcggggcttgccttctggccatgcccttcttctctcccttgcacctgtacctcttggtctttgaataaagcctgagtaggaaggctagcaaaaaaaaaaaaaaaaaaaaaaaaaaaaaaaaaaaaaaaaaaaaaaaaaaaaaaaaaaaaaaaaaaaaaaaaaaaaaaaa

SEQ ID NO: 2948 - RNA, 5419 nt, synthetic construct
  source 1..5419: mol_type = other RNA
aggaaataagagagaaaagaagagtaagaagaaatataagagccaccatggcccctaagaagaagcgtaaagtgagccgggtgaacggcagcggcagcggcggcggcatgaaccacgaccaggagttcgacccccctaaggtgtaccctcccgtccccgccgagaagagaaagcccatccgggtcctgagcctgttcgatggcatcgccaccggtctgctggtgctgaaggacctgggcatccaggtggataggtacattgcctccgaggtgtgcgaggactccatcaccgtgggaatggtgcgtcatcagggcaagatcatgtacgtgggcgacgtgcggagcgtgacacagaagcatatccaggagtggggccctttcgacctggtgatcggcggcagcccttgcaatgacctgagcatcgtgaacccagcccggaagggcctgtacgagggaaccggcagactgttcttcgagttttacagactgctgcacgacgcccggcctaaggaaggcgacgaccggcccttcttttggctgttcgagaatgtggtggccatgggagtcagcgacaagcgggatattagccggttcctggagagcaaccccgtgatgatcgatgccaaggaagtgagcgccgcccaccgggccagatacttctggggcaatctgcctggcatgaacagacccctggccagcaccgtgaacgacaagctggagctgcaggagtgcctggagcacggccggatcgccaagttcagcaaggtgagaaccatcaccacccgaagcaacagcatcaaacaaggcaaggaccagcactttcctgtgttcatgaacgagaaggaggacatcctgtggtgtaccgagatggagagagtgttcgggttcccagtccactacacagatgtcagcaacatgtctagactggccagacagagactgctgggaagaagctggtccgtccctgtgatcagacacctgttcgcccctctgaaggagtacttcgcctgcgtgagcagcggcaacagcaacgccaacagccggggccccagcttctctagcggcctggtgccactgtccctgagagggagccacatgggccccatggagatctacaaaaccgtgagcgcctggaagcggcagcctgtgcgcgtgctgagcctgtttcggaatatcgataaagtcctgaaaagcctgggattcctggagagcggctctggctccggcggtggcaccctgaagtacgtggaggatgtgacaaacgtggtcagacgggatgtggagaagtggggccccttcgatctggtgtacggcagcacccaacccctgggcagctcttgtgaccggtgccctggctggtacatgtttcagttccaccggatcctgcagtacgccctgccgagacaggagtcccagcggccattcttttggattttcatggacaacttgctgctgaccgaggatgaccaggaaactaccactcggttcctgcagaccgaagccgtgaccctgcaggacgtgagaggccgggactaccagaacgccatgcgggtgtggtccaacatccctggactgaaaagcaagcacgcacctctgacccctaaagaagaggagtacctgcaggcccaggtgcggagcagaagcaagctggacgcccctaaggtggatctgctggtgaagaattgcctcctgcccctgagagagtacttcaagtatttcagccagaatagtctgcccctgggcggcccaagcagcggcgcccctcctcccagcggcggcagcccagccggctccccaacctctaccgaggagggcacctctgagtccgccacccccgagagcggccctggcacctccaccgagcccagcgagggcagcgcacccggcagccctgccggcagccccacctccacagaggagggaaccagcaccgagcccagcgaaggcagcgccccaggcaccagcaccgagcctagtgagggcggctctggcggcggcagcgcccaggagattaaacggatcaacaagatcagaagaagacttgtgaaagacagcaacaccaagaaggccggcaagacaggccccatgaaaaccctgctggttagagtgatgacacccgatctgagagagcggctggaaaacctgagaaagaagcctgaaaatatcccccagcccatcagcaatacatctagagccaacctgaataagctgctgaccgattacaccgaaatgaagaaggcgatcctgcatgtgtactgggaagagttccagaaggaccctgtgggcctgatgagccgggtggcccagcctgccagcaagaagatcgatcagaacaagctgaaacctgagatggacgagaagggcaacctgaccaccgccggctttgcctgctctcagtgtggccagcccctgttcgtgtacaagctggagcaggtgtctgagaagggcaaggcttacaccaactacttcggacggtgcaatgtggccgagcacgaaaagctgatcctgctggcccagctgaagcccgagaaggatagcgacgaagccgtgacatatagcctgggaaagtttgggcagagggccctggatttctacagcattcatgtgaccaaggagtccacccaccccgtgaagcccctggcccagatcgccggaaacagatacgcctccggacctgtgggaaaggccctgagcgacgcatgtatgggcacaatcgcctccttcctgtctaagtaccaggacatcatcatcgaacaccagaaggtggtgaagggcaaccagaagagactggagagcctgcgggagctggccggcaaggaaaacctggaataccctagcgtgaccctgccacctcagcctcacaccaaggagggcgttgatgcctacaacgaagtgatcgcccgggtgcgaatgtgggtgaacctgaacctgtggcagaagctgaagctaagcagagatgatgccaagcctctgctgagactgaagggattcccttcctttcctctggtcgagagacaggccaacgaagtggactggtgggacatggtgtgtaacgtgaagaagctgatcaacgagaaaaaggaggatggcaaggtgttttggcagaatctggctggctacaagagacaggaagccctgagaccatacctgagcagcgaggaagatcggaagaagggaaagaaattcgctcggtaccagctgggcgacctgctgctgcacctggaaaagaagcacggcgaggactggggaaaggtgtacgacgaggcctgggagcggattgacaagaaagtggaaggcctgagcaagcacatcaagctggaagaggaacggagaagcgaggacgcccagagcaaggccgccctgaccgactggctgcgggctaaggccagcttcgtgatcgagggcctgaaggaggccgacaaggacgagttctgcagatgcgagctgaagctgcagaagtggtacggggacctgcggggaaagcccttcgccatcgaagccgagaacagcatcctggacatcagcggcttcagcaagcagtacaactgtgccttcatctggcagaaggacggcgtgaagaagctgaacctgtacctgatcatcaactacttcaagggcggcaagctgcggttcaagaagatcaaacctgaagccttcgaagccaacagattctacaccgtgatcaacaaaaagagcggcgagatcgtgcccatggaggtgaacttcaacttcgacgaccccaacctgatcatcctgcctctggcctttggcaagagacagggcagagaattcatctggaacgacctgctgtccctggaaaccggcagcctgaagctggccaacggaagagtgatcgagaagacactgtacaacagaagaacccggcaggatgagcctgccctgttcgtggccctgaccttcgagcggcgggaggtcctggactcctccaatatcaaaccaatgaacctgatcggcgtggcaagaggcgaaaacatccccgccgtgatcgccctgaccgaccccgagggctgcccactgagccggtttaaggatagcctgggaaacccaacccacatcctgagaatcggcgagagctataaggagaagcagcggaccatccaggccaagaaggaggtggagcagcggagagccggcggctacagccggaagtacgccagcaaagccaagaatctggcagacgatatggtgagaaacaccgctagagatctgctgtactacgccgtgacccaggatgccatgctgatcttcgccaacctgagccggggcttcggccggcagggcaagcggaccttcatggccgagagacagtacacacggatggaggactggctgaccgccaagctggcctacgagggcctgagcaagacctacctgtccaagacactggcccagtacacctccaagacatgcagcaactgtgggtttaccatcaccagcgccgactacgacagggtgctggagaagctgaagaagacagcaacaggctggatgaccacaattaacggcaaggagctgaaggtggagggccagattacctactacaacagatacaagagacagaacgtagtcaaggacctgtccgtcgagctggatagactgagcgaagaatctgtgaacaacgacatctcctcctggacaaagggcagaagcggagaagctctgagcctcctgaagaaaagattctcccatagacccgtgcaggagaagttcgtgtgcctgaactgcggcttcgagacacacgcagccgagcaagccgccctgaacatcgccagatcctggctgttcctgcggagccaggagtacaagaaataccagacaaacaagacaaccggcaacaccgataagagagccttcgtcgagacctggcagtccttttaccggaagaagcttaaggaggtgtggaaacctgccgtgcggtctggcggatctggcggaggctccacaagcgagatgggcctgctgaccttcagggacatcgccatcgagttcagcctggccgagtggcagtgcctggaccacgcccagaggaacctgtacagggacgtgatgctggagaactacaggaacctggtgagcctgggcgtggccgtgagcaagcccgacctgatcacctgcctggagcacaacaaggagcccaggaacatcaagaggaacgagatggtgagcaagcaccccgtgacctgcagccacaccagccccaagaaaaagagaaaagtctaagctgccttctgcggggcttgccttctggccatgcccttcttctctcccttgcacctgtacctcttggtctttgaataaagcctgagtaggaaggctagcaaaaaaaaaaaaaaaaaaaaaaaaaaaaaaaaaaaaaaaaaaaaaaaaaaaaaaaaaaaaaaaaaaaaaaaaaaaaaaaa

SEQ ID NO: 2949 - RNA, 5419 nt, synthetic construct
  source 1..5419: mol_type = other RNA
aggaaataagagagaaaagaagagtaagaagaaatataagagccaccatggcccctaagaagaagcgtaaagtgagccgggtgaacggcagcggcagcggcggcggcatgaaccacgaccaggagttcgacccccctaaggtgtaccctcccgtccccgccgagaagagaaagcccatccgggtcctgagcctgttcgatggcatcgccaccggtctgctggtgctgaaggacctgggcatccaggtggataggtacattgcctccgaggtgtgcgaggactccatcaccgtgggaatggtgcgtcatcagggcaagatcatgtacgtgggcgacgtgcggagcgtgacacagaagcatatccaggagtggggccctttcgacctggtgatcggcggcagcccttgcaatgacctgagcatcgtgaacccagcccggaagggcctgtacgagggaaccggcagactgttcttcgagttttacagactgctgcacgacgcccggcctaaggaaggcgacgaccggcccttcttttggctgttcgagaatgtggtggccatgggagtcagcgacaagcgggatattagccggttcctggagagcaaccccgtgatgatcgatgccaaggaagtgagcgccgcccaccgggccagatacttctggggcaatctgcctggcatgaacagacccctggccagcaccgtgaacgacaagctggagctgcaggagtgcctggagcacggccggatcgccaagttcagcaaggtgagaaccatcaccacccgaagcaacagcatcaaacaaggcaaggaccagcactttcctgtgttcatgaacgagaaggaggacatcctgtggtgtaccgagatggagagagtgttcgggttcccagtccactacacagatgtcagcaacatgtctagactggccagacagagactgctgggaagaagctggtccgtccctgtgatcagacacctgttcgcccctctgaaggagtacttcgcctgcgtgagcagcggcaacagcaacgccaacagccggggccccagcttctctagcggcctggtgccactgtccctgagagggagccacatgggccccatggagatctacaaaaccgtgagcgcctggaagcggcagcctgtgcgcgtgctgagcctgtttcggaatatcgataaagtcctgaaaagcctgggattcctggagagcggctctggctccggcggtggcaccctgaagtacgtggaggatgtgacaaacgtggtcagacgggatgtggagaagtggggccccttcgatctggtgtacggcagcacccaacccctgggcagctcttgtgaccggtgccctggctggtacatgtttcagttccaccggatcctgcagtacgccctgccgagacaggagtcccagcggccattcttttggattttcatggacaacttgctgctgaccgaggatgaccaggaaactaccactcggttcctgcagaccgaagccgtgaccctgcaggacgtgagaggccgggactaccagaacgccatgcgggtgtggtccaacatccctggactgaaaagcaagcacgcacctctgacccctaaagaagaggagtacctgcaggcccaggtgcggagcagaagcaagctggacgcccctaaggtggatctgctggtgaagaattgcctcctgcccctgagagagtacttcaagtatttcagccagaatagtctgcccctgggcggcccaagcagcggcgcccctcctcccagcggcggcagcccagccggctccccaacctctaccgaggagggcacctctgagtccgccacccccgagagcggccctggcacctccaccgagcccagcgagggcagcgcacccggcagccctgccggcagccccacctccacagaggagggaaccagcaccgagcccagcgaaggcagcgccccaggcaccagcaccgagcctagtgagggcggctctggcggcggcagcgcccaggagattaaacggatcaacaagatcagaagaagacttgtgaaagacagcaacaccaagaaggccggcaagacaggccccatgaaaaccctgctggttagagtgatgacacccgatctgagagagcggctggaaaacctgagaaagaagcctgaaaatatcccccagcccatcagcaatacatctagagccaacctgaataagctgctgaccgattacaccgaaatgaagaaggcgatcctgcatgtgtactgggaagagttccagaaggaccctgtgggcctgatgagccgggtggcccagcctgccagcaagaagatcgatcagaacaagctgaaacctgagatggacgagaagggcaacctgaccaccgccggctttgcctgctctcagtgtggccagcccctgttcgtgtacaagctggagcaggtgtctgagaagggcaaggcttacaccaactacttcggacggtgcaatgtggccgagcacgaaaagctgatcctgctggcccagctgaagcccgagaaggatagcgacgaagccgtgacatatagcctgggaaagtttgggcagagggccctggatttctacagcattcatgtgaccaaggagtccacccaccccgtgaagcccctggcccagatcgccggaaacagatacgcctccggacctgtgggaaaggccctgagcgacgcatgtatgggcacaatcgcctccttcctgtctaagtaccaggacatcatcatcgaacaccagaaggtggtgaagggcaaccagaagagactggagagcctgcgggagctggccggcaaggaaaacctggaataccctagcgtgaccctgccacctcagcctcacaccaaggagggcgttgatgcctacaacgaagtgatcgcccgggtgcgaatgtgggtgaacctgaacctgtggcagaagctgaagctaagcagagatgatgccaagcctctgctgagactgaagggattcccttcctttcctctggtcgagagacaggccaacgaagtggactggtgggacatggtgtgtaacgtgaagaagctgatcaacgagaaaaaggaggatggcaaggtgttttggcagaatctggctggctacaagagacaggaagccctgagaccatacctgagcagcgaggaagatcggaagaagggaaagaaattcgctcggtaccagctgggcgacctgctgctgcacctggaaaagaagcacggcgaggactggggaaaggtgtacgacgaggcctgggagcggattgacaagaaagtggaaggcctgagcaagcacatcaagctggaagaggaacggagaagcgaggacgcccagagcaaggccgccctgaccgactggctgcgggctaaggccagcttcgtgatcgagggcctgaaggaggccgacaaggacgagttctgcagatgcgagctgaagctgcagaagtggtacggggacctgcggggaaagcccttcgccatcgaagccgagaacagcatcctggacatcagcggcttcagcaagcagtacaactgtgccttcatctggcagaaggacggcgtgaagaagctgaacctgtacctgatcatcaactacttcaagggcggcaagctgcggttcaagaagatcaaacctgaagccttcgaagccaacagattctacaccgtgatcaacaaaaagagcggcgagatcgtgcccatggaggtgaacttcaacttcgacgaccccaacctgatcatcctgcctctggcctttggcaagagacagggcagagaattcatctggaacgacctgctgtccctggaaaccggcagcctgaagctggccaacggaagagtgatcgagaagacactgtacaacagaagaacccggcaggatgagcctgccctgttcgtggccctgaccttcgagcggcgggaggtcctggactcctccaatatcaaaccaatgaacctgatcggcgtggcaagaggcgaaaacatccccgccgtgatcgccctgaccgaccccgagggctgcccactgagccggtttaaggatagcctgggaaacccaacccacatcctgagaatcggcgagagctataaggagaagcagcggaccatccaggccaagaaggaggtggagcagcggagagccggcggctacagccggaagtacgccagcaaagccaagaatctggcagacgatatggtgagaaacaccgctagagatctgctgtactacgccgtgacccaggatgccatgctgatcttcgccaacctgagccggggcttcggccggcagggcaagcggaccttcatggccgagagacagtacacacggatggaggactggctgaccgccaagctggcctacgagggcctgagcaagacctacctgtccaagacactggcccagtacacctccaagacatgcagcaactgtgggtttaccatcaccagcgccgactacgacagggtgctggagaagctgaagaagacagcaacaggctggatgaccacaattaacggcaaggagctgaaggtggagggccagattacctactacaacagatacaagagacagaacgtagtcaaggacctgtccgtcgagctggatagactgagcgaagaatctgtgaacaacgacatctcctcctggacaaagggcagaagcggagaagctctgagcctcctgaagaaaagattctcccatagacccgtgcaggagaagttcgtgtgcctgaactgcggcttcgagacacacgcagccgagcaagccgccctgaacatcgccagatcctggctgttcctgcggagccaggagtacaagaaataccagacaaacaagacaaccggcaacaccgataagagagccttcgtcgagacctggcagtccttttaccggaagaagcttaaggaggtgtggaaacctgccgtgcggtctggcggatctggcggaggctccacaagcatggccgacctggtgatgttcagggacgtgaccgtggacttcagccaggaggagtgggagtgcctgaacagcaaccagaggaacctgtacagggacgtgatcctggagaactacagcaacctggtgagcctgggcggctgcagcatcagcaagcccgacgtgatcaccctgctggagcagggcaaggagccctggatggtggtgagggacgagaagaggaggtggaggctggacctggagagcaccagccccaagaaaaagagaaaagtctaagctgccttctgcggggcttgccttctggccatgcccttcttctctcccttgcacctgtacctcttggtctttgaataaagcctgagtaggaaggctagcaaaaaaaaaaaaaaaaaaaaaaaaaaaaaaaaaaaaaaaaaaaaaaaaaaaaaaaaaaaaaaaaaaaaaaaaaaaaaaaa

SEQ ID NO: 2950 - RNA, 5419 nt, synthetic construct
  source 1..5419: mol_type = other RNA
aggaaataagagagaaaagaagagtaagaagaaatataagagccaccatggcccctaagaagaagcgtaaagtgagccgggtgaacggcagcggcagcggcggcggcatgaaccacgaccaggagttcgacccccctaaggtgtaccctcccgtccccgccgagaagagaaagcccatccgggtcctgagcctgttcgatggcatcgccaccggtctgctggtgctgaaggacctgggcatccaggtggataggtacattgcctccgaggtgtgcgaggactccatcaccgtgggaatggtgcgtcatcagggcaagatcatgtacgtgggcgacgtgcggagcgtgacacagaagcatatccaggagtggggccctttcgacctggtgatcggcggcagcccttgcaatgacctgagcatcgtgaacccagcccggaagggcctgtacgagggaaccggcagactgttcttcgagttttacagactgctgcacgacgcccggcctaaggaaggcgacgaccggcccttcttttggctgttcgagaatgtggtggccatgggagtcagcgacaagcgggatattagccggttcctggagagcaaccccgtgatgatcgatgccaaggaagtgagcgccgcccaccgggccagatacttctggggcaatctgcctggcatgaacagacccctggccagcaccgtgaacgacaagctggagctgcaggagtgcctggagcacggccggatcgccaagttcagcaaggtgagaaccatcaccacccgaagcaacagcatcaaacaaggcaaggaccagcactttcctgtgttcatgaacgagaaggaggacatcctgtggtgtaccgagatggagagagtgttcgggttcccagtccactacacagatgtcagcaacatgtctagactggccagacagagactgctgggaagaagctggtccgtccctgtgatcagacacctgttcgcccctctgaaggagtacttcgcctgcgtgagcagcggcaacagcaacgccaacagccggggccccagcttctctagcggcctggtgccactgtccctgagagggagccacatgggccccatggagatctacaaaaccgtgagcgcctggaagcggcagcctgtgcgcgtgctgagcctgtttcggaatatcgataaagtcctgaaaagcctgggattcctggagagcggctctggctccggcggtggcaccctgaagtacgtggaggatgtgacaaacgtggtcagacgggatgtggagaagtggggccccttcgatctggtgtacggcagcacccaacccctgggcagctcttgtgaccggtgccctggctggtacatgtttcagttccaccggatcctgcagtacgccctgccgagacaggagtcccagcggccattcttttggattttcatggacaacttgctgctgaccgaggatgaccaggaaactaccactcggttcctgcagaccgaagccgtgaccctgcaggacgtgagaggccgggactaccagaacgccatgcgggtgtggtccaacatccctggactgaaaagcaagcacgcacctctgacccctaaagaagaggagtacctgcaggcccaggtgcggagcagaagcaagctggacgcccctaaggtggatctgctggtgaagaattgcctcctgcccctgagagagtacttcaagtatttcagccagaatagtctgcccctgggcggcccaagcagcggcgcccctcctcccagcggcggcagcccagccggctccccaacctctaccgaggagggcacctctgagtccgccacccccgagagcggccctggcacctccaccgagcccagcgagggcagcgcacccggcagccctgccggcagccccacctccacagaggagggaaccagcaccgagcccagcgaaggcagcgccccaggcaccagcaccgagcctagtgagggcggctctggcggcggcagcgcccaggagattaaacggatcaacaagatcagaagaagacttgtgaaagacagcaacaccaagaaggccggcaagacaggccccatgaaaaccctgctggttagagtgatgacacccgatctgagagagcggctggaaaacctgagaaagaagcctgaaaatatcccccagcccatcagcaatacatctagagccaacctgaataagctgctgaccgattacaccgaaatgaagaaggcgatcctgcatgtgtactgggaagagttccagaaggaccctgtgggcctgatgagccgggtggcccagcctgccagcaagaagatcgatcagaacaagctgaaacctgagatggacgagaagggcaacctgaccaccgccggctttgcctgctctcagtgtggccagcccctgttcgtgtacaagctggagcaggtgtctgagaagggcaaggcttacaccaactacttcggacggtgcaatgtggccgagcacgaaaagctgatcctgctggcccagctgaagcccgagaaggatagcgacgaagccgtgacatatagcctgggaaagtttgggcagagggccctggatttctacagcattcatgtgaccaaggagtccacccaccccgtgaagcccctggcccagatcgccggaaacagatacgcctccggacctgtgggaaaggccctgagcgacgcatgtatgggcacaatcgcctccttcctgtctaagtaccaggacatcatcatcgaacaccagaaggtggtgaagggcaaccagaagagactggagagcctgcgggagctggccggcaaggaaaacctggaataccctagcgtgaccctgccacctcagcctcacaccaaggagggcgttgatgcctacaacgaagtgatcgcccgggtgcgaatgtgggtgaacctgaacctgtggcagaagctgaagctaagcagagatgatgccaagcctctgctgagactgaagggattcccttcctttcctctggtcgagagacaggccaacgaagtggactggtgggacatggtgtgtaacgtgaagaagctgatcaacgagaaaaaggaggatggcaaggtgttttggcagaatctggctggctacaagagacaggaagccctgagaccatacctgagcagcgaggaagatcggaagaagggaaagaaattcgctcggtaccagctgggcgacctgctgctgcacctggaaaagaagcacggcgaggactggggaaaggtgtacgacgaggcctgggagcggattgacaagaaagtggaaggcctgagcaagcacatcaagctggaagaggaacggagaagcgaggacgcccagagcaaggccgccctgaccgactggctgcgggctaaggccagcttcgtgatcgagggcctgaaggaggccgacaaggacgagttctgcagatgcgagctgaagctgcagaagtggtacggggacctgcggggaaagcccttcgccatcgaagccgagaacagcatcctggacatcagcggcttcagcaagcagtacaactgtgccttcatctggcagaaggacggcgtgaagaagctgaacctgtacctgatcatcaactacttcaagggcggcaagctgcggttcaagaagatcaaacctgaagccttcgaagccaacagattctacaccgtgatcaacaaaaagagcggcgagatcgtgcccatggaggtgaacttcaacttcgacgaccccaacctgatcatcctgcctctggcctttggcaagagacagggcagagaattcatctggaacgacctgctgtccctggaaaccggcagcctgaagctggccaacggaagagtgatcgagaagacactgtacaacagaagaacccggcaggatgagcctgccctgttcgtggccctgaccttcgagcggcgggaggtcctggactcctccaatatcaaaccaatgaacctgatcggcgtggcaagaggcgaaaacatccccgccgtgatcgccctgaccgaccccgagggctgcccactgagccggtttaaggatagcctgggaaacccaacccacatcctgagaatcggcgagagctataaggagaagcagcggaccatccaggccaagaaggaggtggagcagcggagagccggcggctacagccggaagtacgccagcaaagccaagaatctggcagacgatatggtgagaaacaccgctagagatctgctgtactacgccgtgacccaggatgccatgctgatcttcgccaacctgagccggggcttcggccggcagggcaagcggaccttcatggccgagagacagtacacacggatggaggactggctgaccgccaagctggcctacgagggcctgagcaagacctacctgtccaagacactggcccagtacacctccaagacatgcagcaactgtgggtttaccatcaccagcgccgactacgacagggtgctggagaagctgaagaagacagcaacaggctggatgaccacaattaacggcaaggagctgaaggtggagggccagattacctactacaacagatacaagagacagaacgtagtcaaggacctgtccgtcgagctggatagactgagcgaagaatctgtgaacaacgacatctcctcctggacaaagggcagaagcggagaagctctgagcctcctgaagaaaagattctcccatagacccgtgcaggagaagttcgtgtgcctgaactgcggcttcgagacacacgcagccgagcaagccgccctgaacatcgccagatcctggctgttcctgcggagccaggagtacaagaaataccagacaaacaagacaaccggcaacaccgataagagagccttcgtcgagacctggcagtccttttaccggaagaagcttaaggaggtgtggaaacctgccgtgcggtctggcggatctggcggaggctccacaagcagcgacgaggccttcagcttcgaggacctgagcgtggacttcacccagaaggagtggcagctgctgaaccccggccagaaggacctgtacaaggacgtgatgctggagaactacagcagcctggtgagcctgggctacgagatcatgaagcccgacgtgatcttcaagctggagcagggcgaggagccctggatcggcgacggcgaggtgcccagcagcggctgccccgccgacatgagctacaccagccccaagaaaaagagaaaagtctaagctgccttctgcggggcttgccttctggccatgcccttcttctctcccttgcacctgtacctcttggtctttgaataaagcctgagtaggaaggctagcaaaaaaaaaaaaaaaaaaaaaaaaaaaaaaaaaaaaaaaaaaaaaaaaaaaaaaaaaaaaaaaaaaaaaaaaaaaaaaaa

SEQ ID NO: 2951 - RNA, 5419 nt, synthetic construct
  source 1..5419: mol_type = other RNA
aggaaataagagagaaaagaagagtaagaagaaatataagagccaccatggcccctaagaagaagcgtaaagtgagccgggtgaacggcagcggcagcggcggcggcatgaaccacgaccaggagttcgacccccctaaggtgtaccctcccgtccccgccgagaagagaaagcccatccgggtcctgagcctgttcgatggcatcgccaccggtctgctggtgctgaaggacctgggcatccaggtggataggtacattgcctccgaggtgtgcgaggactccatcaccgtgggaatggtgcgtcatcagggcaagatcatgtacgtgggcgacgtgcggagcgtgacacagaagcatatccaggagtggggccctttcgacctggtgatcggcggcagcccttgcaatgacctgagcatcgtgaacccagcccggaagggcctgtacgagggaaccggcagactgttcttcgagttttacagactgctgcacgacgcccggcctaaggaaggcgacgaccggcccttcttttggctgttcgagaatgtggtggccatgggagtcagcgacaagcgggatattagccggttcctggagagcaaccccgtgatgatcgatgccaaggaagtgagcgccgcccaccgggccagatacttctggggcaatctgcctggcatgaacagacccctggccagcaccgtgaacgacaagctggagctgcaggagtgcctggagcacggccggatcgccaagttcagcaaggtgagaaccatcaccacccgaagcaacagcatcaaacaaggcaaggaccagcactttcctgtgttcatgaacgagaaggaggacatcctgtggtgtaccgagatggagagagtgttcgggttcccagtccactacacagatgtcagcaacatgtctagactggccagacagagactgctgggaagaagctggtccgtccctgtgatcagacacctgttcgcccctctgaaggagtacttcgcctgcgtgagcagcggcaacagcaacgccaacagccggggccccagcttctctagcggcctggtgccactgtccctgagagggagccacatgggccccatggagatctacaaaaccgtgagcgcctggaagcggcagcctgtgcgcgtgctgagcctgtttcggaatatcgataaagtcctgaaaagcctgggattcctggagagcggctctggctccggcggtggcaccctgaagtacgtggaggatgtgacaaacgtggtcagacgggatgtggagaagtggggccccttcgatctggtgtacggcagcacccaacccctgggcagctcttgtgaccggtgccctggctggtacatgtttcagttccaccggatcctgcagtacgccctgccgagacaggagtcccagcggccattcttttggattttcatggacaacttgctgctgaccgaggatgaccaggaaactaccactcggttcctgcagaccgaagccgtgaccctgcaggacgtgagaggccgggactaccagaacgccatgcgggtgtggtccaacatccctggactgaaaagcaagcacgcacctctgacccctaaagaagaggagtacctgcaggcccaggtgcggagcagaagcaagctggacgcccctaaggtggatctgctggtgaagaattgcctcctgcccctgagagagtacttcaagtatttcagccagaatagtctgcccctgggcggcccaagcagcggcgcccctcctcccagcggcggcagcccagccggctccccaacctctaccgaggagggcacctctgagtccgccacccccgagagcggccctggcacctccaccgagcccagcgagggcagcgcacccggcagccctgccggcagccccacctccacagaggagggaaccagcaccgagcccagcgaaggcagcgccccaggcaccagcaccgagcctagtgagggcggctctggcggcggcagcgcccaggagattaaacggatcaacaagatcagaagaagacttgtgaaagacagcaacaccaagaaggccggcaagacaggccccatgaaaaccctgctggttagagtgatgacacccgatctgagagagcggctggaaaacctgagaaagaagcctgaaaatatcccccagcccatcagcaatacatctagagccaacctgaataagctgctgaccgattacaccgaaatgaagaaggcgatcctgcatgtgtactgggaagagttccagaaggaccctgtgggcctgatgagccgggtggcccagcctgccagcaagaagatcgatcagaacaagctgaaacctgagatggacgagaagggcaacctgaccaccgccggctttgcctgctctcagtgtggccagcccctgttcgtgtacaagctggagcaggtgtctgagaagggcaaggcttacaccaactacttcggacggtgcaatgtggccgagcacgaaaagctgatcctgctggcccagctgaagcccgagaaggatagcgacgaagccgtgacatatagcctgggaaagtttgggcagagggccctggatttctacagcattcatgtgaccaaggagtccacccaccccgtgaagcccctggcccagatcgccggaaacagatacgcctccggacctgtgggaaaggccctgagcgacgcatgtatgggcacaatcgcctccttcctgtctaagtaccaggacatcatcatcgaacaccagaaggtggtgaagggcaaccagaagagactggagagcctgcgggagctggccggcaaggaaaacctggaataccctagcgtgaccctgccacctcagcctcacaccaaggagggcgttgatgcctacaacgaagtgatcgcccgggtgcgaatgtgggtgaacctgaacctgtggcagaagctgaagctaagcagagatgatgccaagcctctgctgagactgaagggattcccttcctttcctctggtcgagagacaggccaacgaagtggactggtgggacatggtgtgtaacgtgaagaagctgatcaacgagaaaaaggaggatggcaaggtgttttggcagaatctggctggctacaagagacaggaagccctgagaccatacctgagcagcgaggaagatcggaagaagggaaagaaattcgctcggtaccagctgggcgacctgctgctgcacctggaaaagaagcacggcgaggactggggaaaggtgtacgacgaggcctgggagcggattgacaagaaagtggaaggcctgagcaagcacatcaagctggaagaggaacggagaagcgaggacgcccagagcaaggccgccctgaccgactggctgcgggctaaggccagcttcgtgatcgagggcctgaaggaggccgacaaggacgagttctgcagatgcgagctgaagctgcagaagtggtacggggacctgcggggaaagcccttcgccatcgaagccgagaacagcatcctggacatcagcggcttcagcaagcagtacaactgtgccttcatctggcagaaggacggcgtgaagaagctgaacctgtacctgatcatcaactacttcaagggcggcaagctgcggttcaagaagatcaaacctgaagccttcgaagccaacagattctacaccgtgatcaacaaaaagagcggcgagatcgtgcccatggaggtgaacttcaacttcgacgaccccaacctgatcatcctgcctctggcctttggcaagagacagggcagagaattcatctggaacgacctgctgtccctggaaaccggcagcctgaagctggccaacggaagagtgatcgagaagacactgtacaacagaagaacccggcaggatgagcctgccctgttcgtggccctgaccttcgagcggcgggaggtcctggactcctccaatatcaaaccaatgaacctgatcggcgtggcaagaggcgaaaacatccccgccgtgatcgccctgaccgaccccgagggctgcccactgagccggtttaaggatagcctgggaaacccaacccacatcctgagaatcggcgagagctataaggagaagcagcggaccatccaggccaagaaggaggtggagcagcggagagccggcggctacagccggaagtacgccagcaaagccaagaatctggcagacgatatggtgagaaacaccgctagagatctgctgtactacgccgtgacccaggatgccatgctgatcttcgccaacctgagccggggcttcggccggcagggcaagcggaccttcatggccgagagacagtacacacggatggaggactggctgaccgccaagctggcctacgagggcctgagcaagacctacctgtccaagacactggcccagtacacctccaagacatgcagcaactgtgggtttaccatcaccagcgccgactacgacagggtgctggagaagctgaagaagacagcaacaggctggatgaccacaattaacggcaaggagctgaaggtggagggccagattacctactacaacagatacaagagacagaacgtagtcaaggacctgtccgtcgagctggatagactgagcgaagaatctgtgaacaacgacatctcctcctggacaaagggcagaagcggagaagctctgagcctcctgaagaaaagattctcccatagacccgtgcaggagaagttcgtgtgcctgaactgcggcttcgagacacacgcagccgagcaagccgccctgaacatcgccagatcctggctgttcctgcggagccaggagtacaagaaataccagacaaacaagacaaccggcaacaccgataagagagccttcgtcgagacctggcagtccttttaccggaagaagcttaaggaggtgtggaaacctgccgtgcggtctggcggatctggcggaggctccacaagcagccagggcagggtgaccttcgaggacgtgaccgtgaacttcacccagggcgagtggcagaggctgaaccccgagcagaggaacctgtacagggacgtgatgctggagaactacagcaacctggtgagcgtgggccagggcgagaccaccaagcccgacgtgatcctgaggctggagcagggcaaggagccctggctggaggaggaggaggtgctgggcagcggcagggccgagaagaacggcaccagccccaagaaaaagagaaaagtctaagctgccttctgcggggcttgccttctggccatgcccttcttctctcccttgcacctgtacctcttggtctttgaataaagcctgagtaggaaggctagcaaaaaaaaaaaaaaaaaaaaaaaaaaaaaaaaaaaaaaaaaaaaaaaaaaaaaaaaaaaaaaaaaaaaaaaaaaaaaaaa

SEQ ID NO: 2952 - RNA, 5419 nt, synthetic construct
  source 1..5419: mol_type = other RNA
aggaaataagagagaaaagaagagtaagaagaaatataagagccaccatggcccctaagaagaagcgtaaagtgagccgggtgaacggcagcggcagcggcggcggcatgaaccacgaccaggagttcgacccccctaaggtgtaccctcccgtccccgccgagaagagaaagcccatccgggtcctgagcctgttcgatggcatcgccaccggtctgctggtgctgaaggacctgggcatccaggtggataggtacattgcctccgaggtgtgcgaggactccatcaccgtgggaatggtgcgtcatcagggcaagatcatgtacgtgggcgacgtgcggagcgtgacacagaagcatatccaggagtggggccctttcgacctggtgatcggcggcagcccttgcaatgacctgagcatcgtgaacccagcccggaagggcctgtacgagggaaccggcagactgttcttcgagttttacagactgctgcacgacgcccggcctaaggaaggcgacgaccggcccttcttttggctgttcgagaatgtggtggccatgggagtcagcgacaagcgggatattagccggttcctggagagcaaccccgtgatgatcgatgccaaggaagtgagcgccgcccaccgggccagatacttctggggcaatctgcctggcatgaacagacccctggccagcaccgtgaacgacaagctggagctgcaggagtgcctggagcacggccggatcgccaagttcagcaaggtgagaaccatcaccacccgaagcaacagcatcaaacaaggcaaggaccagcactttcctgtgttcatgaacgagaaggaggacatcctgtggtgtaccgagatggagagagtgttcgggttcccagtccactacacagatgtcagcaacatgtctagactggccagacagagactgctgggaagaagctggtccgtccctgtgatcagacacctgttcgcccctctgaaggagtacttcgcctgcgtgagcagcggcaacagcaacgccaacagccggggccccagcttctctagcggcctggtgccactgtccctgagagggagccacatgggccccatggagatctacaaaaccgtgagcgcctggaagcggcagcctgtgcgcgtgctgagcctgtttcggaatatcgataaagtcctgaaaagcctgggattcctggagagcggctctggctccggcggtggcaccctgaagtacgtggaggatgtgacaaacgtggtcagacgggatgtggagaagtggggccccttcgatctggtgtacggcagcacccaacccctgggcagctcttgtgaccggtgccctggctggtacatgtttcagttccaccggatcctgcagtacgccctgccgagacaggagtcccagcggccattcttttggattttcatggacaacttgctgctgaccgaggatgaccaggaaactaccactcggttcctgcagaccgaagccgtgaccctgcaggacgtgagaggccgggactaccagaacgccatgcgggtgtggtccaacatccctggactgaaaagcaagcacgcacctctgacccctaaagaagaggagtacctgcaggcccaggtgcggagcagaagcaagctggacgcccctaaggtggatctgctggtgaagaattgcctcctgcccctgagagagtacttcaagtatttcagccagaatagtctgcccctgggcggcccaagcagcggcgcccctcctcccagcggcggcagcccagccggctccccaacctctaccgaggagggcacctctgagtccgccacccccgagagcggccctggcacctccaccgagcccagcgagggcagcgcacccggcagccctgccggcagccccacctccacagaggagggaaccagcaccgagcccagcgaaggcagcgccccaggcaccagcaccgagcctagtgagggcggctctggcggcggcagcgcccaggagattaaacggatcaacaagatcagaagaagacttgtgaaagacagcaacaccaagaaggccggcaagacaggccccatgaaaaccctgctggttagagtgatgacacccgatctgagagagcggctggaaaacctgagaaagaagcctgaaaatatcccccagcccatcagcaatacatctagagccaacctgaataagctgctgaccgattacaccgaaatgaagaaggcgatcctgcatgtgtactgggaagagttccagaaggaccctgtgggcctgatgagccgggtggcccagcctgccagcaagaagatcgatcagaacaagctgaaacctgagatggacgagaagggcaacctgaccaccgccggctttgcctgctctcagtgtggccagcccctgttcgtgtacaagctggagcaggtgtctgagaagggcaaggcttacaccaactacttcggacggtgcaatgtggccgagcacgaaaagctgatcctgctggcccagctgaagcccgagaaggatagcgacgaagccgtgacatatagcctgggaaagtttgggcagagggccctggatttctacagcattcatgtgaccaaggagtccacccaccccgtgaagcccctggcccagatcgccggaaacagatacgcctccggacctgtgggaaaggccctgagcgacgcatgtatgggcacaatcgcctccttcctgtctaagtaccaggacatcatcatcgaacaccagaaggtggtgaagggcaaccagaagagactggagagcctgcgggagctggccggcaaggaaaacctggaataccctagcgtgaccctgccacctcagcctcacaccaaggagggcgttgatgcctacaacgaagtgatcgcccgggtgcgaatgtgggtgaacctgaacctgtggcagaagctgaagctaagcagagatgatgccaagcctctgctgagactgaagggattcccttcctttcctctggtcgagagacaggccaacgaagtggactggtgggacatggtgtgtaacgtgaagaagctgatcaacgagaaaaaggaggatggcaaggtgttttggcagaatctggctggctacaagagacaggaagccctgagaccatacctgagcagcgaggaagatcggaagaagggaaagaaattcgctcggtaccagctgggcgacctgctgctgcacctggaaaagaagcacggcgaggactggggaaaggtgtacgacgaggcctgggagcggattgacaagaaagtggaaggcctgagcaagcacatcaagctggaagaggaacggagaagcgaggacgcccagagcaaggccgccctgaccgactggctgcgggctaaggccagcttcgtgatcgagggcctgaaggaggccgacaaggacgagttctgcagatgcgagctgaagctgcagaagtggtacggggacctgcggggaaagcccttcgccatcgaagccgagaacagcatcctggacatcagcggcttcagcaagcagtacaactgtgccttcatctggcagaaggacggcgtgaagaagctgaacctgtacctgatcatcaactacttcaagggcggcaagctgcggttcaagaagatcaaacctgaagccttcgaagccaacagattctacaccgtgatcaacaaaaagagcggcgagatcgtgcccatggaggtgaacttcaacttcgacgaccccaacctgatcatcctgcctctggcctttggcaagagacagggcagagaattcatctggaacgacctgctgtccctggaaaccggcagcctgaagctggccaacggaagagtgatcgagaagacactgtacaacagaagaacccggcaggatgagcctgccctgttcgtggccctgaccttcgagcggcgggaggtcctggactcctccaatatcaaaccaatgaacctgatcggcgtggcaagaggcgaaaacatccccgccgtgatcgccctgaccgaccccgagggctgcccactgagccggtttaaggatagcctgggaaacccaacccacatcctgagaatcggcgagagctataaggagaagcagcggaccatccaggccaagaaggaggtggagcagcggagagccggcggctacagccggaagtacgccagcaaagccaagaatctggcagacgatatggtgagaaacaccgctagagatctgctgtactacgccgtgacccaggatgccatgctgatcttcgccaacctgagccggggcttcggccggcagggcaagcggaccttcatggccgagagacagtacacacggatggaggactggctgaccgccaagctggcctacgagggcctgagcaagacctacctgtccaagacactggcccagtacacctccaagacatgcagcaactgtgggtttaccatcaccagcgccgactacgacagggtgctggagaagctgaagaagacagcaacaggctggatgaccacaattaacggcaaggagctgaaggtggagggccagattacctactacaacagatacaagagacagaacgtagtcaaggacctgtccgtcgagctggatagactgagcgaagaatctgtgaacaacgacatctcctcctggacaaagggcagaagcggagaagctctgagcctcctgaagaaaagattctcccatagacccgtgcaggagaagttcgtgtgcctgaactgcggcttcgagacacacgcagccgagcaagccgccctgaacatcgccagatcctggctgttcctgcggagccaggagtacaagaaataccagacaaacaagacaaccggcaacaccgataagagagccttcgtcgagacctggcagtccttttaccggaagaagcttaaggaggtgtggaaacctgccgtgcggtctggcggatctggcggaggctccacaagcatggccctgaggagcgtgatgttcagcgacgtgagcatcgacttcagccccgaggagtgggagtacctggacctggagcagaaggacctgtacagggacgtgatgctggagaactacagcaacctggtgagcctggccggctgcttcatcagcaagcccgacgtgatcagcagcctggagcagggcaaggagccctggaaggtggtgaggaagggcaggaggcagtaccccgacctggagaccaccagccccaagaaaaagagaaaagtctaagctgccttctgcggggcttgccttctggccatgcccttcttctctcccttgcacctgtacctcttggtctttgaataaagcctgagtaggaaggctagcaaaaaaaaaaaaaaaaaaaaaaaaaaaaaaaaaaaaaaaaaaaaaaaaaaaaaaaaaaaaaaaaaaaaaaaaaaaaaaaa

SEQ ID NO: 2953 - RNA, 5419 nt, synthetic construct
  source 1..5419: mol_type = other RNA
aggaaataagagagaaaagaagagtaagaagaaatataagagccaccatggcccctaagaagaagcgtaaagtgagccgggtgaacggcagcggcagcggcggcggcatgaaccacgaccaggagttcgacccccctaaggtgtaccctcccgtccccgccgagaagagaaagcccatccgggtcctgagcctgttcgatggcatcgccaccggtctgctggtgctgaaggacctgggcatccaggtggataggtacattgcctccgaggtgtgcgaggactccatcaccgtgggaatggtgcgtcatcagggcaagatcatgtacgtgggcgacgtgcggagcgtgacacagaagcatatccaggagtggggccctttcgacctggtgatcggcggcagcccttgcaatgacctgagcatcgtgaacccagcccggaagggcctgtacgagggaaccggcagactgttcttcgagttttacagactgctgcacgacgcccggcctaaggaaggcgacgaccggcccttcttttggctgttcgagaatgtggtggccatgggagtcagcgacaagcgggatattagccggttcctggagagcaaccccgtgatgatcgatgccaaggaagtgagcgccgcccaccgggccagatacttctggggcaatctgcctggcatgaacagacccctggccagcaccgtgaacgacaagctggagctgcaggagtgcctggagcacggccggatcgccaagttcagcaaggtgagaaccatcaccacccgaagcaacagcatcaaacaaggcaaggaccagcactttcctgtgttcatgaacgagaaggaggacatcctgtggtgtaccgagatggagagagtgttcgggttcccagtccactacacagatgtcagcaacatgtctagactggccagacagagactgctgggaagaagctggtccgtccctgtgatcagacacctgttcgcccctctgaaggagtacttcgcctgcgtgagcagcggcaacagcaacgccaacagccggggccccagcttctctagcggcctggtgccactgtccctgagagggagccacatgggccccatggagatctacaaaaccgtgagcgcctggaagcggcagcctgtgcgcgtgctgagcctgtttcggaatatcgataaagtcctgaaaagcctgggattcctggagagcggctctggctccggcggtggcaccctgaagtacgtggaggatgtgacaaacgtggtcagacgggatgtggagaagtggggccccttcgatctggtgtacggcagcacccaacccctgggcagctcttgtgaccggtgccctggctggtacatgtttcagttccaccggatcctgcagtacgccctgccgagacaggagtcccagcggccattcttttggattttcatggacaacttgctgctgaccgaggatgaccaggaaactaccactcggttcctgcagaccgaagccgtgaccctgcaggacgtgagaggccgggactaccagaacgccatgcgggtgtggtccaacatccctggactgaaaagcaagcacgcacctctgacccctaaagaagaggagtacctgcaggcccaggtgcggagcagaagcaagctggacgcccctaaggtggatctgctggtgaagaattgcctcctgcccctgagagagtacttcaagtatttcagccagaatagtctgcccctgggcggcccaagcagcggcgcccctcctcccagcggcggcagcccagccggctccccaacctctaccgaggagggcacctctgagtccgccacccccgagagcggccctggcacctccaccgagcccagcgagggcagcgcacccggcagccctgccggcagccccacctccacagaggagggaaccagcaccgagcccagcgaaggcagcgccccaggcaccagcaccgagcctagtgagggcggctctggcggcggcagcgcccaggagattaaacggatcaacaagatcagaagaagacttgtgaaagacagcaacaccaagaaggccggcaagacaggccccatgaaaaccctgctggttagagtgatgacacccgatctgagagagcggctggaaaacctgagaaagaagcctgaaaatatcccccagcccatcagcaatacatctagagccaacctgaataagctgctgaccgattacaccgaaatgaagaaggcgatcctgcatgtgtactgggaagagttccagaaggaccctgtgggcctgatgagccgggtggcccagcctgccagcaagaagatcgatcagaacaagctgaaacctgagatggacgagaagggcaacctgaccaccgccggctttgcctgctctcagtgtggccagcccctgttcgtgtacaagctggagcaggtgtctgagaagggcaaggcttacaccaactacttcggacggtgcaatgtggccgagcacgaaaagctgatcctgctggcccagctgaagcccgagaaggatagcgacgaagccgtgacatatagcctgggaaagtttgggcagagggccctggatttctacagcattcatgtgaccaaggagtccacccaccccgtgaagcccctggcccagatcgccggaaacagatacgcctccggacctgtgggaaaggccctgagcgacgcatgtatgggcacaatcgcctccttcctgtctaagtaccaggacatcatcatcgaacaccagaaggtggtgaagggcaaccagaagagactggagagcctgcgggagctggccggcaaggaaaacctggaataccctagcgtgaccctgccacctcagcctcacaccaaggagggcgttgatgcctacaacgaagtgatcgcccgggtgcgaatgtgggtgaacctgaacctgtggcagaagctgaagctaagcagagatgatgccaagcctctgctgagactgaagggattcccttcctttcctctggtcgagagacaggccaacgaagtggactggtgggacatggtgtgtaacgtgaagaagctgatcaacgagaaaaaggaggatggcaaggtgttttggcagaatctggctggctacaagagacaggaagccctgagaccatacctgagcagcgaggaagatcggaagaagggaaagaaattcgctcggtaccagctgggcgacctgctgctgcacctggaaaagaagcacggcgaggactggggaaaggtgtacgacgaggcctgggagcggattgacaagaaagtggaaggcctgagcaagcacatcaagctggaagaggaacggagaagcgaggacgcccagagcaaggccgccctgaccgactggctgcgggctaaggccagcttcgtgatcgagggcctgaaggaggccgacaaggacgagttctgcagatgcgagctgaagctgcagaagtggtacggggacctgcggggaaagcccttcgccatcgaagccgagaacagcatcctggacatcagcggcttcagcaagcagtacaactgtgccttcatctggcagaaggacggcgtgaagaagctgaacctgtacctgatcatcaactacttcaagggcggcaagctgcggttcaagaagatcaaacctgaagccttcgaagccaacagattctacaccgtgatcaacaaaaagagcggcgagatcgtgcccatggaggtgaacttcaacttcgacgaccccaacctgatcatcctgcctctggcctttggcaagagacagggcagagaattcatctggaacgacctgctgtccctggaaaccggcagcctgaagctggccaacggaagagtgatcgagaagacactgtacaacagaagaacccggcaggatgagcctgccctgttcgtggccctgaccttcgagcggcgggaggtcctggactcctccaatatcaaaccaatgaacctgatcggcgtggcaagaggcgaaaacatccccgccgtgatcgccctgaccgaccccgagggctgcccactgagccggtttaaggatagcctgggaaacccaacccacatcctgagaatcggcgagagctataaggagaagcagcggaccatccaggccaagaaggaggtggagcagcggagagccggcggctacagccggaagtacgccagcaaagccaagaatctggcagacgatatggtgagaaacaccgctagagatctgctgtactacgccgtgacccaggatgccatgctgatcttcgccaacctgagccggggcttcggccggcagggcaagcggaccttcatggccgagagacagtacacacggatggaggactggctgaccgccaagctggcctacgagggcctgagcaagacctacctgtccaagacactggcccagtacacctccaagacatgcagcaactgtgggtttaccatcaccagcgccgactacgacagggtgctggagaagctgaagaagacagcaacaggctggatgaccacaattaacggcaaggagctgaaggtggagggccagattacctactacaacagatacaagagacagaacgtagtcaaggacctgtccgtcgagctggatagactgagcgaagaatctgtgaacaacgacatctcctcctggacaaagggcagaagcggagaagctctgagcctcctgaagaaaagattctcccatagacccgtgcaggagaagttcgtgtgcctgaactgcggcttcgagacacacgcagccgagcaagccgccctgaacatcgccagatcctggctgttcctgcggagccaggagtacaagaaataccagacaaacaagacaaccggcaacaccgataagagagccttcgtcgagacctggcagtccttttaccggaagaagcttaaggaggtgtggaaacctgccgtgcggtctggcggatctggcggaggctccacaagcggccaggaggaggtggccttcaaggacgtggccgtggacttcaccagggaggagtggaggctgctgagccccccccagaaggagctgtacaaggaggtgatgctggagaacatcaggaacctgctgagcgtgggcctgcccgccccccccgaggacatgatcagctacctggagcagagggaggccccctggatgctggagcaggagggcctgaggagctacagccccggcgaggagatcaggaccagccccaagaaaaagagaaaagtctaagctgccttctgcggggcttgccttctggccatgcccttcttctctcccttgcacctgtacctcttggtctttgaataaagcctgagtaggaaggctagcaaaaaaaaaaaaaaaaaaaaaaaaaaaaaaaaaaaaaaaaaaaaaaaaaaaaaaaaaaaaaaaaaaaaaaaaaaaaaaaa

SEQ ID NO: 2954 - RNA, 5419 nt, synthetic construct
  source 1..5419: mol_type = other RNA
aggaaataagagagaaaagaagagtaagaagaaatataagagccaccatggcccctaagaagaagcgtaaagtgagccgggtgaacggcagcggcagcggcggcggcatgaaccacgaccaggagttcgacccccctaaggtgtaccctcccgtccccgccgagaagagaaagcccatccgggtcctgagcctgttcgatggcatcgccaccggtctgctggtgctgaaggacctgggcatccaggtggataggtacattgcctccgaggtgtgcgaggactccatcaccgtgggaatggtgcgtcatcagggcaagatcatgtacgtgggcgacgtgcggagcgtgacacagaagcatatccaggagtggggccctttcgacctggtgatcggcggcagcccttgcaatgacctgagcatcgtgaacccagcccggaagggcctgtacgagggaaccggcagactgttcttcgagttttacagactgctgcacgacgcccggcctaaggaaggcgacgaccggcccttcttttggctgttcgagaatgtggtggccatgggagtcagcgacaagcgggatattagccggttcctggagagcaaccccgtgatgatcgatgccaaggaagtgagcgccgcccaccgggccagatacttctggggcaatctgcctggcatgaacagacccctggccagcaccgtgaacgacaagctggagctgcaggagtgcctggagcacggccggatcgccaagttcagcaaggtgagaaccatcaccacccgaagcaacagcatcaaacaaggcaaggaccagcactttcctgtgttcatgaacgagaaggaggacatcctgtggtgtaccgagatggagagagtgttcgggttcccagtccactacacagatgtcagcaacatgtctagactggccagacagagactgctgggaagaagctggtccgtccctgtgatcagacacctgttcgcccctctgaaggagtacttcgcctgcgtgagcagcggcaacagcaacgccaacagccggggccccagcttctctagcggcctggtgccactgtccctgagagggagccacatgggccccatggagatctacaaaaccgtgagcgcctggaagcggcagcctgtgcgcgtgctgagcctgtttcggaatatcgataaagtcctgaaaagcctgggattcctggagagcggctctggctccggcggtggcaccctgaagtacgtggaggatgtgacaaacgtggtcagacgggatgtggagaagtggggccccttcgatctggtgtacggcagcacccaacccctgggcagctcttgtgaccggtgccctggctggtacatgtttcagttccaccggatcctgcagtacgccctgccgagacaggagtcccagcggccattcttttggattttcatggacaacttgctgctgaccgaggatgaccaggaaactaccactcggttcctgcagaccgaagccgtgaccctgcaggacgtgagaggccgggactaccagaacgccatgcgggtgtggtccaacatccctggactgaaaagcaagcacgcacctctgacccctaaagaagaggagtacctgcaggcccaggtgcggagcagaagcaagctggacgcccctaaggtggatctgctggtgaagaattgcctcctgcccctgagagagtacttcaagtatttcagccagaatagtctgcccctgggcggcccaagcagcggcgcccctcctcccagcggcggcagcccagccggctccccaacctctaccgaggagggcacctctgagtccgccacccccgagagcggccctggcacctccaccgagcccagcgagggcagcgcacccggcagccctgccggcagccccacctccacagaggagggaaccagcaccgagcccagcgaaggcagcgccccaggcaccagcaccgagcctagtgagggcggctctggcggcggcagcgcccaggagattaaacggatcaacaagatcagaagaagacttgtgaaagacagcaacaccaagaaggccggcaagacaggccccatgaaaaccctgctggttagagtgatgacacccgatctgagagagcggctggaaaacctgagaaagaagcctgaaaatatcccccagcccatcagcaatacatctagagccaacctgaataagctgctgaccgattacaccgaaatgaagaaggcgatcctgcatgtgtactgggaagagttccagaaggaccctgtgggcctgatgagccgggtggcccagcctgccagcaagaagatcgatcagaacaagctgaaacctgagatggacgagaagggcaacctgaccaccgccggctttgcctgctctcagtgtggccagcccctgttcgtgtacaagctggagcaggtgtctgagaagggcaaggcttacaccaactacttcggacggtgcaatgtggccgagcacgaaaagctgatcctgctggcccagctgaagcccgagaaggatagcgacgaagccgtgacatatagcctgggaaagtttgggcagagggccctggatttctacagcattcatgtgaccaaggagtccacccaccccgtgaagcccctggcccagatcgccggaaacagatacgcctccggacctgtgggaaaggccctgagcgacgcatgtatgggcacaatcgcctccttcctgtctaagtaccaggacatcatcatcgaacaccagaaggtggtgaagggcaaccagaagagactggagagcctgcgggagctggccggcaaggaaaacctggaataccctagcgtgaccctgccacctcagcctcacaccaaggagggcgttgatgcctacaacgaagtgatcgcccgggtgcgaatgtgggtgaacctgaacctgtggcagaagctgaagctaagcagagatgatgccaagcctctgctgagactgaagggattcccttcctttcctctggtcgagagacaggccaacgaagtggactggtgggacatggtgtgtaacgtgaagaagctgatcaacgagaaaaaggaggatggcaaggtgttttggcagaatctggctggctacaagagacaggaagccctgagaccatacctgagcagcgaggaagatcggaagaagggaaagaaattcgctcggtaccagctgggcgacctgctgctgcacctggaaaagaagcacggcgaggactggggaaaggtgtacgacgaggcctgggagcggattgacaagaaagtggaaggcctgagcaagcacatcaagctggaagaggaacggagaagcgaggacgcccagagcaaggccgccctgaccgactggctgcgggctaaggccagcttcgtgatcgagggcctgaaggaggccgacaaggacgagttctgcagatgcgagctgaagctgcagaagtggtacggggacctgcggggaaagcccttcgccatcgaagccgagaacagcatcctggacatcagcggcttcagcaagcagtacaactgtgccttcatctggcagaaggacggcgtgaagaagctgaacctgtacctgatcatcaactacttcaagggcggcaagctgcggttcaagaagatcaaacctgaagccttcgaagccaacagattctacaccgtgatcaacaaaaagagcggcgagatcgtgcccatggaggtgaacttcaacttcgacgaccccaacctgatcatcctgcctctggcctttggcaagagacagggcagagaattcatctggaacgacctgctgtccctggaaaccggcagcctgaagctggccaacggaagagtgatcgagaagacactgtacaacagaagaacccggcaggatgagcctgccctgttcgtggccctgaccttcgagcggcgggaggtcctggactcctccaatatcaaaccaatgaacctgatcggcgtggcaagaggcgaaaacatccccgccgtgatcgccctgaccgaccccgagggctgcccactgagccggtttaaggatagcctgggaaacccaacccacatcctgagaatcggcgagagctataaggagaagcagcggaccatccaggccaagaaggaggtggagcagcggagagccggcggctacagccggaagtacgccagcaaagccaagaatctggcagacgatatggtgagaaacaccgctagagatctgctgtactacgccgtgacccaggatgccatgctgatcttcgccaacctgagccggggcttcggccggcagggcaagcggaccttcatggccgagagacagtacacacggatggaggactggctgaccgccaagctggcctacgagggcctgagcaagacctacctgtccaagacactggcccagtacacctccaagacatgcagcaactgtgggtttaccatcaccagcgccgactacgacagggtgctggagaagctgaagaagacagcaacaggctggatgaccacaattaacggcaaggagctgaaggtggagggccagattacctactacaacagatacaagagacagaacgtagtcaaggacctgtccgtcgagctggatagactgagcgaagaatctgtgaacaacgacatctcctcctggacaaagggcagaagcggagaagctctgagcctcctgaagaaaagattctcccatagacccgtgcaggagaagttcgtgtgcctgaactgcggcttcgagacacacgcagccgagcaagccgccctgaacatcgccagatcctggctgttcctgcggagccaggagtacaagaaataccagacaaacaagacaaccggcaacaccgataagagagccttcgtcgagacctggcagtccttttaccggaagaagcttaaggaggtgtggaaacctgccgtgcggtctggcggatctggcggaggctccacaagcagccagggcagcgtgaccttcagggacgtggccatcgacttcagccaggaggagtgggagtggctgcagcccacccagagggacctgtacaggcacgtgatgctggagaactacagccacctggtgagcctgggcctgaacatcagcaagccctacgtggtgagcctgctggagcagggcaaggagccctggctggagaagaggggcgtgaggaggaacctgttcagcgagcccaacagggagaccagccccaagaaaaagagaaaagtctaagctgccttctgcggggcttgccttctggccatgcccttcttctctcccttgcacctgtacctcttggtctttgaataaagcctgagtaggaaggctagcaaaaaaaaaaaaaaaaaaaaaaaaaaaaaaaaaaaaaaaaaaaaaaaaaaaaaaaaaaaaaaaaaaaaaaaaaaaaaaaa

SEQ ID NO: 2955 - RNA, 5419 nt, synthetic construct
  source 1..5419: mol_type = other RNA
aggaaataagagagaaaagaagagtaagaagaaatataagagccaccatggcccctaagaagaagcgtaaagtgagccgggtgaacggcagcggcagcggcggcggcatgaaccacgaccaggagttcgacccccctaaggtgtaccctcccgtccccgccgagaagagaaagcccatccgggtcctgagcctgttcgatggcatcgccaccggtctgctggtgctgaaggacctgggcatccaggtggataggtacattgcctccgaggtgtgcgaggactccatcaccgtgggaatggtgcgtcatcagggcaagatcatgtacgtgggcgacgtgcggagcgtgacacagaagcatatccaggagtggggccctttcgacctggtgatcggcggcagcccttgcaatgacctgagcatcgtgaacccagcccggaagggcctgtacgagggaaccggcagactgttcttcgagttttacagactgctgcacgacgcccggcctaaggaaggcgacgaccggcccttcttttggctgttcgagaatgtggtggccatgggagtcagcgacaagcgggatattagccggttcctggagagcaaccccgtgatgatcgatgccaaggaagtgagcgccgcccaccgggccagatacttctggggcaatctgcctggcatgaacagacccctggccagcaccgtgaacgacaagctggagctgcaggagtgcctggagcacggccggatcgccaagttcagcaaggtgagaaccatcaccacccgaagcaacagcatcaaacaaggcaaggaccagcactttcctgtgttcatgaacgagaaggaggacatcctgtggtgtaccgagatggagagagtgttcgggttcccagtccactacacagatgtcagcaacatgtctagactggccagacagagactgctgggaagaagctggtccgtccctgtgatcagacacctgttcgcccctctgaaggagtacttcgcctgcgtgagcagcggcaacagcaacgccaacagccggggccccagcttctctagcggcctggtgccactgtccctgagagggagccacatgggccccatggagatctacaaaaccgtgagcgcctggaagcggcagcctgtgcgcgtgctgagcctgtttcggaatatcgataaagtcctgaaaagcctgggattcctggagagcggctctggctccggcggtggcaccctgaagtacgtggaggatgtgacaaacgtggtcagacgggatgtggagaagtggggccccttcgatctggtgtacggcagcacccaacccctgggcagctcttgtgaccggtgccctggctggtacatgtttcagttccaccggatcctgcagtacgccctgccgagacaggagtcccagcggccattcttttggattttcatggacaacttgctgctgaccgaggatgaccaggaaactaccactcggttcctgcagaccgaagccgtgaccctgcaggacgtgagaggccgggactaccagaacgccatgcgggtgtggtccaacatccctggactgaaaagcaagcacgcacctctgacccctaaagaagaggagtacctgcaggcccaggtgcggagcagaagcaagctggacgcccctaaggtggatctgctggtgaagaattgcctcctgcccctgagagagtacttcaagtatttcagccagaatagtctgcccctgggcggcccaagcagcggcgcccctcctcccagcggcggcagcccagccggctccccaacctctaccgaggagggcacctctgagtccgccacccccgagagcggccctggcacctccaccgagcccagcgagggcagcgcacccggcagccctgccggcagccccacctccacagaggagggaaccagcaccgagcccagcgaaggcagcgccccaggcaccagcaccgagcctagtgagggcggctctggcggcggcagcgcccaggagattaaacggatcaacaagatcagaagaagacttgtgaaagacagcaacaccaagaaggccggcaagacaggccccatgaaaaccctgctggttagagtgatgacacccgatctgagagagcggctggaaaacctgagaaagaagcctgaaaatatcccccagcccatcagcaatacatctagagccaacctgaataagctgctgaccgattacaccgaaatgaagaaggcgatcctgcatgtgtactgggaagagttccagaaggaccctgtgggcctgatgagccgggtggcccagcctgccagcaagaagatcgatcagaacaagctgaaacctgagatggacgagaagggcaacctgaccaccgccggctttgcctgctctcagtgtggccagcccctgttcgtgtacaagctggagcaggtgtctgagaagggcaaggcttacaccaactacttcggacggtgcaatgtggccgagcacgaaaagctgatcctgctggcccagctgaagcccgagaaggatagcgacgaagccgtgacatatagcctgggaaagtttgggcagagggccctggatttctacagcattcatgtgaccaaggagtccacccaccccgtgaagcccctggcccagatcgccggaaacagatacgcctccggacctgtgggaaaggccctgagcgacgcatgtatgggcacaatcgcctccttcctgtctaagtaccaggacatcatcatcgaacaccagaaggtggtgaagggcaaccagaagagactggagagcctgcgggagctggccggcaaggaaaacctggaataccctagcgtgaccctgccacctcagcctcacaccaaggagggcgttgatgcctacaacgaagtgatcgcccgggtgcgaatgtgggtgaacctgaacctgtggcagaagctgaagctaagcagagatgatgccaagcctctgctgagactgaagggattcccttcctttcctctggtcgagagacaggccaacgaagtggactggtgggacatggtgtgtaacgtgaagaagctgatcaacgagaaaaaggaggatggcaaggtgttttggcagaatctggctggctacaagagacaggaagccctgagaccatacctgagcagcgaggaagatcggaagaagggaaagaaattcgctcggtaccagctgggcgacctgctgctgcacctggaaaagaagcacggcgaggactggggaaaggtgtacgacgaggcctgggagcggattgacaagaaagtggaaggcctgagcaagcacatcaagctggaagaggaacggagaagcgaggacgcccagagcaaggccgccctgaccgactggctgcgggctaaggccagcttcgtgatcgagggcctgaaggaggccgacaaggacgagttctgcagatgcgagctgaagctgcagaagtggtacggggacctgcggggaaagcccttcgccatcgaagccgagaacagcatcctggacatcagcggcttcagcaagcagtacaactgtgccttcatctggcagaaggacggcgtgaagaagctgaacctgtacctgatcatcaactacttcaagggcggcaagctgcggttcaagaagatcaaacctgaagccttcgaagccaacagattctacaccgtgatcaacaaaaagagcggcgagatcgtgcccatggaggtgaacttcaacttcgacgaccccaacctgatcatcctgcctctggcctttggcaagagacagggcagagaattcatctggaacgacctgctgtccctggaaaccggcagcctgaagctggccaacggaagagtgatcgagaagacactgtacaacagaagaacccggcaggatgagcctgccctgttcgtggccctgaccttcgagcggcgggaggtcctggactcctccaatatcaaaccaatgaacctgatcggcgtggcaagaggcgaaaacatccccgccgtgatcgccctgaccgaccccgagggctgcccactgagccggtttaaggatagcctgggaaacccaacccacatcctgagaatcggcgagagctataaggagaagcagcggaccatccaggccaagaaggaggtggagcagcggagagccggcggctacagccggaagtacgccagcaaagccaagaatctggcagacgatatggtgagaaacaccgctagagatctgctgtactacgccgtgacccaggatgccatgctgatcttcgccaacctgagccggggcttcggccggcagggcaagcggaccttcatggccgagagacagtacacacggatggaggactggctgaccgccaagctggcctacgagggcctgagcaagacctacctgtccaagacactggcccagtacacctccaagacatgcagcaactgtgggtttaccatcaccagcgccgactacgacagggtgctggagaagctgaagaagacagcaacaggctggatgaccacaattaacggcaaggagctgaaggtggagggccagattacctactacaacagatacaagagacagaacgtagtcaaggacctgtccgtcgagctggatagactgagcgaagaatctgtgaacaacgacatctcctcctggacaaagggcagaagcggagaagctctgagcctcctgaagaaaagattctcccatagacccgtgcaggagaagttcgtgtgcctgaactgcggcttcgagacacacgcagccgagcaagccgccctgaacatcgccagatcctggctgttcctgcggagccaggagtacaagaaataccagacaaacaagacaaccggcaacaccgataagagagccttcgtcgagacctggcagtccttttaccggaagaagcttaaggaggtgtggaaacctgccgtgcggtctggcggatctggcggaggctccacaagcctgcaggaggccatcgtgttcgaggacgtggccgtgtacttcaccaggatcgagtggagctgcctggccccccaccagagggccctgtacagggacgtgatgctggagaactacggccacatggccagcctgggcttcctggtggccaagcccgccctgatcagcctgctggagcagggcgaggagcccggcgccctgatcctgcagggcaccgaggagcagggcagcaccgccagcctgtgcaccagccccaagaaaaagagaaaagtctaagctgccttctgcggggcttgccttctggccatgcccttcttctctcccttgcacctgtacctcttggtctttgaataaagcctgagtaggaaggctagcaaaaaaaaaaaaaaaaaaaaaaaaaaaaaaaaaaaaaaaaaaaaaaaaaaaaaaaaaaaaaaaaaaaaaaaaaaaaaaaa

SEQ ID NO: 2956 - RNA, 5419 nt, synthetic construct
  source 1..5419: mol_type = other RNA
aggaaataagagagaaaagaagagtaagaagaaatataagagccaccatggcccctaagaagaagcgtaaagtgagccgggtgaacggcagcggcagcggcggcggcatgaaccacgaccaggagttcgacccccctaaggtgtaccctcccgtccccgccgagaagagaaagcccatccgggtcctgagcctgttcgatggcatcgccaccggtctgctggtgctgaaggacctgggcatccaggtggataggtacattgcctccgaggtgtgcgaggactccatcaccgtgggaatggtgcgtcatcagggcaagatcatgtacgtgggcgacgtgcggagcgtgacacagaagcatatccaggagtggggccctttcgacctggtgatcggcggcagcccttgcaatgacctgagcatcgtgaacccagcccggaagggcctgtacgagggaaccggcagactgttcttcgagttttacagactgctgcacgacgcccggcctaaggaaggcgacgaccggcccttcttttggctgttcgagaatgtggtggccatgggagtcagcgacaagcgggatattagccggttcctggagagcaaccccgtgatgatcgatgccaaggaagtgagcgccgcccaccgggccagatacttctggggcaatctgcctggcatgaacagacccctggccagcaccgtgaacgacaagctggagctgcaggagtgcctggagcacggccggatcgccaagttcagcaaggtgagaaccatcaccacccgaagcaacagcatcaaacaaggcaaggaccagcactttcctgtgttcatgaacgagaaggaggacatcctgtggtgtaccgagatggagagagtgttcgggttcccagtccactacacagatgtcagcaacatgtctagactggccagacagagactgctgggaagaagctggtccgtccctgtgatcagacacctgttcgcccctctgaaggagtacttcgcctgcgtgagcagcggcaacagcaacgccaacagccggggccccagcttctctagcggcctggtgccactgtccctgagagggagccacatgggccccatggagatctacaaaaccgtgagcgcctggaagcggcagcctgtgcgcgtgctgagcctgtttcggaatatcgataaagtcctgaaaagcctgggattcctggagagcggctctggctccggcggtggcaccctgaagtacgtggaggatgtgacaaacgtggtcagacgggatgtggagaagtggggccccttcgatctggtgtacggcagcacccaacccctgggcagctcttgtgaccggtgccctggctggtacatgtttcagttccaccggatcctgcagtacgccctgccgagacaggagtcccagcggccattcttttggattttcatggacaacttgctgctgaccgaggatgaccaggaaactaccactcggttcctgcagaccgaagccgtgaccctgcaggacgtgagaggccgggactaccagaacgccatgcgggtgtggtccaacatccctggactgaaaagcaagcacgcacctctgacccctaaagaagaggagtacctgcaggcccaggtgcggagcagaagcaagctggacgcccctaaggtggatctgctggtgaagaattgcctcctgcccctgagagagtacttcaagtatttcagccagaatagtctgcccctgggcggcccaagcagcggcgcccctcctcccagcggcggcagcccagccggctccccaacctctaccgaggagggcacctctgagtccgccacccccgagagcggccctggcacctccaccgagcccagcgagggcagcgcacccggcagccctgccggcagccccacctccacagaggagggaaccagcaccgagcccagcgaaggcagcgccccaggcaccagcaccgagcctagtgagggcggctctggcggcggcagcgcccaggagattaaacggatcaacaagatcagaagaagacttgtgaaagacagcaacaccaagaaggccggcaagacaggccccatgaaaaccctgctggttagagtgatgacacccgatctgagagagcggctggaaaacctgagaaagaagcctgaaaatatcccccagcccatcagcaatacatctagagccaacctgaataagctgctgaccgattacaccgaaatgaagaaggcgatcctgcatgtgtactgggaagagttccagaaggaccctgtgggcctgatgagccgggtggcccagcctgccagcaagaagatcgatcagaacaagctgaaacctgagatggacgagaagggcaacctgaccaccgccggctttgcctgctctcagtgtggccagcccctgttcgtgtacaagctggagcaggtgtctgagaagggcaaggcttacaccaactacttcggacggtgcaatgtggccgagcacgaaaagctgatcctgctggcccagctgaagcccgagaaggatagcgacgaagccgtgacatatagcctgggaaagtttgggcagagggccctggatttctacagcattcatgtgaccaaggagtccacccaccccgtgaagcccctggcccagatcgccggaaacagatacgcctccggacctgtgggaaaggccctgagcgacgcatgtatgggcacaatcgcctccttcctgtctaagtaccaggacatcatcatcgaacaccagaaggtggtgaagggcaaccagaagagactggagagcctgcgggagctggccggcaaggaaaacctggaataccctagcgtgaccctgccacctcagcctcacaccaaggagggcgttgatgcctacaacgaagtgatcgcccgggtgcgaatgtgggtgaacctgaacctgtggcagaagctgaagctaagcagagatgatgccaagcctctgctgagactgaagggattcccttcctttcctctggtcgagagacaggccaacgaagtggactggtgggacatggtgtgtaacgtgaagaagctgatcaacgagaaaaaggaggatggcaaggtgttttggcagaatctggctggctacaagagacaggaagccctgagaccatacctgagcagcgaggaagatcggaagaagggaaagaaattcgctcggtaccagctgggcgacctgctgctgcacctggaaaagaagcacggcgaggactggggaaaggtgtacgacgaggcctgggagcggattgacaagaaagtggaaggcctgagcaagcacatcaagctggaagaggaacggagaagcgaggacgcccagagcaaggccgccctgaccgactggctgcgggctaaggccagcttcgtgatcgagggcctgaaggaggccgacaaggacgagttctgcagatgcgagctgaagctgcagaagtggtacggggacctgcggggaaagcccttcgccatcgaagccgagaacagcatcctggacatcagcggcttcagcaagcagtacaactgtgccttcatctggcagaaggacggcgtgaagaagctgaacctgtacctgatcatcaactacttcaagggcggcaagctgcggttcaagaagatcaaacctgaagccttcgaagccaacagattctacaccgtgatcaacaaaaagagcggcgagatcgtgcccatggaggtgaacttcaacttcgacgaccccaacctgatcatcctgcctctggcctttggcaagagacagggcagagaattcatctggaacgacctgctgtccctggaaaccggcagcctgaagctggccaacggaagagtgatcgagaagacactgtacaacagaagaacccggcaggatgagcctgccctgttcgtggccctgaccttcgagcggcgggaggtcctggactcctccaatatcaaaccaatgaacctgatcggcgtggcaagaggcgaaaacatccccgccgtgatcgccctgaccgaccccgagggctgcccactgagccggtttaaggatagcctgggaaacccaacccacatcctgagaatcggcgagagctataaggagaagcagcggaccatccaggccaagaaggaggtggagcagcggagagccggcggctacagccggaagtacgccagcaaagccaagaatctggcagacgatatggtgagaaacaccgctagagatctgctgtactacgccgtgacccaggatgccatgctgatcttcgccaacctgagccggggcttcggccggcagggcaagcggaccttcatggccgagagacagtacacacggatggaggactggctgaccgccaagctggcctacgagggcctgagcaagacctacctgtccaagacactggcccagtacacctccaagacatgcagcaactgtgggtttaccatcaccagcgccgactacgacagggtgctggagaagctgaagaagacagcaacaggctggatgaccacaattaacggcaaggagctgaaggtggagggccagattacctactacaacagatacaagagacagaacgtagtcaaggacctgtccgtcgagctggatagactgagcgaagaatctgtgaacaacgacatctcctcctggacaaagggcagaagcggagaagctctgagcctcctgaagaaaagattctcccatagacccgtgcaggagaagttcgtgtgcctgaactgcggcttcgagacacacgcagccgagcaagccgccctgaacatcgccagatcctggctgttcctgcggagccaggagtacaagaaataccagacaaacaagacaaccggcaacaccgataagagagccttcgtcgagacctggcagtccttttaccggaagaagcttaaggaggtgtggaaacctgccgtgcggtctggcggatctggcggaggctccacaagcatgctgaccttcagggacgtgttcatcgagttcagccaggaggagtgggagtgcctggaccccgcccagaggaagctgtacatggacgtgatgctggagagctacaggaacctggtgagcctgggccacagcatcagcaagcccgacgtgatcaccctgctggagcagggcaaggacccctgcatggtggtgagggaggagaccaggaggtggtgcaccggcaagaacaagagcggcaggaggaccagccccaagaaaaagagaaaagtctaagctgccttctgcggggcttgccttctggccatgcccttcttctctcccttgcacctgtacctcttggtctttgaataaagcctgagtaggaaggctagcaaaaaaaaaaaaaaaaaaaaaaaaaaaaaaaaaaaaaaaaaaaaaaaaaaaaaaaaaaaaaaaaaaaaaaaaaaaaaaaa

SEQ ID NO: 2957 - RNA, 5419 nt, synthetic construct
  source 1..5419: mol_type = other RNA
aggaaataagagagaaaagaagagtaagaagaaatataagagccaccatggcccctaagaagaagcgtaaagtgagccgggtgaacggcagcggcagcggcggcggcatgaaccacgaccaggagttcgacccccctaaggtgtaccctcccgtccccgccgagaagagaaagcccatccgggtcctgagcctgttcgatggcatcgccaccggtctgctggtgctgaaggacctgggcatccaggtggataggtacattgcctccgaggtgtgcgaggactccatcaccgtgggaatggtgcgtcatcagggcaagatcatgtacgtgggcgacgtgcggagcgtgacacagaagcatatccaggagtggggccctttcgacctggtgatcggcggcagcccttgcaatgacctgagcatcgtgaacccagcccggaagggcctgtacgagggaaccggcagactgttcttcgagttttacagactgctgcacgacgcccggcctaaggaaggcgacgaccggcccttcttttggctgttcgagaatgtggtggccatgggagtcagcgacaagcgggatattagccggttcctggagagcaaccccgtgatgatcgatgccaaggaagtgagcgccgcccaccgggccagatacttctggggcaatctgcctggcatgaacagacccctggccagcaccgtgaacgacaagctggagctgcaggagtgcctggagcacggccggatcgccaagttcagcaaggtgagaaccatcaccacccgaagcaacagcatcaaacaaggcaaggaccagcactttcctgtgttcatgaacgagaaggaggacatcctgtggtgtaccgagatggagagagtgttcgggttcccagtccactacacagatgtcagcaacatgtctagactggccagacagagactgctgggaagaagctggtccgtccctgtgatcagacacctgttcgcccctctgaaggagtacttcgcctgcgtgagcagcggcaacagcaacgccaacagccggggccccagcttctctagcggcctggtgccactgtccctgagagggagccacatgggccccatggagatctacaaaaccgtgagcgcctggaagcggcagcctgtgcgcgtgctgagcctgtttcggaatatcgataaagtcctgaaaagcctgggattcctggagagcggctctggctccggcggtggcaccctgaagtacgtggaggatgtgacaaacgtggtcagacgggatgtggagaagtggggccccttcgatctggtgtacggcagcacccaacccctgggcagctcttgtgaccggtgccctggctggtacatgtttcagttccaccggatcctgcagtacgccctgccgagacaggagtcccagcggccattcttttggattttcatggacaacttgctgctgaccgaggatgaccaggaaactaccactcggttcctgcagaccgaagccgtgaccctgcaggacgtgagaggccgggactaccagaacgccatgcgggtgtggtccaacatccctggactgaaaagcaagcacgcacctctgacccctaaagaagaggagtacctgcaggcccaggtgcggagcagaagcaagctggacgcccctaaggtggatctgctggtgaagaattgcctcctgcccctgagagagtacttcaagtatttcagccagaatagtctgcccctgggcggcccaagcagcggcgcccctcctcccagcggcggcagcccagccggctccccaacctctaccgaggagggcacctctgagtccgccacccccgagagcggccctggcacctccaccgagcccagcgagggcagcgcacccggcagccctgccggcagccccacctccacagaggagggaaccagcaccgagcccagcgaaggcagcgccccaggcaccagcaccgagcctagtgagggcggctctggcggcggcagcgcccaggagattaaacggatcaacaagatcagaagaagacttgtgaaagacagcaacaccaagaaggccggcaagacaggccccatgaaaaccctgctggttagagtgatgacacccgatctgagagagcggctggaaaacctgagaaagaagcctgaaaatatcccccagcccatcagcaatacatctagagccaacctgaataagctgctgaccgattacaccgaaatgaagaaggcgatcctgcatgtgtactgggaagagttccagaaggaccctgtgggcctgatgagccgggtggcccagcctgccagcaagaagatcgatcagaacaagctgaaacctgagatggacgagaagggcaacctgaccaccgccggctttgcctgctctcagtgtggccagcccctgttcgtgtacaagctggagcaggtgtctgagaagggcaaggcttacaccaactacttcggacggtgcaatgtggccgagcacgaaaagctgatcctgctggcccagctgaagcccgagaaggatagcgacgaagccgtgacatatagcctgggaaagtttgggcagagggccctggatttctacagcattcatgtgaccaaggagtccacccaccccgtgaagcccctggcccagatcgccggaaacagatacgcctccggacctgtgggaaaggccctgagcgacgcatgtatgggcacaatcgcctccttcctgtctaagtaccaggacatcatcatcgaacaccagaaggtggtgaagggcaaccagaagagactggagagcctgcgggagctggccggcaaggaaaacctggaataccctagcgtgaccctgccacctcagcctcacaccaaggagggcgttgatgcctacaacgaagtgatcgcccgggtgcgaatgtgggtgaacctgaacctgtggcagaagctgaagctaagcagagatgatgccaagcctctgctgagactgaagggattcccttcctttcctctggtcgagagacaggccaacgaagtggactggtgggacatggtgtgtaacgtgaagaagctgatcaacgagaaaaaggaggatggcaaggtgttttggcagaatctggctggctacaagagacaggaagccctgagaccatacctgagcagcgaggaagatcggaagaagggaaagaaattcgctcggtaccagctgggcgacctgctgctgcacctggaaaagaagcacggcgaggactggggaaaggtgtacgacgaggcctgggagcggattgacaagaaagtggaaggcctgagcaagcacatcaagctggaagaggaacggagaagcgaggacgcccagagcaaggccgccctgaccgactggctgcgggctaaggccagcttcgtgatcgagggcctgaaggaggccgacaaggacgagttctgcagatgcgagctgaagctgcagaagtggtacggggacctgcggggaaagcccttcgccatcgaagccgagaacagcatcctggacatcagcggcttcagcaagcagtacaactgtgccttcatctggcagaaggacggcgtgaagaagctgaacctgtacctgatcatcaactacttcaagggcggcaagctgcggttcaagaagatcaaacctgaagccttcgaagccaacagattctacaccgtgatcaacaaaaagagcggcgagatcgtgcccatggaggtgaacttcaacttcgacgaccccaacctgatcatcctgcctctggcctttggcaagagacagggcagagaattcatctggaacgacctgctgtccctggaaaccggcagcctgaagctggccaacggaagagtgatcgagaagacactgtacaacagaagaacccggcaggatgagcctgccctgttcgtggccctgaccttcgagcggcgggaggtcctggactcctccaatatcaaaccaatgaacctgatcggcgtggcaagaggcgaaaacatccccgccgtgatcgccctgaccgaccccgagggctgcccactgagccggtttaaggatagcctgggaaacccaacccacatcctgagaatcggcgagagctataaggagaagcagcggaccatccaggccaagaaggaggtggagcagcggagagccggcggctacagccggaagtacgccagcaaagccaagaatctggcagacgatatggtgagaaacaccgctagagatctgctgtactacgccgtgacccaggatgccatgctgatcttcgccaacctgagccggggcttcggccggcagggcaagcggaccttcatggccgagagacagtacacacggatggaggactggctgaccgccaagctggcctacgagggcctgagcaagacctacctgtccaagacactggcccagtacacctccaagacatgcagcaactgtgggtttaccatcaccagcgccgactacgacagggtgctggagaagctgaagaagacagcaacaggctggatgaccacaattaacggcaaggagctgaaggtggagggccagattacctactacaacagatacaagagacagaacgtagtcaaggacctgtccgtcgagctggatagactgagcgaagaatctgtgaacaacgacatctcctcctggacaaagggcagaagcggagaagctctgagcctcctgaagaaaagattctcccatagacccgtgcaggagaagttcgtgtgcctgaactgcggcttcgagacacacgcagccgagcaagccgccctgaacatcgccagatcctggctgttcctgcggagccaggagtacaagaaataccagacaaacaagacaaccggcaacaccgataagagagccttcgtcgagacctggcagtccttttaccggaagaagcttaaggaggtgtggaaacctgccgtgcggtctggcggatctggcggaggctccacaagcagcgtggccttcgaggacgtggccgtgaacttcacccaggaggagtggagcctgctggaccccagccagaagaacctgtacagggaggtgatgcaggagaccctgaggaacctggccagcatcggcaagaagtggaaggaccagaacatcgagaacgagtacaagaaccccaggagcaaccagaggggcctgatggaggagaggctgttcgagagcgagggccaccagcccggcgagatcctgaccagccccaagaaaaagagaaaagtctaagctgccttctgcggggcttgccttctggccatgcccttcttctctcccttgcacctgtacctcttggtctttgaataaagcctgagtaggaaggctagcaaaaaaaaaaaaaaaaaaaaaaaaaaaaaaaaaaaaaaaaaaaaaaaaaaaaaaaaaaaaaaaaaaaaaaaaaaaaaaaa

SEQ ID NO: 2958 - RNA, 5419 nt, synthetic construct
  source 1..5419: mol_type = other RNA
aggaaataagagagaaaagaagagtaagaagaaatataagagccaccatggcccctaagaagaagcgtaaagtgagccgggtgaacggcagcggcagcggcggcggcatgaaccacgaccaggagttcgacccccctaaggtgtaccctcccgtccccgccgagaagagaaagcccatccgggtcctgagcctgttcgatggcatcgccaccggtctgctggtgctgaaggacctgggcatccaggtggataggtacattgcctccgaggtgtgcgaggactccatcaccgtgggaatggtgcgtcatcagggcaagatcatgtacgtgggcgacgtgcggagcgtgacacagaagcatatccaggagtggggccctttcgacctggtgatcggcggcagcccttgcaatgacctgagcatcgtgaacccagcccggaagggcctgtacgagggaaccggcagactgttcttcgagttttacagactgctgcacgacgcccggcctaaggaaggcgacgaccggcccttcttttggctgttcgagaatgtggtggccatgggagtcagcgacaagcgggatattagccggttcctggagagcaaccccgtgatgatcgatgccaaggaagtgagcgccgcccaccgggccagatacttctggggcaatctgcctggcatgaacagacccctggccagcaccgtgaacgacaagctggagctgcaggagtgcctggagcacggccggatcgccaagttcagcaaggtgagaaccatcaccacccgaagcaacagcatcaaacaaggcaaggaccagcactttcctgtgttcatgaacgagaaggaggacatcctgtggtgtaccgagatggagagagtgttcgggttcccagtccactacacagatgtcagcaacatgtctagactggccagacagagactgctgggaagaagctggtccgtccctgtgatcagacacctgttcgcccctctgaaggagtacttcgcctgcgtgagcagcggcaacagcaacgccaacagccggggccccagcttctctagcggcctggtgccactgtccctgagagggagccacatgggccccatggagatctacaaaaccgtgagcgcctggaagcggcagcctgtgcgcgtgctgagcctgtttcggaatatcgataaagtcctgaaaagcctgggattcctggagagcggctctggctccggcggtggcaccctgaagtacgtggaggatgtgacaaacgtggtcagacgggatgtggagaagtggggccccttcgatctggtgtacggcagcacccaacccctgggcagctcttgtgaccggtgccctggctggtacatgtttcagttccaccggatcctgcagtacgccctgccgagacaggagtcccagcggccattcttttggattttcatggacaacttgctgctgaccgaggatgaccaggaaactaccactcggttcctgcagaccgaagccgtgaccctgcaggacgtgagaggccgggactaccagaacgccatgcgggtgtggtccaacatccctggactgaaaagcaagcacgcacctctgacccctaaagaagaggagtacctgcaggcccaggtgcggagcagaagcaagctggacgcccctaaggtggatctgctggtgaagaattgcctcctgcccctgagagagtacttcaagtatttcagccagaatagtctgcccctgggcggcccaagcagcggcgcccctcctcccagcggcggcagcccagccggctccccaacctctaccgaggagggcacctctgagtccgccacccccgagagcggccctggcacctccaccgagcccagcgagggcagcgcacccggcagccctgccggcagccccacctccacagaggagggaaccagcaccgagcccagcgaaggcagcgccccaggcaccagcaccgagcctagtgagggcggctctggcggcggcagcgcccaggagattaaacggatcaacaagatcagaagaagacttgtgaaagacagcaacaccaagaaggccggcaagacaggccccatgaaaaccctgctggttagagtgatgacacccgatctgagagagcggctggaaaacctgagaaagaagcctgaaaatatcccccagcccatcagcaatacatctagagccaacctgaataagctgctgaccgattacaccgaaatgaagaaggcgatcctgcatgtgtactgggaagagttccagaaggaccctgtgggcctgatgagccgggtggcccagcctgccagcaagaagatcgatcagaacaagctgaaacctgagatggacgagaagggcaacctgaccaccgccggctttgcctgctctcagtgtggccagcccctgttcgtgtacaagctggagcaggtgtctgagaagggcaaggcttacaccaactacttcggacggtgcaatgtggccgagcacgaaaagctgatcctgctggcccagctgaagcccgagaaggatagcgacgaagccgtgacatatagcctgggaaagtttgggcagagggccctggatttctacagcattcatgtgaccaaggagtccacccaccccgtgaagcccctggcccagatcgccggaaacagatacgcctccggacctgtgggaaaggccctgagcgacgcatgtatgggcacaatcgcctccttcctgtctaagtaccaggacatcatcatcgaacaccagaaggtggtgaagggcaaccagaagagactggagagcctgcgggagctggccggcaaggaaaacctggaataccctagcgtgaccctgccacctcagcctcacaccaaggagggcgttgatgcctacaacgaagtgatcgcccgggtgcgaatgtgggtgaacctgaacctgtggcagaagctgaagctaagcagagatgatgccaagcctctgctgagactgaagggattcccttcctttcctctggtcgagagacaggccaacgaagtggactggtgggacatggtgtgtaacgtgaagaagctgatcaacgagaaaaaggaggatggcaaggtgttttggcagaatctggctggctacaagagacaggaagccctgagaccatacctgagcagcgaggaagatcggaagaagggaaagaaattcgctcggtaccagctgggcgacctgctgctgcacctggaaaagaagcacggcgaggactggggaaaggtgtacgacgaggcctgggagcggattgacaagaaagtggaaggcctgagcaagcacatcaagctggaagaggaacggagaagcgaggacgcccagagcaaggccgccctgaccgactggctgcgggctaaggccagcttcgtgatcgagggcctgaaggaggccgacaaggacgagttctgcagatgcgagctgaagctgcagaagtggtacggggacctgcggggaaagcccttcgccatcgaagccgagaacagcatcctggacatcagcggcttcagcaagcagtacaactgtgccttcatctggcagaaggacggcgtgaagaagctgaacctgtacctgatcatcaactacttcaagggcggcaagctgcggttcaagaagatcaaacctgaagccttcgaagccaacagattctacaccgtgatcaacaaaaagagcggcgagatcgtgcccatggaggtgaacttcaacttcgacgaccccaacctgatcatcctgcctctggcctttggcaagagacagggcagagaattcatctggaacgacctgctgtccctggaaaccggcagcctgaagctggccaacggaagagtgatcgagaagacactgtacaacagaagaacccggcaggatgagcctgccctgttcgtggccctgaccttcgagcggcgggaggtcctggactcctccaatatcaaaccaatgaacctgatcggcgtggcaagaggcgaaaacatccccgccgtgatcgccctgaccgaccccgagggctgcccactgagccggtttaaggatagcctgggaaacccaacccacatcctgagaatcggcgagagctataaggagaagcagcggaccatccaggccaagaaggaggtggagcagcggagagccggcggctacagccggaagtacgccagcaaagccaagaatctggcagacgatatggtgagaaacaccgctagagatctgctgtactacgccgtgacccaggatgccatgctgatcttcgccaacctgagccggggcttcggccggcagggcaagcggaccttcatggccgagagacagtacacacggatggaggactggctgaccgccaagctggcctacgagggcctgagcaagacctacctgtccaagacactggcccagtacacctccaagacatgcagcaactgtgggtttaccatcaccagcgccgactacgacagggtgctggagaagctgaagaagacagcaacaggctggatgaccacaattaacggcaaggagctgaaggtggagggccagattacctactacaacagatacaagagacagaacgtagtcaaggacctgtccgtcgagctggatagactgagcgaagaatctgtgaacaacgacatctcctcctggacaaagggcagaagcggagaagctctgagcctcctgaagaaaagattctcccatagacccgtgcaggagaagttcgtgtgcctgaactgcggcttcgagacacacgcagccgagcaagccgccctgaacatcgccagatcctggctgttcctgcggagccaggagtacaagaaataccagacaaacaagacaaccggcaacaccgataagagagccttcgtcgagacctggcagtccttttaccggaagaagcttaaggaggtgtggaaacctgccgtgcggtctggcggatctggcggaggctccacaagcccccaggagagcgtgaccttcgaggacgtggccgtgaacttcagctacgaggagtggcagtgcctgacccacgcccagaggcacctgtacaccgacgtgatgctggagaactacggcaacatggtgagcctgggcttcagcttcagcaagccccccctgatcagcaggctggagcagggcaccgagccctacgtgcaggacaggcaggactgggagttcctgaactgcagctaccccgccgccaccagccccaagaaaaagagaaaagtctaagctgccttctgcggggcttgccttctggccatgcccttcttctctcccttgcacctgtacctcttggtctttgaataaagcctgagtaggaaggctagcaaaaaaaaaaaaaaaaaaaaaaaaaaaaaaaaaaaaaaaaaaaaaaaaaaaaaaaaaaaaaaaaaaaaaaaaaaaaaaaa

SEQ ID NO: 2959 - RNA, 5419 nt, synthetic construct
  source 1..5419: mol_type = other RNA
aggaaataagagagaaaagaagagtaagaagaaatataagagccaccatggcccctaagaagaagcgtaaagtgagccgggtgaacggcagcggcagcggcggcggcatgaaccacgaccaggagttcgacccccctaaggtgtaccctcccgtccccgccgagaagagaaagcccatccgggtcctgagcctgttcgatggcatcgccaccggtctgctggtgctgaaggacctgggcatccaggtggataggtacattgcctccgaggtgtgcgaggactccatcaccgtgggaatggtgcgtcatcagggcaagatcatgtacgtgggcgacgtgcggagcgtgacacagaagcatatccaggagtggggccctttcgacctggtgatcggcggcagcccttgcaatgacctgagcatcgtgaacccagcccggaagggcctgtacgagggaaccggcagactgttcttcgagttttacagactgctgcacgacgcccggcctaaggaaggcgacgaccggcccttcttttggctgttcgagaatgtggtggccatgggagtcagcgacaagcgggatattagccggttcctggagagcaaccccgtgatgatcgatgccaaggaagtgagcgccgcccaccgggccagatacttctggggcaatctgcctggcatgaacagacccctggccagcaccgtgaacgacaagctggagctgcaggagtgcctggagcacggccggatcgccaagttcagcaaggtgagaaccatcaccacccgaagcaacagcatcaaacaaggcaaggaccagcactttcctgtgttcatgaacgagaaggaggacatcctgtggtgtaccgagatggagagagtgttcgggttcccagtccactacacagatgtcagcaacatgtctagactggccagacagagactgctgggaagaagctggtccgtccctgtgatcagacacctgttcgcccctctgaaggagtacttcgcctgcgtgagcagcggcaacagcaacgccaacagccggggccccagcttctctagcggcctggtgccactgtccctgagagggagccacatgggccccatggagatctacaaaaccgtgagcgcctggaagcggcagcctgtgcgcgtgctgagcctgtttcggaatatcgataaagtcctgaaaagcctgggattcctggagagcggctctggctccggcggtggcaccctgaagtacgtggaggatgtgacaaacgtggtcagacgggatgtggagaagtggggccccttcgatctggtgtacggcagcacccaacccctgggcagctcttgtgaccggtgccctggctggtacatgtttcagttccaccggatcctgcagtacgccctgccgagacaggagtcccagcggccattcttttggattttcatggacaacttgctgctgaccgaggatgaccaggaaactaccactcggttcctgcagaccgaagccgtgaccctgcaggacgtgagaggccgggactaccagaacgccatgcgggtgtggtccaacatccctggactgaaaagcaagcacgcacctctgacccctaaagaagaggagtacctgcaggcccaggtgcggagcagaagcaagctggacgcccctaaggtggatctgctggtgaagaattgcctcctgcccctgagagagtacttcaagtatttcagccagaatagtctgcccctgggcggcccaagcagcggcgcccctcctcccagcggcggcagcccagccggctccccaacctctaccgaggagggcacctctgagtccgccacccccgagagcggccctggcacctccaccgagcccagcgagggcagcgcacccggcagccctgccggcagccccacctccacagaggagggaaccagcaccgagcccagcgaaggcagcgccccaggcaccagcaccgagcctagtgagggcggctctggcggcggcagcgcccaggagattaaacggatcaacaagatcagaagaagacttgtgaaagacagcaacaccaagaaggccggcaagacaggccccatgaaaaccctgctggttagagtgatgacacccgatctgagagagcggctggaaaacctgagaaagaagcctgaaaatatcccccagcccatcagcaatacatctagagccaacctgaataagctgctgaccgattacaccgaaatgaagaaggcgatcctgcatgtgtactgggaagagttccagaaggaccctgtgggcctgatgagccgggtggcccagcctgccagcaagaagatcgatcagaacaagctgaaacctgagatggacgagaagggcaacctgaccaccgccggctttgcctgctctcagtgtggccagcccctgttcgtgtacaagctggagcaggtgtctgagaagggcaaggcttacaccaactacttcggacggtgcaatgtggccgagcacgaaaagctgatcctgctggcccagctgaagcccgagaaggatagcgacgaagccgtgacatatagcctgggaaagtttgggcagagggccctggatttctacagcattcatgtgaccaaggagtccacccaccccgtgaagcccctggcccagatcgccggaaacagatacgcctccggacctgtgggaaaggccctgagcgacgcatgtatgggcacaatcgcctccttcctgtctaagtaccaggacatcatcatcgaacaccagaaggtggtgaagggcaaccagaagagactggagagcctgcgggagctggccggcaaggaaaacctggaataccctagcgtgaccctgccacctcagcctcacaccaaggagggcgttgatgcctacaacgaagtgatcgcccgggtgcgaatgtgggtgaacctgaacctgtggcagaagctgaagctaagcagagatgatgccaagcctctgctgagactgaagggattcccttcctttcctctggtcgagagacaggccaacgaagtggactggtgggacatggtgtgtaacgtgaagaagctgatcaacgagaaaaaggaggatggcaaggtgttttggcagaatctggctggctacaagagacaggaagccctgagaccatacctgagcagcgaggaagatcggaagaagggaaagaaattcgctcggtaccagctgggcgacctgctgctgcacctggaaaagaagcacggcgaggactggggaaaggtgtacgacgaggcctgggagcggattgacaagaaagtggaaggcctgagcaagcacatcaagctggaagaggaacggagaagcgaggacgcccagagcaaggccgccctgaccgactggctgcgggctaaggccagcttcgtgatcgagggcctgaaggaggccgacaaggacgagttctgcagatgcgagctgaagctgcagaagtggtacggggacctgcggggaaagcccttcgccatcgaagccgagaacagcatcctggacatcagcggcttcagcaagcagtacaactgtgccttcatctggcagaaggacggcgtgaagaagctgaacctgtacctgatcatcaactacttcaagggcggcaagctgcggttcaagaagatcaaacctgaagccttcgaagccaacagattctacaccgtgatcaacaaaaagagcggcgagatcgtgcccatggaggtgaacttcaacttcgacgaccccaacctgatcatcctgcctctggcctttggcaagagacagggcagagaattcatctggaacgacctgctgtccctggaaaccggcagcctgaagctggccaacggaagagtgatcgagaagacactgtacaacagaagaacccggcaggatgagcctgccctgttcgtggccctgaccttcgagcggcgggaggtcctggactcctccaatatcaaaccaatgaacctgatcggcgtggcaagaggcgaaaacatccccgccgtgatcgccctgaccgaccccgagggctgcccactgagccggtttaaggatagcctgggaaacccaacccacatcctgagaatcggcgagagctataaggagaagcagcggaccatccaggccaagaaggaggtggagcagcggagagccggcggctacagccggaagtacgccagcaaagccaagaatctggcagacgatatggtgagaaacaccgctagagatctgctgtactacgccgtgacccaggatgccatgctgatcttcgccaacctgagccggggcttcggccggcagggcaagcggaccttcatggccgagagacagtacacacggatggaggactggctgaccgccaagctggcctacgagggcctgagcaagacctacctgtccaagacactggcccagtacacctccaagacatgcagcaactgtgggtttaccatcaccagcgccgactacgacagggtgctggagaagctgaagaagacagcaacaggctggatgaccacaattaacggcaaggagctgaaggtggagggccagattacctactacaacagatacaagagacagaacgtagtcaaggacctgtccgtcgagctggatagactgagcgaagaatctgtgaacaacgacatctcctcctggacaaagggcagaagcggagaagctctgagcctcctgaagaaaagattctcccatagacccgtgcaggagaagttcgtgtgcctgaactgcggcttcgagacacacgcagccgagcaagccgccctgaacatcgccagatcctggctgttcctgcggagccaggagtacaagaaataccagacaaacaagacaaccggcaacaccgataagagagccttcgtcgagacctggcagtccttttaccggaagaagcttaaggaggtgtggaaacctgccgtgcggtctggcggatctggcggaggctccacaagcacccacggcctggtgatgttcaaggacgtggccatcgacgtgagccaggaggagtgggagtgcctgaaccccacccagaggagcctgtacagggacgtgatgctggagaactacagcaacctggtgagcctgggcctgagcctgagcaagcccgccgtgatcagcagcctggagcagggcatggagccctggatggtggtgagggaggtgaccggcaagcagtgccccgacctggtgagcaggaccagccccaagaaaaagagaaaagtctaagctgccttctgcggggcttgccttctggccatgcccttcttctctcccttgcacctgtacctcttggtctttgaataaagcctgagtaggaaggctagcaaaaaaaaaaaaaaaaaaaaaaaaaaaaaaaaaaaaaaaaaaaaaaaaaaaaaaaaaaaaaaaaaaaaaaaaaaaaaaaa

SEQ ID NO: 2960 - RNA, 5419 nt, synthetic construct
  source 1..5419: mol_type = other RNA
aggaaataagagagaaaagaagagtaagaagaaatataagagccaccatggcccctaagaagaagcgtaaagtgagccgggtgaacggcagcggcagcggcggcggcatgaaccacgaccaggagttcgacccccctaaggtgtaccctcccgtccccgccgagaagagaaagcccatccgggtcctgagcctgttcgatggcatcgccaccggtctgctggtgctgaaggacctgggcatccaggtggataggtacattgcctccgaggtgtgcgaggactccatcaccgtgggaatggtgcgtcatcagggcaagatcatgtacgtgggcgacgtgcggagcgtgacacagaagcatatccaggagtggggccctttcgacctggtgatcggcggcagcccttgcaatgacctgagcatcgtgaacccagcccggaagggcctgtacgagggaaccggcagactgttcttcgagttttacagactgctgcacgacgcccggcctaaggaaggcgacgaccggcccttcttttggctgttcgagaatgtggtggccatgggagtcagcgacaagcgggatattagccggttcctggagagcaaccccgtgatgatcgatgccaaggaagtgagcgccgcccaccgggccagatacttctggggcaatctgcctggcatgaacagacccctggccagcaccgtgaacgacaagctggagctgcaggagtgcctggagcacggccggatcgccaagttcagcaaggtgagaaccatcaccacccgaagcaacagcatcaaacaaggcaaggaccagcactttcctgtgttcatgaacgagaaggaggacatcctgtggtgtaccgagatggagagagtgttcgggttcccagtccactacacagatgtcagcaacatgtctagactggccagacagagactgctgggaagaagctggtccgtccctgtgatcagacacctgttcgcccctctgaaggagtacttcgcctgcgtgagcagcggcaacagcaacgccaacagccggggccccagcttctctagcggcctggtgccactgtccctgagagggagccacatgggccccatggagatctacaaaaccgtgagcgcctggaagcggcagcctgtgcgcgtgctgagcctgtttcggaatatcgataaagtcctgaaaagcctgggattcctggagagcggctctggctccggcggtggcaccctgaagtacgtggaggatgtgacaaacgtggtcagacgggatgtggagaagtggggccccttcgatctggtgtacggcagcacccaacccctgggcagctcttgtgaccggtgccctggctggtacatgtttcagttccaccggatcctgcagtacgccctgccgagacaggagtcccagcggccattcttttggattttcatggacaacttgctgctgaccgaggatgaccaggaaactaccactcggttcctgcagaccgaagccgtgaccctgcaggacgtgagaggccgggactaccagaacgccatgcgggtgtggtccaacatccctggactgaaaagcaagcacgcacctctgacccctaaagaagaggagtacctgcaggcccaggtgcggagcagaagcaagctggacgcccctaaggtggatctgctggtgaagaattgcctcctgcccctgagagagtacttcaagtatttcagccagaatagtctgcccctgggcggcccaagcagcggcgcccctcctcccagcggcggcagcccagccggctccccaacctctaccgaggagggcacctctgagtccgccacccccgagagcggccctggcacctccaccgagcccagcgagggcagcgcacccggcagccctgccggcagccccacctccacagaggagggaaccagcaccgagcccagcgaaggcagcgccccaggcaccagcaccgagcctagtgagggcggctctggcggcggcagcgcccaggagattaaacggatcaacaagatcagaagaagacttgtgaaagacagcaacaccaagaaggccggcaagacaggccccatgaaaaccctgctggttagagtgatgacacccgatctgagagagcggctggaaaacctgagaaagaagcctgaaaatatcccccagcccatcagcaatacatctagagccaacctgaataagctgctgaccgattacaccgaaatgaagaaggcgatcctgcatgtgtactgggaagagttccagaaggaccctgtgggcctgatgagccgggtggcccagcctgccagcaagaagatcgatcagaacaagctgaaacctgagatggacgagaagggcaacctgaccaccgccggctttgcctgctctcagtgtggccagcccctgttcgtgtacaagctggagcaggtgtctgagaagggcaaggcttacaccaactacttcggacggtgcaatgtggccgagcacgaaaagctgatcctgctggcccagctgaagcccgagaaggatagcgacgaagccgtgacatatagcctgggaaagtttgggcagagggccctggatttctacagcattcatgtgaccaaggagtccacccaccccgtgaagcccctggcccagatcgccggaaacagatacgcctccggacctgtgggaaaggccctgagcgacgcatgtatgggcacaatcgcctccttcctgtctaagtaccaggacatcatcatcgaacaccagaaggtggtgaagggcaaccagaagagactggagagcctgcgggagctggccggcaaggaaaacctggaataccctagcgtgaccctgccacctcagcctcacaccaaggagggcgttgatgcctacaacgaagtgatcgcccgggtgcgaatgtgggtgaacctgaacctgtggcagaagctgaagctaagcagagatgatgccaagcctctgctgagactgaagggattcccttcctttcctctggtcgagagacaggccaacgaagtggactggtgggacatggtgtgtaacgtgaagaagctgatcaacgagaaaaaggaggatggcaaggtgttttggcagaatctggctggctacaagagacaggaagccctgagaccatacctgagcagcgaggaagatcggaagaagggaaagaaattcgctcggtaccagctgggcgacctgctgctgcacctggaaaagaagcacggcgaggactggggaaaggtgtacgacgaggcctgggagcggattgacaagaaagtggaaggcctgagcaagcacatcaagctggaagaggaacggagaagcgaggacgcccagagcaaggccgccctgaccgactggctgcgggctaaggccagcttcgtgatcgagggcctgaaggaggccgacaaggacgagttctgcagatgcgagctgaagctgcagaagtggtacggggacctgcggggaaagcccttcgccatcgaagccgagaacagcatcctggacatcagcggcttcagcaagcagtacaactgtgccttcatctggcagaaggacggcgtgaagaagctgaacctgtacctgatcatcaactacttcaagggcggcaagctgcggttcaagaagatcaaacctgaagccttcgaagccaacagattctacaccgtgatcaacaaaaagagcggcgagatcgtgcccatggaggtgaacttcaacttcgacgaccccaacctgatcatcctgcctctggcctttggcaagagacagggcagagaattcatctggaacgacctgctgtccctggaaaccggcagcctgaagctggccaacggaagagtgatcgagaagacactgtacaacagaagaacccggcaggatgagcctgccctgttcgtggccctgaccttcgagcggcgggaggtcctggactcctccaatatcaaaccaatgaacctgatcggcgtggcaagaggcgaaaacatccccgccgtgatcgccctgaccgaccccgagggctgcccactgagccggtttaaggatagcctgggaaacccaacccacatcctgagaatcggcgagagctataaggagaagcagcggaccatccaggccaagaaggaggtggagcagcggagagccggcggctacagccggaagtacgccagcaaagccaagaatctggcagacgatatggtgagaaacaccgctagagatctgctgtactacgccgtgacccaggatgccatgctgatcttcgccaacctgagccggggcttcggccggcagggcaagcggaccttcatggccgagagacagtacacacggatggaggactggctgaccgccaagctggcctacgagggcctgagcaagacctacctgtccaagacactggcccagtacacctccaagacatgcagcaactgtgggtttaccatcaccagcgccgactacgacagggtgctggagaagctgaagaagacagcaacaggctggatgaccacaattaacggcaaggagctgaaggtggagggccagattacctactacaacagatacaagagacagaacgtagtcaaggacctgtccgtcgagctggatagactgagcgaagaatctgtgaacaacgacatctcctcctggacaaagggcagaagcggagaagctctgagcctcctgaagaaaagattctcccatagacccgtgcaggagaagttcgtgtgcctgaactgcggcttcgagacacacgcagccgagcaagccgccctgaacatcgccagatcctggctgttcctgcggagccaggagtacaagaaataccagacaaacaagacaaccggcaacaccgataagagagccttcgtcgagacctggcagtccttttaccggaagaagcttaaggaggtgtggaaacctgccgtgcggtctggcggatctggcggaggctccacaagcacccaggagagcgtgaccttcagggacgtggccgtgcacttcagcagggacgagtggctgtacctggaccccgcccagagggccctgtacagggaggtgatgctggagaactacagcagcctggtgagcctgggcatcctgttcagcaagcccaaggtgatcttccagctgcagcagggcgaggacccctggatggtggagaacggcgtgagctgcggcgcctgcctgggctgggagagcctgaccagccccaagaaaaagagaaaagtctaagctgccttctgcggggcttgccttctggccatgcccttcttctctcccttgcacctgtacctcttggtctttgaataaagcctgagtaggaaggctagcaaaaaaaaaaaaaaaaaaaaaaaaaaaaaaaaaaaaaaaaaaaaaaaaaaaaaaaaaaaaaaaaaaaaaaaaaaaaaaaa

SEQ ID NO: 2961 - RNA, 5419 nt, synthetic construct
  source 1..5419: mol_type = other RNA
aggaaataagagagaaaagaagagtaagaagaaatataagagccaccatggcccctaagaagaagcgtaaagtgagccgggtgaacggcagcggcagcggcggcggcatgaaccacgaccaggagttcgacccccctaaggtgtaccctcccgtccccgccgagaagagaaagcccatccgggtcctgagcctgttcgatggcatcgccaccggtctgctggtgctgaaggacctgggcatccaggtggataggtacattgcctccgaggtgtgcgaggactccatcaccgtgggaatggtgcgtcatcagggcaagatcatgtacgtgggcgacgtgcggagcgtgacacagaagcatatccaggagtggggccctttcgacctggtgatcggcggcagcccttgcaatgacctgagcatcgtgaacccagcccggaagggcctgtacgagggaaccggcagactgttcttcgagttttacagactgctgcacgacgcccggcctaaggaaggcgacgaccggcccttcttttggctgttcgagaatgtggtggccatgggagtcagcgacaagcgggatattagccggttcctggagagcaaccccgtgatgatcgatgccaaggaagtgagcgccgcccaccgggccagatacttctggggcaatctgcctggcatgaacagacccctggccagcaccgtgaacgacaagctggagctgcaggagtgcctggagcacggccggatcgccaagttcagcaaggtgagaaccatcaccacccgaagcaacagcatcaaacaaggcaaggaccagcactttcctgtgttcatgaacgagaaggaggacatcctgtggtgtaccgagatggagagagtgttcgggttcccagtccactacacagatgtcagcaacatgtctagactggccagacagagactgctgggaagaagctggtccgtccctgtgatcagacacctgttcgcccctctgaaggagtacttcgcctgcgtgagcagcggcaacagcaacgccaacagccggggccccagcttctctagcggcctggtgccactgtccctgagagggagccacatgggccccatggagatctacaaaaccgtgagcgcctggaagcggcagcctgtgcgcgtgctgagcctgtttcggaatatcgataaagtcctgaaaagcctgggattcctggagagcggctctggctccggcggtggcaccctgaagtacgtggaggatgtgacaaacgtggtcagacgggatgtggagaagtggggccccttcgatctggtgtacggcagcacccaacccctgggcagctcttgtgaccggtgccctggctggtacatgtttcagttccaccggatcctgcagtacgccctgccgagacaggagtcccagcggccattcttttggattttcatggacaacttgctgctgaccgaggatgaccaggaaactaccactcggttcctgcagaccgaagccgtgaccctgcaggacgtgagaggccgggactaccagaacgccatgcgggtgtggtccaacatccctggactgaaaagcaagcacgcacctctgacccctaaagaagaggagtacctgcaggcccaggtgcggagcagaagcaagctggacgcccctaaggtggatctgctggtgaagaattgcctcctgcccctgagagagtacttcaagtatttcagccagaatagtctgcccctgggcggcccaagcagcggcgcccctcctcccagcggcggcagcccagccggctccccaacctctaccgaggagggcacctctgagtccgccacccccgagagcggccctggcacctccaccgagcccagcgagggcagcgcacccggcagccctgccggcagccccacctccacagaggagggaaccagcaccgagcccagcgaaggcagcgccccaggcaccagcaccgagcctagtgagggcggctctggcggcggcagcgcccaggagattaaacggatcaacaagatcagaagaagacttgtgaaagacagcaacaccaagaaggccggcaagacaggccccatgaaaaccctgctggttagagtgatgacacccgatctgagagagcggctggaaaacctgagaaagaagcctgaaaatatcccccagcccatcagcaatacatctagagccaacctgaataagctgctgaccgattacaccgaaatgaagaaggcgatcctgcatgtgtactgggaagagttccagaaggaccctgtgggcctgatgagccgggtggcccagcctgccagcaagaagatcgatcagaacaagctgaaacctgagatggacgagaagggcaacctgaccaccgccggctttgcctgctctcagtgtggccagcccctgttcgtgtacaagctggagcaggtgtctgagaagggcaaggcttacaccaactacttcggacggtgcaatgtggccgagcacgaaaagctgatcctgctggcccagctgaagcccgagaaggatagcgacgaagccgtgacatatagcctgggaaagtttgggcagagggccctggatttctacagcattcatgtgaccaaggagtccacccaccccgtgaagcccctggcccagatcgccggaaacagatacgcctccggacctgtgggaaaggccctgagcgacgcatgtatgggcacaatcgcctccttcctgtctaagtaccaggacatcatcatcgaacaccagaaggtggtgaagggcaaccagaagagactggagagcctgcgggagctggccggcaaggaaaacctggaataccctagcgtgaccctgccacctcagcctcacaccaaggagggcgttgatgcctacaacgaagtgatcgcccgggtgcgaatgtgggtgaacctgaacctgtggcagaagctgaagctaagcagagatgatgccaagcctctgctgagactgaagggattcccttcctttcctctggtcgagagacaggccaacgaagtggactggtgggacatggtgtgtaacgtgaagaagctgatcaacgagaaaaaggaggatggcaaggtgttttggcagaatctggctggctacaagagacaggaagccctgagaccatacctgagcagcgaggaagatcggaagaagggaaagaaattcgctcggtaccagctgggcgacctgctgctgcacctggaaaagaagcacggcgaggactggggaaaggtgtacgacgaggcctgggagcggattgacaagaaagtggaaggcctgagcaagcacatcaagctggaagaggaacggagaagcgaggacgcccagagcaaggccgccctgaccgactggctgcgggctaaggccagcttcgtgatcgagggcctgaaggaggccgacaaggacgagttctgcagatgcgagctgaagctgcagaagtggtacggggacctgcggggaaagcccttcgccatcgaagccgagaacagcatcctggacatcagcggcttcagcaagcagtacaactgtgccttcatctggcagaaggacggcgtgaagaagctgaacctgtacctgatcatcaactacttcaagggcggcaagctgcggttcaagaagatcaaacctgaagccttcgaagccaacagattctacaccgtgatcaacaaaaagagcggcgagatcgtgcccatggaggtgaacttcaacttcgacgaccccaacctgatcatcctgcctctggcctttggcaagagacagggcagagaattcatctggaacgacctgctgtccctggaaaccggcagcctgaagctggccaacggaagagtgatcgagaagacactgtacaacagaagaacccggcaggatgagcctgccctgttcgtggccctgaccttcgagcggcgggaggtcctggactcctccaatatcaaaccaatgaacctgatcggcgtggcaagaggcgaaaacatccccgccgtgatcgccctgaccgaccccgagggctgcccactgagccggtttaaggatagcctgggaaacccaacccacatcctgagaatcggcgagagctataaggagaagcagcggaccatccaggccaagaaggaggtggagcagcggagagccggcggctacagccggaagtacgccagcaaagccaagaatctggcagacgatatggtgagaaacaccgctagagatctgctgtactacgccgtgacccaggatgccatgctgatcttcgccaacctgagccggggcttcggccggcagggcaagcggaccttcatggccgagagacagtacacacggatggaggactggctgaccgccaagctggcctacgagggcctgagcaagacctacctgtccaagacactggcccagtacacctccaagacatgcagcaactgtgggtttaccatcaccagcgccgactacgacagggtgctggagaagctgaagaagacagcaacaggctggatgaccacaattaacggcaaggagctgaaggtggagggccagattacctactacaacagatacaagagacagaacgtagtcaaggacctgtccgtcgagctggatagactgagcgaagaatctgtgaacaacgacatctcctcctggacaaagggcagaagcggagaagctctgagcctcctgaagaaaagattctcccatagacccgtgcaggagaagttcgtgtgcctgaactgcggcttcgagacacacgcagccgagcaagccgccctgaacatcgccagatcctggctgttcctgcggagccaggagtacaagaaataccagacaaacaagacaaccggcaacaccgataagagagccttcgtcgagacctggcagtccttttaccggaagaagcttaaggaggtgtggaaacctgccgtgcggtctggcggatctggcggaggctccacaagccaggtgcccgtgaccttcgaggacatcaccatctacttcagccaggaggagtgggagggcctgcaggagtggcagaaggagctgtacaaggacgtgatgaaggagaactacgagatcctgatcagcctgggcgccagcagccccatcctgacccccgacgtgatcagccacatcgagaggggcgaggagccctacatcagggacgagcccaggagcgaggagagggagagcggcaagagcagcaccagccccaagaaaaagagaaaagtctaagctgccttctgcggggcttgccttctggccatgcccttcttctctcccttgcacctgtacctcttggtctttgaataaagcctgagtaggaaggctagcaaaaaaaaaaaaaaaaaaaaaaaaaaaaaaaaaaaaaaaaaaaaaaaaaaaaaaaaaaaaaaaaaaaaaaaaaaaaaaaa

SEQ ID NO: 2962 - RNA, 5419 nt, synthetic construct
  source 1..5419: mol_type = other RNA
aggaaataagagagaaaagaagagtaagaagaaatataagagccaccatggcccctaagaagaagcgtaaagtgagccgggtgaacggcagcggcagcggcggcggcatgaaccacgaccaggagttcgacccccctaaggtgtaccctcccgtccccgccgagaagagaaagcccatccgggtcctgagcctgttcgatggcatcgccaccggtctgctggtgctgaaggacctgggcatccaggtggataggtacattgcctccgaggtgtgcgaggactccatcaccgtgggaatggtgcgtcatcagggcaagatcatgtacgtgggcgacgtgcggagcgtgacacagaagcatatccaggagtggggccctttcgacctggtgatcggcggcagcccttgcaatgacctgagcatcgtgaacccagcccggaagggcctgtacgagggaaccggcagactgttcttcgagttttacagactgctgcacgacgcccggcctaaggaaggcgacgaccggcccttcttttggctgttcgagaatgtggtggccatgggagtcagcgacaagcgggatattagccggttcctggagagcaaccccgtgatgatcgatgccaaggaagtgagcgccgcccaccgggccagatacttctggggcaatctgcctggcatgaacagacccctggccagcaccgtgaacgacaagctggagctgcaggagtgcctggagcacggccggatcgccaagttcagcaaggtgagaaccatcaccacccgaagcaacagcatcaaacaaggcaaggaccagcactttcctgtgttcatgaacgagaaggaggacatcctgtggtgtaccgagatggagagagtgttcgggttcccagtccactacacagatgtcagcaacatgtctagactggccagacagagactgctgggaagaagctggtccgtccctgtgatcagacacctgttcgcccctctgaaggagtacttcgcctgcgtgagcagcggcaacagcaacgccaacagccggggccccagcttctctagcggcctggtgccactgtccctgagagggagccacatgggccccatggagatctacaaaaccgtgagcgcctggaagcggcagcctgtgcgcgtgctgagcctgtttcggaatatcgataaagtcctgaaaagcctgggattcctggagagcggctctggctccggcggtggcaccctgaagtacgtggaggatgtgacaaacgtggtcagacgggatgtggagaagtggggccccttcgatctggtgtacggcagcacccaacccctgggcagctcttgtgaccggtgccctggctggtacatgtttcagttccaccggatcctgcagtacgccctgccgagacaggagtcccagcggccattcttttggattttcatggacaacttgctgctgaccgaggatgaccaggaaactaccactcggttcctgcagaccgaagccgtgaccctgcaggacgtgagaggccgggactaccagaacgccatgcgggtgtggtccaacatccctggactgaaaagcaagcacgcacctctgacccctaaagaagaggagtacctgcaggcccaggtgcggagcagaagcaagctggacgcccctaaggtggatctgctggtgaagaattgcctcctgcccctgagagagtacttcaagtatttcagccagaatagtctgcccctgggcggcccaagcagcggcgcccctcctcccagcggcggcagcccagccggctccccaacctctaccgaggagggcacctctgagtccgccacccccgagagcggccctggcacctccaccgagcccagcgagggcagcgcacccggcagccctgccggcagccccacctccacagaggagggaaccagcaccgagcccagcgaaggcagcgccccaggcaccagcaccgagcctagtgagggcggctctggcggcggcagcgcccaggagattaaacggatcaacaagatcagaagaagacttgtgaaagacagcaacaccaagaaggccggcaagacaggccccatgaaaaccctgctggttagagtgatgacacccgatctgagagagcggctggaaaacctgagaaagaagcctgaaaatatcccccagcccatcagcaatacatctagagccaacctgaataagctgctgaccgattacaccgaaatgaagaaggcgatcctgcatgtgtactgggaagagttccagaaggaccctgtgggcctgatgagccgggtggcccagcctgccagcaagaagatcgatcagaacaagctgaaacctgagatggacgagaagggcaacctgaccaccgccggctttgcctgctctcagtgtggccagcccctgttcgtgtacaagctggagcaggtgtctgagaagggcaaggcttacaccaactacttcggacggtgcaatgtggccgagcacgaaaagctgatcctgctggcccagctgaagcccgagaaggatagcgacgaagccgtgacatatagcctgggaaagtttgggcagagggccctggatttctacagcattcatgtgaccaaggagtccacccaccccgtgaagcccctggcccagatcgccggaaacagatacgcctccggacctgtgggaaaggccctgagcgacgcatgtatgggcacaatcgcctccttcctgtctaagtaccaggacatcatcatcgaacaccagaaggtggtgaagggcaaccagaagagactggagagcctgcgggagctggccggcaaggaaaacctggaataccctagcgtgaccctgccacctcagcctcacaccaaggagggcgttgatgcctacaacgaagtgatcgcccgggtgcgaatgtgggtgaacctgaacctgtggcagaagctgaagctaagcagagatgatgccaagcctctgctgagactgaagggattcccttcctttcctctggtcgagagacaggccaacgaagtggactggtgggacatggtgtgtaacgtgaagaagctgatcaacgagaaaaaggaggatggcaaggtgttttggcagaatctggctggctacaagagacaggaagccctgagaccatacctgagcagcgaggaagatcggaagaagggaaagaaattcgctcggtaccagctgggcgacctgctgctgcacctggaaaagaagcacggcgaggactggggaaaggtgtacgacgaggcctgggagcggattgacaagaaagtggaaggcctgagcaagcacatcaagctggaagaggaacggagaagcgaggacgcccagagcaaggccgccctgaccgactggctgcgggctaaggccagcttcgtgatcgagggcctgaaggaggccgacaaggacgagttctgcagatgcgagctgaagctgcagaagtggtacggggacctgcggggaaagcccttcgccatcgaagccgagaacagcatcctggacatcagcggcttcagcaagcagtacaactgtgccttcatctggcagaaggacggcgtgaagaagctgaacctgtacctgatcatcaactacttcaagggcggcaagctgcggttcaagaagatcaaacctgaagccttcgaagccaacagattctacaccgtgatcaacaaaaagagcggcgagatcgtgcccatggaggtgaacttcaacttcgacgaccccaacctgatcatcctgcctctggcctttggcaagagacagggcagagaattcatctggaacgacctgctgtccctggaaaccggcagcctgaagctggccaacggaagagtgatcgagaagacactgtacaacagaagaacccggcaggatgagcctgccctgttcgtggccctgaccttcgagcggcgggaggtcctggactcctccaatatcaaaccaatgaacctgatcggcgtggcaagaggcgaaaacatccccgccgtgatcgccctgaccgaccccgagggctgcccactgagccggtttaaggatagcctgggaaacccaacccacatcctgagaatcggcgagagctataaggagaagcagcggaccatccaggccaagaaggaggtggagcagcggagagccggcggctacagccggaagtacgccagcaaagccaagaatctggcagacgatatggtgagaaacaccgctagagatctgctgtactacgccgtgacccaggatgccatgctgatcttcgccaacctgagccggggcttcggccggcagggcaagcggaccttcatggccgagagacagtacacacggatggaggactggctgaccgccaagctggcctacgagggcctgagcaagacctacctgtccaagacactggcccagtacacctccaagacatgcagcaactgtgggtttaccatcaccagcgccgactacgacagggtgctggagaagctgaagaagacagcaacaggctggatgaccacaattaacggcaaggagctgaaggtggagggccagattacctactacaacagatacaagagacagaacgtagtcaaggacctgtccgtcgagctggatagactgagcgaagaatctgtgaacaacgacatctcctcctggacaaagggcagaagcggagaagctctgagcctcctgaagaaaagattctcccatagacccgtgcaggagaagttcgtgtgcctgaactgcggcttcgagacacacgcagccgagcaagccgccctgaacatcgccagatcctggctgttcctgcggagccaggagtacaagaaataccagacaaacaagacaaccggcaacaccgataagagagccttcgtcgagacctggcagtccttttaccggaagaagcttaaggaggtgtggaaacctgccgtgcggtctggcggatctggcggaggctccacaagcgaggagctgcccgtggtgttcgaggacgtggccgtgtacttcaccagggaggagtggggcatgctggacaagaggcagaaggagctgtacagggacgtgatgaggatgaactacgagctgctggccagcctgggccccgccgccgccaagcccgacctgatcagcaagctggagaggagggccgccccctggatcaaggaccccaacggcgccaagagcggcggcaagggcaggccccccggcaccagccccaagaaaaagagaaaagtctaagctgccttctgcggggcttgccttctggccatgcccttcttctctcccttgcacctgtacctcttggtctttgaataaagcctgagtaggaaggctagcaaaaaaaaaaaaaaaaaaaaaaaaaaaaaaaaaaaaaaaaaaaaaaaaaaaaaaaaaaaaaaaaaaaaaaaaaaaaaaaa

SEQ ID NO: 2963 - RNA, 5419 nt, synthetic construct
  source 1..5419: mol_type = other RNA
aggaaataagagagaaaagaagagtaagaagaaatataagagccaccatggcccctaagaagaagcgtaaagtgagccgggtgaacggcagcggcagcggcggcggcatgaaccacgaccaggagttcgacccccctaaggtgtaccctcccgtccccgccgagaagagaaagcccatccgggtcctgagcctgttcgatggcatcgccaccggtctgctggtgctgaaggacctgggcatccaggtggataggtacattgcctccgaggtgtgcgaggactccatcaccgtgggaatggtgcgtcatcagggcaagatcatgtacgtgggcgacgtgcggagcgtgacacagaagcatatccaggagtggggccctttcgacctggtgatcggcggcagcccttgcaatgacctgagcatcgtgaacccagcccggaagggcctgtacgagggaaccggcagactgttcttcgagttttacagactgctgcacgacgcccggcctaaggaaggcgacgaccggcccttcttttggctgttcgagaatgtggtggccatgggagtcagcgacaagcgggatattagccggttcctggagagcaaccccgtgatgatcgatgccaaggaagtgagcgccgcccaccgggccagatacttctggggcaatctgcctggcatgaacagacccctggccagcaccgtgaacgacaagctggagctgcaggagtgcctggagcacggccggatcgccaagttcagcaaggtgagaaccatcaccacccgaagcaacagcatcaaacaaggcaaggaccagcactttcctgtgttcatgaacgagaaggaggacatcctgtggtgtaccgagatggagagagtgttcgggttcccagtccactacacagatgtcagcaacatgtctagactggccagacagagactgctgggaagaagctggtccgtccctgtgatcagacacctgttcgcccctctgaaggagtacttcgcctgcgtgagcagcggcaacagcaacgccaacagccggggccccagcttctctagcggcctggtgccactgtccctgagagggagccacatgggccccatggagatctacaaaaccgtgagcgcctggaagcggcagcctgtgcgcgtgctgagcctgtttcggaatatcgataaagtcctgaaaagcctgggattcctggagagcggctctggctccggcggtggcaccctgaagtacgtggaggatgtgacaaacgtggtcagacgggatgtggagaagtggggccccttcgatctggtgtacggcagcacccaacccctgggcagctcttgtgaccggtgccctggctggtacatgtttcagttccaccggatcctgcagtacgccctgccgagacaggagtcccagcggccattcttttggattttcatggacaacttgctgctgaccgaggatgaccaggaaactaccactcggttcctgcagaccgaagccgtgaccctgcaggacgtgagaggccgggactaccagaacgccatgcgggtgtggtccaacatccctggactgaaaagcaagcacgcacctctgacccctaaagaagaggagtacctgcaggcccaggtgcggagcagaagcaagctggacgcccctaaggtggatctgctggtgaagaattgcctcctgcccctgagagagtacttcaagtatttcagccagaatagtctgcccctgggcggcccaagcagcggcgcccctcctcccagcggcggcagcccagccggctccccaacctctaccgaggagggcacctctgagtccgccacccccgagagcggccctggcacctccaccgagcccagcgagggcagcgcacccggcagccctgccggcagccccacctccacagaggagggaaccagcaccgagcccagcgaaggcagcgccccaggcaccagcaccgagcctagtgagggcggctctggcggcggcagcgcccaggagattaaacggatcaacaagatcagaagaagacttgtgaaagacagcaacaccaagaaggccggcaagacaggccccatgaaaaccctgctggttagagtgatgacacccgatctgagagagcggctggaaaacctgagaaagaagcctgaaaatatcccccagcccatcagcaatacatctagagccaacctgaataagctgctgaccgattacaccgaaatgaagaaggcgatcctgcatgtgtactgggaagagttccagaaggaccctgtgggcctgatgagccgggtggcccagcctgccagcaagaagatcgatcagaacaagctgaaacctgagatggacgagaagggcaacctgaccaccgccggctttgcctgctctcagtgtggccagcccctgttcgtgtacaagctggagcaggtgtctgagaagggcaaggcttacaccaactacttcggacggtgcaatgtggccgagcacgaaaagctgatcctgctggcccagctgaagcccgagaaggatagcgacgaagccgtgacatatagcctgggaaagtttgggcagagggccctggatttctacagcattcatgtgaccaaggagtccacccaccccgtgaagcccctggcccagatcgccggaaacagatacgcctccggacctgtgggaaaggccctgagcgacgcatgtatgggcacaatcgcctccttcctgtctaagtaccaggacatcatcatcgaacaccagaaggtggtgaagggcaaccagaagagactggagagcctgcgggagctggccggcaaggaaaacctggaataccctagcgtgaccctgccacctcagcctcacaccaaggagggcgttgatgcctacaacgaagtgatcgcccgggtgcgaatgtgggtgaacctgaacctgtggcagaagctgaagctaagcagagatgatgccaagcctctgctgagactgaagggattcccttcctttcctctggtcgagagacaggccaacgaagtggactggtgggacatggtgtgtaacgtgaagaagctgatcaacgagaaaaaggaggatggcaaggtgttttggcagaatctggctggctacaagagacaggaagccctgagaccatacctgagcagcgaggaagatcggaagaagggaaagaaattcgctcggtaccagctgggcgacctgctgctgcacctggaaaagaagcacggcgaggactggggaaaggtgtacgacgaggcctgggagcggattgacaagaaagtggaaggcctgagcaagcacatcaagctggaagaggaacggagaagcgaggacgcccagagcaaggccgccctgaccgactggctgcgggctaaggccagcttcgtgatcgagggcctgaaggaggccgacaaggacgagttctgcagatgcgagctgaagctgcagaagtggtacggggacctgcggggaaagcccttcgccatcgaagccgagaacagcatcctggacatcagcggcttcagcaagcagtacaactgtgccttcatctggcagaaggacggcgtgaagaagctgaacctgtacctgatcatcaactacttcaagggcggcaagctgcggttcaagaagatcaaacctgaagccttcgaagccaacagattctacaccgtgatcaacaaaaagagcggcgagatcgtgcccatggaggtgaacttcaacttcgacgaccccaacctgatcatcctgcctctggcctttggcaagagacagggcagagaattcatctggaacgacctgctgtccctggaaaccggcagcctgaagctggccaacggaagagtgatcgagaagacactgtacaacagaagaacccggcaggatgagcctgccctgttcgtggccctgaccttcgagcggcgggaggtcctggactcctccaatatcaaaccaatgaacctgatcggcgtggcaagaggcgaaaacatccccgccgtgatcgccctgaccgaccccgagggctgcccactgagccggtttaaggatagcctgggaaacccaacccacatcctgagaatcggcgagagctataaggagaagcagcggaccatccaggccaagaaggaggtggagcagcggagagccggcggctacagccggaagtacgccagcaaagccaagaatctggcagacgatatggtgagaaacaccgctagagatctgctgtactacgccgtgacccaggatgccatgctgatcttcgccaacctgagccggggcttcggccggcagggcaagcggaccttcatggccgagagacagtacacacggatggaggactggctgaccgccaagctggcctacgagggcctgagcaagacctacctgtccaagacactggcccagtacacctccaagacatgcagcaactgtgggtttaccatcaccagcgccgactacgacagggtgctggagaagctgaagaagacagcaacaggctggatgaccacaattaacggcaaggagctgaaggtggagggccagattacctactacaacagatacaagagacagaacgtagtcaaggacctgtccgtcgagctggatagactgagcgaagaatctgtgaacaacgacatctcctcctggacaaagggcagaagcggagaagctctgagcctcctgaagaaaagattctcccatagacccgtgcaggagaagttcgtgtgcctgaactgcggcttcgagacacacgcagccgagcaagccgccctgaacatcgccagatcctggctgttcctgcggagccaggagtacaagaaataccagacaaacaagacaaccggcaacaccgataagagagccttcgtcgagacctggcagtccttttaccggaagaagcttaaggaggtgtggaaacctgccgtgcggtctggcggatctggcggaggctccacaagcaagcacggccccgtgaccttcgaggaggtggccgtgtacttcaccagggaggagtgggccctgctggaccccacccagagggccctgtacagggacgtgatgcaggagaactacgagatggtggtgctgctgggcttcctgaacagcaagcccgacgtgatcagccagctggagcagggcgaggagccctgcatcgtggacctgcagggcagcgagaaggaggtgctgcccagggccgcctgcaccagccccaagaaaaagagaaaagtctaagctgccttctgcggggcttgccttctggccatgcccttcttctctcccttgcacctgtacctcttggtctttgaataaagcctgagtaggaaggctagcaaaaaaaaaaaaaaaaaaaaaaaaaaaaaaaaaaaaaaaaaaaaaaaaaaaaaaaaaaaaaaaaaaaaaaaaaaaaaaaa

SEQ ID NO: 2964 - RNA, 5419 nt, synthetic construct
  source 1..5419: mol_type = other RNA
aggaaataagagagaaaagaagagtaagaagaaatataagagccaccatggcccctaagaagaagcgtaaagtgagccgggtgaacggcagcggcagcggcggcggcatgaaccacgaccaggagttcgacccccctaaggtgtaccctcccgtccccgccgagaagagaaagcccatccgggtcctgagcctgttcgatggcatcgccaccggtctgctggtgctgaaggacctgggcatccaggtggataggtacattgcctccgaggtgtgcgaggactccatcaccgtgggaatggtgcgtcatcagggcaagatcatgtacgtgggcgacgtgcggagcgtgacacagaagcatatccaggagtggggccctttcgacctggtgatcggcggcagcccttgcaatgacctgagcatcgtgaacccagcccggaagggcctgtacgagggaaccggcagactgttcttcgagttttacagactgctgcacgacgcccggcctaaggaaggcgacgaccggcccttcttttggctgttcgagaatgtggtggccatgggagtcagcgacaagcgggatattagccggttcctggagagcaaccccgtgatgatcgatgccaaggaagtgagcgccgcccaccgggccagatacttctggggcaatctgcctggcatgaacagacccctggccagcaccgtgaacgacaagctggagctgcaggagtgcctggagcacggccggatcgccaagttcagcaaggtgagaaccatcaccacccgaagcaacagcatcaaacaaggcaaggaccagcactttcctgtgttcatgaacgagaaggaggacatcctgtggtgtaccgagatggagagagtgttcgggttcccagtccactacacagatgtcagcaacatgtctagactggccagacagagactgctgggaagaagctggtccgtccctgtgatcagacacctgttcgcccctctgaaggagtacttcgcctgcgtgagcagcggcaacagcaacgccaacagccggggccccagcttctctagcggcctggtgccactgtccctgagagggagccacatgggccccatggagatctacaaaaccgtgagcgcctggaagcggcagcctgtgcgcgtgctgagcctgtttcggaatatcgataaagtcctgaaaagcctgggattcctggagagcggctctggctccggcggtggcaccctgaagtacgtggaggatgtgacaaacgtggtcagacgggatgtggagaagtggggccccttcgatctggtgtacggcagcacccaacccctgggcagctcttgtgaccggtgccctggctggtacatgtttcagttccaccggatcctgcagtacgccctgccgagacaggagtcccagcggccattcttttggattttcatggacaacttgctgctgaccgaggatgaccaggaaactaccactcggttcctgcagaccgaagccgtgaccctgcaggacgtgagaggccgggactaccagaacgccatgcgggtgtggtccaacatccctggactgaaaagcaagcacgcacctctgacccctaaagaagaggagtacctgcaggcccaggtgcggagcagaagcaagctggacgcccctaaggtggatctgctggtgaagaattgcctcctgcccctgagagagtacttcaagtatttcagccagaatagtctgcccctgggcggcccaagcagcggcgcccctcctcccagcggcggcagcccagccggctccccaacctctaccgaggagggcacctctgagtccgccacccccgagagcggccctggcacctccaccgagcccagcgagggcagcgcacccggcagccctgccggcagccccacctccacagaggagggaaccagcaccgagcccagcgaaggcagcgccccaggcaccagcaccgagcctagtgagggcggctctggcggcggcagcgcccaggagattaaacggatcaacaagatcagaagaagacttgtgaaagacagcaacaccaagaaggccggcaagacaggccccatgaaaaccctgctggttagagtgatgacacccgatctgagagagcggctggaaaacctgagaaagaagcctgaaaatatcccccagcccatcagcaatacatctagagccaacctgaataagctgctgaccgattacaccgaaatgaagaaggcgatcctgcatgtgtactgggaagagttccagaaggaccctgtgggcctgatgagccgggtggcccagcctgccagcaagaagatcgatcagaacaagctgaaacctgagatggacgagaagggcaacctgaccaccgccggctttgcctgctctcagtgtggccagcccctgttcgtgtacaagctggagcaggtgtctgagaagggcaaggcttacaccaactacttcggacggtgcaatgtggccgagcacgaaaagctgatcctgctggcccagctgaagcccgagaaggatagcgacgaagccgtgacatatagcctgggaaagtttgggcagagggccctggatttctacagcattcatgtgaccaaggagtccacccaccccgtgaagcccctggcccagatcgccggaaacagatacgcctccggacctgtgggaaaggccctgagcgacgcatgtatgggcacaatcgcctccttcctgtctaagtaccaggacatcatcatcgaacaccagaaggtggtgaagggcaaccagaagagactggagagcctgcgggagctggccggcaaggaaaacctggaataccctagcgtgaccctgccacctcagcctcacaccaaggagggcgttgatgcctacaacgaagtgatcgcccgggtgcgaatgtgggtgaacctgaacctgtggcagaagctgaagctaagcagagatgatgccaagcctctgctgagactgaagggattcccttcctttcctctggtcgagagacaggccaacgaagtggactggtgggacatggtgtgtaacgtgaagaagctgatcaacgagaaaaaggaggatggcaaggtgttttggcagaatctggctggctacaagagacaggaagccctgagaccatacctgagcagcgaggaagatcggaagaagggaaagaaattcgctcggtaccagctgggcgacctgctgctgcacctggaaaagaagcacggcgaggactggggaaaggtgtacgacgaggcctgggagcggattgacaagaaagtggaaggcctgagcaagcacatcaagctggaagaggaacggagaagcgaggacgcccagagcaaggccgccctgaccgactggctgcgggctaaggccagcttcgtgatcgagggcctgaaggaggccgacaaggacgagttctgcagatgcgagctgaagctgcagaagtggtacggggacctgcggggaaagcccttcgccatcgaagccgagaacagcatcctggacatcagcggcttcagcaagcagtacaactgtgccttcatctggcagaaggacggcgtgaagaagctgaacctgtacctgatcatcaactacttcaagggcggcaagctgcggttcaagaagatcaaacctgaagccttcgaagccaacagattctacaccgtgatcaacaaaaagagcggcgagatcgtgcccatggaggtgaacttcaacttcgacgaccccaacctgatcatcctgcctctggcctttggcaagagacagggcagagaattcatctggaacgacctgctgtccctggaaaccggcagcctgaagctggccaacggaagagtgatcgagaagacactgtacaacagaagaacccggcaggatgagcctgccctgttcgtggccctgaccttcgagcggcgggaggtcctggactcctccaatatcaaaccaatgaacctgatcggcgtggcaagaggcgaaaacatccccgccgtgatcgccctgaccgaccccgagggctgcccactgagccggtttaaggatagcctgggaaacccaacccacatcctgagaatcggcgagagctataaggagaagcagcggaccatccaggccaagaaggaggtggagcagcggagagccggcggctacagccggaagtacgccagcaaagccaagaatctggcagacgatatggtgagaaacaccgctagagatctgctgtactacgccgtgacccaggatgccatgctgatcttcgccaacctgagccggggcttcggccggcagggcaagcggaccttcatggccgagagacagtacacacggatggaggactggctgaccgccaagctggcctacgagggcctgagcaagacctacctgtccaagacactggcccagtacacctccaagacatgcagcaactgtgggtttaccatcaccagcgccgactacgacagggtgctggagaagctgaagaagacagcaacaggctggatgaccacaattaacggcaaggagctgaaggtggagggccagattacctactacaacagatacaagagacagaacgtagtcaaggacctgtccgtcgagctggatagactgagcgaagaatctgtgaacaacgacatctcctcctggacaaagggcagaagcggagaagctctgagcctcctgaagaaaagattctcccatagacccgtgcaggagaagttcgtgtgcctgaactgcggcttcgagacacacgcagccgagcaagccgccctgaacatcgccagatcctggctgttcctgcggagccaggagtacaagaaataccagacaaacaagacaaccggcaacaccgataagagagccttcgtcgagacctggcagtccttttaccggaagaagcttaaggaggtgtggaaacctgccgtgcggtctggcggatctggcggaggctccacaagcagccaggaggtggtgaccttccaggacgtggccgtgaacttcaccagggaggagtggaggctgctgagccccccccagaaggagctgtacagggaggtgatgctggagaacgccaggaacctgctgagcgtgggcctgcccgccagcatcgaggacgtgatcagcaacgtggagcagagggaggccctgtggatgctggagagggagggcctgaggagctgctgccccgaggaggacatcaggaccagccccaagaaaaagagaaaagtctaagctgccttctgcggggcttgccttctggccatgcccttcttctctcccttgcacctgtacctcttggtctttgaataaagcctgagtaggaaggctagcaaaaaaaaaaaaaaaaaaaaaaaaaaaaaaaaaaaaaaaaaaaaaaaaaaaaaaaaaaaaaaaaaaaaaaaaaaaaaaaa

SEQ ID NO: 2965 - RNA, 5419 nt, synthetic construct
  source 1..5419: mol_type = other RNA
aggaaataagagagaaaagaagagtaagaagaaatataagagccaccatggcccctaagaagaagcgtaaagtgagccgggtgaacggcagcggcagcggcggcggcatgaaccacgaccaggagttcgacccccctaaggtgtaccctcccgtccccgccgagaagagaaagcccatccgggtcctgagcctgttcgatggcatcgccaccggtctgctggtgctgaaggacctgggcatccaggtggataggtacattgcctccgaggtgtgcgaggactccatcaccgtgggaatggtgcgtcatcagggcaagatcatgtacgtgggcgacgtgcggagcgtgacacagaagcatatccaggagtggggccctttcgacctggtgatcggcggcagcccttgcaatgacctgagcatcgtgaacccagcccggaagggcctgtacgagggaaccggcagactgttcttcgagttttacagactgctgcacgacgcccggcctaaggaaggcgacgaccggcccttcttttggctgttcgagaatgtggtggccatgggagtcagcgacaagcgggatattagccggttcctggagagcaaccccgtgatgatcgatgccaaggaagtgagcgccgcccaccgggccagatacttctggggcaatctgcctggcatgaacagacccctggccagcaccgtgaacgacaagctggagctgcaggagtgcctggagcacggccggatcgccaagttcagcaaggtgagaaccatcaccacccgaagcaacagcatcaaacaaggcaaggaccagcactttcctgtgttcatgaacgagaaggaggacatcctgtggtgtaccgagatggagagagtgttcgggttcccagtccactacacagatgtcagcaacatgtctagactggccagacagagactgctgggaagaagctggtccgtccctgtgatcagacacctgttcgcccctctgaaggagtacttcgcctgcgtgagcagcggcaacagcaacgccaacagccggggccccagcttctctagcggcctggtgccactgtccctgagagggagccacatgggccccatggagatctacaaaaccgtgagcgcctggaagcggcagcctgtgcgcgtgctgagcctgtttcggaatatcgataaagtcctgaaaagcctgggattcctggagagcggctctggctccggcggtggcaccctgaagtacgtggaggatgtgacaaacgtggtcagacgggatgtggagaagtggggccccttcgatctggtgtacggcagcacccaacccctgggcagctcttgtgaccggtgccctggctggtacatgtttcagttccaccggatcctgcagtacgccctgccgagacaggagtcccagcggccattcttttggattttcatggacaacttgctgctgaccgaggatgaccaggaaactaccactcggttcctgcagaccgaagccgtgaccctgcaggacgtgagaggccgggactaccagaacgccatgcgggtgtggtccaacatccctggactgaaaagcaagcacgcacctctgacccctaaagaagaggagtacctgcaggcccaggtgcggagcagaagcaagctggacgcccctaaggtggatctgctggtgaagaattgcctcctgcccctgagagagtacttcaagtatttcagccagaatagtctgcccctgggcggcccaagcagcggcgcccctcctcccagcggcggcagcccagccggctccccaacctctaccgaggagggcacctctgagtccgccacccccgagagcggccctggcacctccaccgagcccagcgagggcagcgcacccggcagccctgccggcagccccacctccacagaggagggaaccagcaccgagcccagcgaaggcagcgccccaggcaccagcaccgagcctagtgagggcggctctggcggcggcagcgcccaggagattaaacggatcaacaagatcagaagaagacttgtgaaagacagcaacaccaagaaggccggcaagacaggccccatgaaaaccctgctggttagagtgatgacacccgatctgagagagcggctggaaaacctgagaaagaagcctgaaaatatcccccagcccatcagcaatacatctagagccaacctgaataagctgctgaccgattacaccgaaatgaagaaggcgatcctgcatgtgtactgggaagagttccagaaggaccctgtgggcctgatgagccgggtggcccagcctgccagcaagaagatcgatcagaacaagctgaaacctgagatggacgagaagggcaacctgaccaccgccggctttgcctgctctcagtgtggccagcccctgttcgtgtacaagctggagcaggtgtctgagaagggcaaggcttacaccaactacttcggacggtgcaatgtggccgagcacgaaaagctgatcctgctggcccagctgaagcccgagaaggatagcgacgaagccgtgacatatagcctgggaaagtttgggcagagggccctggatttctacagcattcatgtgaccaaggagtccacccaccccgtgaagcccctggcccagatcgccggaaacagatacgcctccggacctgtgggaaaggccctgagcgacgcatgtatgggcacaatcgcctccttcctgtctaagtaccaggacatcatcatcgaacaccagaaggtggtgaagggcaaccagaagagactggagagcctgcgggagctggccggcaaggaaaacctggaataccctagcgtgaccctgccacctcagcctcacaccaaggagggcgttgatgcctacaacgaagtgatcgcccgggtgcgaatgtgggtgaacctgaacctgtggcagaagctgaagctaagcagagatgatgccaagcctctgctgagactgaagggattcccttcctttcctctggtcgagagacaggccaacgaagtggactggtgggacatggtgtgtaacgtgaagaagctgatcaacgagaaaaaggaggatggcaaggtgttttggcagaatctggctggctacaagagacaggaagccctgagaccatacctgagcagcgaggaagatcggaagaagggaaagaaattcgctcggtaccagctgggcgacctgctgctgcacctggaaaagaagcacggcgaggactggggaaaggtgtacgacgaggcctgggagcggattgacaagaaagtggaaggcctgagcaagcacatcaagctggaagaggaacggagaagcgaggacgcccagagcaaggccgccctgaccgactggctgcgggctaaggccagcttcgtgatcgagggcctgaaggaggccgacaaggacgagttctgcagatgcgagctgaagctgcagaagtggtacggggacctgcggggaaagcccttcgccatcgaagccgagaacagcatcctggacatcagcggcttcagcaagcagtacaactgtgccttcatctggcagaaggacggcgtgaagaagctgaacctgtacctgatcatcaactacttcaagggcggcaagctgcggttcaagaagatcaaacctgaagccttcgaagccaacagattctacaccgtgatcaacaaaaagagcggcgagatcgtgcccatggaggtgaacttcaacttcgacgaccccaacctgatcatcctgcctctggcctttggcaagagacagggcagagaattcatctggaacgacctgctgtccctggaaaccggcagcctgaagctggccaacggaagagtgatcgagaagacactgtacaacagaagaacccggcaggatgagcctgccctgttcgtggccctgaccttcgagcggcgggaggtcctggactcctccaatatcaaaccaatgaacctgatcggcgtggcaagaggcgaaaacatccccgccgtgatcgccctgaccgaccccgagggctgcccactgagccggtttaaggatagcctgggaaacccaacccacatcctgagaatcggcgagagctataaggagaagcagcggaccatccaggccaagaaggaggtggagcagcggagagccggcggctacagccggaagtacgccagcaaagccaagaatctggcagacgatatggtgagaaacaccgctagagatctgctgtactacgccgtgacccaggatgccatgctgatcttcgccaacctgagccggggcttcggccggcagggcaagcggaccttcatggccgagagacagtacacacggatggaggactggctgaccgccaagctggcctacgagggcctgagcaagacctacctgtccaagacactggcccagtacacctccaagacatgcagcaactgtgggtttaccatcaccagcgccgactacgacagggtgctggagaagctgaagaagacagcaacaggctggatgaccacaattaacggcaaggagctgaaggtggagggccagattacctactacaacagatacaagagacagaacgtagtcaaggacctgtccgtcgagctggatagactgagcgaagaatctgtgaacaacgacatctcctcctggacaaagggcagaagcggagaagctctgagcctcctgaagaaaagattctcccatagacccgtgcaggagaagttcgtgtgcctgaactgcggcttcgagacacacgcagccgagcaagccgccctgaacatcgccagatcctggctgttcctgcggagccaggagtacaagaaataccagacaaacaagacaaccggcaacaccgataagagagccttcgtcgagacctggcagtccttttaccggaagaagcttaaggaggtgtggaaacctgccgtgcggtctggcggatctggcggaggctccacaagcgagagcgtggccttcgaggacgtggccgtgtacttcacccagaaccagtggggcagcctggaccccgcccagagggccctgtacagggaggtgatgctggagaactacgccaacgtggccagcctggtggccttccccttccccaagcccgccctgatcagccacctggagaagggcgaggccccctggggccccgacccctgggacgccgagatccccagcggcatcagccagggcggcgagaccagccccaagaaaaagagaaaagtctaagctgccttctgcggggcttgccttctggccatgcccttcttctctcccttgcacctgtacctcttggtctttgaataaagcctgagtaggaaggctagcaaaaaaaaaaaaaaaaaaaaaaaaaaaaaaaaaaaaaaaaaaaaaaaaaaaaaaaaaaaaaaaaaaaaaaaaaaaaaaaa

SEQ ID NO: 2966 - RNA, 5419 nt, synthetic construct
  source 1..5419: mol_type = other RNA
aggaaataagagagaaaagaagagtaagaagaaatataagagccaccatggcccctaagaagaagcgtaaagtgagccgggtgaacggcagcggcagcggcggcggcatgaaccacgaccaggagttcgacccccctaaggtgtaccctcccgtccccgccgagaagagaaagcccatccgggtcctgagcctgttcgatggcatcgccaccggtctgctggtgctgaaggacctgggcatccaggtggataggtacattgcctccgaggtgtgcgaggactccatcaccgtgggaatggtgcgtcatcagggcaagatcatgtacgtgggcgacgtgcggagcgtgacacagaagcatatccaggagtggggccctttcgacctggtgatcggcggcagcccttgcaatgacctgagcatcgtgaacccagcccggaagggcctgtacgagggaaccggcagactgttcttcgagttttacagactgctgcacgacgcccggcctaaggaaggcgacgaccggcccttcttttggctgttcgagaatgtggtggccatgggagtcagcgacaagcgggatattagccggttcctggagagcaaccccgtgatgatcgatgccaaggaagtgagcgccgcccaccgggccagatacttctggggcaatctgcctggcatgaacagacccctggccagcaccgtgaacgacaagctggagctgcaggagtgcctggagcacggccggatcgccaagttcagcaaggtgagaaccatcaccacccgaagcaacagcatcaaacaaggcaaggaccagcactttcctgtgttcatgaacgagaaggaggacatcctgtggtgtaccgagatggagagagtgttcgggttcccagtccactacacagatgtcagcaacatgtctagactggccagacagagactgctgggaagaagctggtccgtccctgtgatcagacacctgttcgcccctctgaaggagtacttcgcctgcgtgagcagcggcaacagcaacgccaacagccggggccccagcttctctagcggcctggtgccactgtccctgagagggagccacatgggccccatggagatctacaaaaccgtgagcgcctggaagcggcagcctgtgcgcgtgctgagcctgtttcggaatatcgataaagtcctgaaaagcctgggattcctggagagcggctctggctccggcggtggcaccctgaagtacgtggaggatgtgacaaacgtggtcagacgggatgtggagaagtggggccccttcgatctggtgtacggcagcacccaacccctgggcagctcttgtgaccggtgccctggctggtacatgtttcagttccaccggatcctgcagtacgccctgccgagacaggagtcccagcggccattcttttggattttcatggacaacttgctgctgaccgaggatgaccaggaaactaccactcggttcctgcagaccgaagccgtgaccctgcaggacgtgagaggccgggactaccagaacgccatgcgggtgtggtccaacatccctggactgaaaagcaagcacgcacctctgacccctaaagaagaggagtacctgcaggcccaggtgcggagcagaagcaagctggacgcccctaaggtggatctgctggtgaagaattgcctcctgcccctgagagagtacttcaagtatttcagccagaatagtctgcccctgggcggcccaagcagcggcgcccctcctcccagcggcggcagcccagccggctccccaacctctaccgaggagggcacctctgagtccgccacccccgagagcggccctggcacctccaccgagcccagcgagggcagcgcacccggcagccctgccggcagccccacctccacagaggagggaaccagcaccgagcccagcgaaggcagcgccccaggcaccagcaccgagcctagtgagggcggctctggcggcggcagcgcccaggagattaaacggatcaacaagatcagaagaagacttgtgaaagacagcaacaccaagaaggccggcaagacaggccccatgaaaaccctgctggttagagtgatgacacccgatctgagagagcggctggaaaacctgagaaagaagcctgaaaatatcccccagcccatcagcaatacatctagagccaacctgaataagctgctgaccgattacaccgaaatgaagaaggcgatcctgcatgtgtactgggaagagttccagaaggaccctgtgggcctgatgagccgggtggcccagcctgccagcaagaagatcgatcagaacaagctgaaacctgagatggacgagaagggcaacctgaccaccgccggctttgcctgctctcagtgtggccagcccctgttcgtgtacaagctggagcaggtgtctgagaagggcaaggcttacaccaactacttcggacggtgcaatgtggccgagcacgaaaagctgatcctgctggcccagctgaagcccgagaaggatagcgacgaagccgtgacatatagcctgggaaagtttgggcagagggccctggatttctacagcattcatgtgaccaaggagtccacccaccccgtgaagcccctggcccagatcgccggaaacagatacgcctccggacctgtgggaaaggccctgagcgacgcatgtatgggcacaatcgcctccttcctgtctaagtaccaggacatcatcatcgaacaccagaaggtggtgaagggcaaccagaagagactggagagcctgcgggagctggccggcaaggaaaacctggaataccctagcgtgaccctgccacctcagcctcacaccaaggagggcgttgatgcctacaacgaagtgatcgcccgggtgcgaatgtgggtgaacctgaacctgtggcagaagctgaagctaagcagagatgatgccaagcctctgctgagactgaagggattcccttcctttcctctggtcgagagacaggccaacgaagtggactggtgggacatggtgtgtaacgtgaagaagctgatcaacgagaaaaaggaggatggcaaggtgttttggcagaatctggctggctacaagagacaggaagccctgagaccatacctgagcagcgaggaagatcggaagaagggaaagaaattcgctcggtaccagctgggcgacctgctgctgcacctggaaaagaagcacggcgaggactggggaaaggtgtacgacgaggcctgggagcggattgacaagaaagtggaaggcctgagcaagcacatcaagctggaagaggaacggagaagcgaggacgcccagagcaaggccgccctgaccgactggctgcgggctaaggccagcttcgtgatcgagggcctgaaggaggccgacaaggacgagttctgcagatgcgagctgaagctgcagaagtggtacggggacctgcggggaaagcccttcgccatcgaagccgagaacagcatcctggacatcagcggcttcagcaagcagtacaactgtgccttcatctggcagaaggacggcgtgaagaagctgaacctgtacctgatcatcaactacttcaagggcggcaagctgcggttcaagaagatcaaacctgaagccttcgaagccaacagattctacaccgtgatcaacaaaaagagcggcgagatcgtgcccatggaggtgaacttcaacttcgacgaccccaacctgatcatcctgcctctggcctttggcaagagacagggcagagaattcatctggaacgacctgctgtccctggaaaccggcagcctgaagctggccaacggaagagtgatcgagaagacactgtacaacagaagaacccggcaggatgagcctgccctgttcgtggccctgaccttcgagcggcgggaggtcctggactcctccaatatcaaaccaatgaacctgatcggcgtggcaagaggcgaaaacatccccgccgtgatcgccctgaccgaccccgagggctgcccactgagccggtttaaggatagcctgggaaacccaacccacatcctgagaatcggcgagagctataaggagaagcagcggaccatccaggccaagaaggaggtggagcagcggagagccggcggctacagccggaagtacgccagcaaagccaagaatctggcagacgatatggtgagaaacaccgctagagatctgctgtactacgccgtgacccaggatgccatgctgatcttcgccaacctgagccggggcttcggccggcagggcaagcggaccttcatggccgagagacagtacacacggatggaggactggctgaccgccaagctggcctacgagggcctgagcaagacctacctgtccaagacactggcccagtacacctccaagacatgcagcaactgtgggtttaccatcaccagcgccgactacgacagggtgctggagaagctgaagaagacagcaacaggctggatgaccacaattaacggcaaggagctgaaggtggagggccagattacctactacaacagatacaagagacagaacgtagtcaaggacctgtccgtcgagctggatagactgagcgaagaatctgtgaacaacgacatctcctcctggacaaagggcagaagcggagaagctctgagcctcctgaagaaaagattctcccatagacccgtgcaggagaagttcgtgtgcctgaactgcggcttcgagacacacgcagccgagcaagccgccctgaacatcgccagatcctggctgttcctgcggagccaggagtacaagaaataccagacaaacaagacaaccggcaacaccgataagagagccttcgtcgagacctggcagtccttttaccggaagaagcttaaggaggtgtggaaacctgccgtgcggtctggcggatctggcggaggctccacaagcagcgagggcctggtgaccttcggcgacgtggccgtggacttcagccaggaggagtgggagtggctgaaccccgcccagaggagcctgtacaggaaggtgatgctggacaactacaggagcctggtgagcctgggcgtgagcgtgagcaagcccgacgtgatcagcctgctggagcagggcaaggagccctggctggtgaaggaggagggccccaggggcgccaggagcgactgggagtacgccaccagccccaagaaaaagagaaaagtctaagctgccttctgcggggcttgccttctggccatgcccttcttctctcccttgcacctgtacctcttggtctttgaataaagcctgagtaggaaggctagcaaaaaaaaaaaaaaaaaaaaaaaaaaaaaaaaaaaaaaaaaaaaaaaaaaaaaaaaaaaaaaaaaaaaaaaaaaaaaaaa

SEQ ID NO: 2967 - RNA, 5419 nt, synthetic construct
  source 1..5419: mol_type = other RNA
aggaaataagagagaaaagaagagtaagaagaaatataagagccaccatggcccctaagaagaagcgtaaagtgagccgggtgaacggcagcggcagcggcggcggcatgaaccacgaccaggagttcgacccccctaaggtgtaccctcccgtccccgccgagaagagaaagcccatccgggtcctgagcctgttcgatggcatcgccaccggtctgctggtgctgaaggacctgggcatccaggtggataggtacattgcctccgaggtgtgcgaggactccatcaccgtgggaatggtgcgtcatcagggcaagatcatgtacgtgggcgacgtgcggagcgtgacacagaagcatatccaggagtggggccctttcgacctggtgatcggcggcagcccttgcaatgacctgagcatcgtgaacccagcccggaagggcctgtacgagggaaccggcagactgttcttcgagttttacagactgctgcacgacgcccggcctaaggaaggcgacgaccggcccttcttttggctgttcgagaatgtggtggccatgggagtcagcgacaagcgggatattagccggttcctggagagcaaccccgtgatgatcgatgccaaggaagtgagcgccgcccaccgggccagatacttctggggcaatctgcctggcatgaacagacccctggccagcaccgtgaacgacaagctggagctgcaggagtgcctggagcacggccggatcgccaagttcagcaaggtgagaaccatcaccacccgaagcaacagcatcaaacaaggcaaggaccagcactttcctgtgttcatgaacgagaaggaggacatcctgtggtgtaccgagatggagagagtgttcgggttcccagtccactacacagatgtcagcaacatgtctagactggccagacagagactgctgggaagaagctggtccgtccctgtgatcagacacctgttcgcccctctgaaggagtacttcgcctgcgtgagcagcggcaacagcaacgccaacagccggggccccagcttctctagcggcctggtgccactgtccctgagagggagccacatgggccccatggagatctacaaaaccgtgagcgcctggaagcggcagcctgtgcgcgtgctgagcctgtttcggaatatcgataaagtcctgaaaagcctgggattcctggagagcggctctggctccggcggtggcaccctgaagtacgtggaggatgtgacaaacgtggtcagacgggatgtggagaagtggggccccttcgatctggtgtacggcagcacccaacccctgggcagctcttgtgaccggtgccctggctggtacatgtttcagttccaccggatcctgcagtacgccctgccgagacaggagtcccagcggccattcttttggattttcatggacaacttgctgctgaccgaggatgaccaggaaactaccactcggttcctgcagaccgaagccgtgaccctgcaggacgtgagaggccgggactaccagaacgccatgcgggtgtggtccaacatccctggactgaaaagcaagcacgcacctctgacccctaaagaagaggagtacctgcaggcccaggtgcggagcagaagcaagctggacgcccctaaggtggatctgctggtgaagaattgcctcctgcccctgagagagtacttcaagtatttcagccagaatagtctgcccctgggcggcccaagcagcggcgcccctcctcccagcggcggcagcccagccggctccccaacctctaccgaggagggcacctctgagtccgccacccccgagagcggccctggcacctccaccgagcccagcgagggcagcgcacccggcagccctgccggcagccccacctccacagaggagggaaccagcaccgagcccagcgaaggcagcgccccaggcaccagcaccgagcctagtgagggcggctctggcggcggcagcgcccaggagattaaacggatcaacaagatcagaagaagacttgtgaaagacagcaacaccaagaaggccggcaagacaggccccatgaaaaccctgctggttagagtgatgacacccgatctgagagagcggctggaaaacctgagaaagaagcctgaaaatatcccccagcccatcagcaatacatctagagccaacctgaataagctgctgaccgattacaccgaaatgaagaaggcgatcctgcatgtgtactgggaagagttccagaaggaccctgtgggcctgatgagccgggtggcccagcctgccagcaagaagatcgatcagaacaagctgaaacctgagatggacgagaagggcaacctgaccaccgccggctttgcctgctctcagtgtggccagcccctgttcgtgtacaagctggagcaggtgtctgagaagggcaaggcttacaccaactacttcggacggtgcaatgtggccgagcacgaaaagctgatcctgctggcccagctgaagcccgagaaggatagcgacgaagccgtgacatatagcctgggaaagtttgggcagagggccctggatttctacagcattcatgtgaccaaggagtccacccaccccgtgaagcccctggcccagatcgccggaaacagatacgcctccggacctgtgggaaaggccctgagcgacgcatgtatgggcacaatcgcctccttcctgtctaagtaccaggacatcatcatcgaacaccagaaggtggtgaagggcaaccagaagagactggagagcctgcgggagctggccggcaaggaaaacctggaataccctagcgtgaccctgccacctcagcctcacaccaaggagggcgttgatgcctacaacgaagtgatcgcccgggtgcgaatgtgggtgaacctgaacctgtggcagaagctgaagctaagcagagatgatgccaagcctctgctgagactgaagggattcccttcctttcctctggtcgagagacaggccaacgaagtggactggtgggacatggtgtgtaacgtgaagaagctgatcaacgagaaaaaggaggatggcaaggtgttttggcagaatctggctggctacaagagacaggaagccctgagaccatacctgagcagcgaggaagatcggaagaagggaaagaaattcgctcggtaccagctgggcgacctgctgctgcacctggaaaagaagcacggcgaggactggggaaaggtgtacgacgaggcctgggagcggattgacaagaaagtggaaggcctgagcaagcacatcaagctggaagaggaacggagaagcgaggacgcccagagcaaggccgccctgaccgactggctgcgggctaaggccagcttcgtgatcgagggcctgaaggaggccgacaaggacgagttctgcagatgcgagctgaagctgcagaagtggtacggggacctgcggggaaagcccttcgccatcgaagccgagaacagcatcctggacatcagcggcttcagcaagcagtacaactgtgccttcatctggcagaaggacggcgtgaagaagctgaacctgtacctgatcatcaactacttcaagggcggcaagctgcggttcaagaagatcaaacctgaagccttcgaagccaacagattctacaccgtgatcaacaaaaagagcggcgagatcgtgcccatggaggtgaacttcaacttcgacgaccccaacctgatcatcctgcctctggcctttggcaagagacagggcagagaattcatctggaacgacctgctgtccctggaaaccggcagcctgaagctggccaacggaagagtgatcgagaagacactgtacaacagaagaacccggcaggatgagcctgccctgttcgtggccctgaccttcgagcggcgggaggtcctggactcctccaatatcaaaccaatgaacctgatcggcgtggcaagaggcgaaaacatccccgccgtgatcgccctgaccgaccccgagggctgcccactgagccggtttaaggatagcctgggaaacccaacccacatcctgagaatcggcgagagctataaggagaagcagcggaccatccaggccaagaaggaggtggagcagcggagagccggcggctacagccggaagtacgccagcaaagccaagaatctggcagacgatatggtgagaaacaccgctagagatctgctgtactacgccgtgacccaggatgccatgctgatcttcgccaacctgagccggggcttcggccggcagggcaagcggaccttcatggccgagagacagtacacacggatggaggactggctgaccgccaagctggcctacgagggcctgagcaagacctacctgtccaagacactggcccagtacacctccaagacatgcagcaactgtgggtttaccatcaccagcgccgactacgacagggtgctggagaagctgaagaagacagcaacaggctggatgaccacaattaacggcaaggagctgaaggtggagggccagattacctactacaacagatacaagagacagaacgtagtcaaggacctgtccgtcgagctggatagactgagcgaagaatctgtgaacaacgacatctcctcctggacaaagggcagaagcggagaagctctgagcctcctgaagaaaagattctcccatagacccgtgcaggagaagttcgtgtgcctgaactgcggcttcgagacacacgcagccgagcaagccgccctgaacatcgccagatcctggctgttcctgcggagccaggagtacaagaaataccagacaaacaagacaaccggcaacaccgataagagagccttcgtcgagacctggcagtccttttaccggaagaagcttaaggaggtgtggaaacctgccgtgcggtctggcggatctggcggaggctccacaagcgaggagctgcccgtggtgttcgaggacgtggccgtgtacttcaccagggaggagtggggcatgctggtgaagaggcagaaggagctgtacagggacgtgatgaggatgaactacgagctgctggccagcctgggccccgccgccgccaagcccgacctgatcctgaagctggagaggagggccgccccctggatcaaggaccccaacggccccaagtggggcaagggcaggccccccggcaagaccagccccaagaaaaagagaaaagtctaagctgccttctgcggggcttgccttctggccatgcccttcttctctcccttgcacctgtacctcttggtctttgaataaagcctgagtaggaaggctagcaaaaaaaaaaaaaaaaaaaaaaaaaaaaaaaaaaaaaaaaaaaaaaaaaaaaaaaaaaaaaaaaaaaaaaaaaaaaaaaa

SEQ ID NO: 2968 - RNA, 5419 nt, synthetic construct
  source 1..5419: mol_type = other RNA
aggaaataagagagaaaagaagagtaagaagaaatataagagccaccatggcccctaagaagaagcgtaaagtgagccgggtgaacggcagcggcagcggcggcggcatgaaccacgaccaggagttcgacccccctaaggtgtaccctcccgtccccgccgagaagagaaagcccatccgggtcctgagcctgttcgatggcatcgccaccggtctgctggtgctgaaggacctgggcatccaggtggataggtacattgcctccgaggtgtgcgaggactccatcaccgtgggaatggtgcgtcatcagggcaagatcatgtacgtgggcgacgtgcggagcgtgacacagaagcatatccaggagtggggccctttcgacctggtgatcggcggcagcccttgcaatgacctgagcatcgtgaacccagcccggaagggcctgtacgagggaaccggcagactgttcttcgagttttacagactgctgcacgacgcccggcctaaggaaggcgacgaccggcccttcttttggctgttcgagaatgtggtggccatgggagtcagcgacaagcgggatattagccggttcctggagagcaaccccgtgatgatcgatgccaaggaagtgagcgccgcccaccgggccagatacttctggggcaatctgcctggcatgaacagacccctggccagcaccgtgaacgacaagctggagctgcaggagtgcctggagcacggccggatcgccaagttcagcaaggtgagaaccatcaccacccgaagcaacagcatcaaacaaggcaaggaccagcactttcctgtgttcatgaacgagaaggaggacatcctgtggtgtaccgagatggagagagtgttcgggttcccagtccactacacagatgtcagcaacatgtctagactggccagacagagactgctgggaagaagctggtccgtccctgtgatcagacacctgttcgcccctctgaaggagtacttcgcctgcgtgagcagcggcaacagcaacgccaacagccggggccccagcttctctagcggcctggtgccactgtccctgagagggagccacatgggccccatggagatctacaaaaccgtgagcgcctggaagcggcagcctgtgcgcgtgctgagcctgtttcggaatatcgataaagtcctgaaaagcctgggattcctggagagcggctctggctccggcggtggcaccctgaagtacgtggaggatgtgacaaacgtggtcagacgggatgtggagaagtggggccccttcgatctggtgtacggcagcacccaacccctgggcagctcttgtgaccggtgccctggctggtacatgtttcagttccaccggatcctgcagtacgccctgccgagacaggagtcccagcggccattcttttggattttcatggacaacttgctgctgaccgaggatgaccaggaaactaccactcggttcctgcagaccgaagccgtgaccctgcaggacgtgagaggccgggactaccagaacgccatgcgggtgtggtccaacatccctggactgaaaagcaagcacgcacctctgacccctaaagaagaggagtacctgcaggcccaggtgcggagcagaagcaagctggacgcccctaaggtggatctgctggtgaagaattgcctcctgcccctgagagagtacttcaagtatttcagccagaatagtctgcccctgggcggcccaagcagcggcgcccctcctcccagcggcggcagcccagccggctccccaacctctaccgaggagggcacctctgagtccgccacccccgagagcggccctggcacctccaccgagcccagcgagggcagcgcacccggcagccctgccggcagccccacctccacagaggagggaaccagcaccgagcccagcgaaggcagcgccccaggcaccagcaccgagcctagtgagggcggctctggcggcggcagcgcccaggagattaaacggatcaacaagatcagaagaagacttgtgaaagacagcaacaccaagaaggccggcaagacaggccccatgaaaaccctgctggttagagtgatgacacccgatctgagagagcggctggaaaacctgagaaagaagcctgaaaatatcccccagcccatcagcaatacatctagagccaacctgaataagctgctgaccgattacaccgaaatgaagaaggcgatcctgcatgtgtactgggaagagttccagaaggaccctgtgggcctgatgagccgggtggcccagcctgccagcaagaagatcgatcagaacaagctgaaacctgagatggacgagaagggcaacctgaccaccgccggctttgcctgctctcagtgtggccagcccctgttcgtgtacaagctggagcaggtgtctgagaagggcaaggcttacaccaactacttcggacggtgcaatgtggccgagcacgaaaagctgatcctgctggcccagctgaagcccgagaaggatagcgacgaagccgtgacatatagcctgggaaagtttgggcagagggccctggatttctacagcattcatgtgaccaaggagtccacccaccccgtgaagcccctggcccagatcgccggaaacagatacgcctccggacctgtgggaaaggccctgagcgacgcatgtatgggcacaatcgcctccttcctgtctaagtaccaggacatcatcatcgaacaccagaaggtggtgaagggcaaccagaagagactggagagcctgcgggagctggccggcaaggaaaacctggaataccctagcgtgaccctgccacctcagcctcacaccaaggagggcgttgatgcctacaacgaagtgatcgcccgggtgcgaatgtgggtgaacctgaacctgtggcagaagctgaagctaagcagagatgatgccaagcctctgctgagactgaagggattcccttcctttcctctggtcgagagacaggccaacgaagtggactggtgggacatggtgtgtaacgtgaagaagctgatcaacgagaaaaaggaggatggcaaggtgttttggcagaatctggctggctacaagagacaggaagccctgagaccatacctgagcagcgaggaagatcggaagaagggaaagaaattcgctcggtaccagctgggcgacctgctgctgcacctggaaaagaagcacggcgaggactggggaaaggtgtacgacgaggcctgggagcggattgacaagaaagtggaaggcctgagcaagcacatcaagctggaagaggaacggagaagcgaggacgcccagagcaaggccgccctgaccgactggctgcgggctaaggccagcttcgtgatcgagggcctgaaggaggccgacaaggacgagttctgcagatgcgagctgaagctgcagaagtggtacggggacctgcggggaaagcccttcgccatcgaagccgagaacagcatcctggacatcagcggcttcagcaagcagtacaactgtgccttcatctggcagaaggacggcgtgaagaagctgaacctgtacctgatcatcaactacttcaagggcggcaagctgcggttcaagaagatcaaacctgaagccttcgaagccaacagattctacaccgtgatcaacaaaaagagcggcgagatcgtgcccatggaggtgaacttcaacttcgacgaccccaacctgatcatcctgcctctggcctttggcaagagacagggcagagaattcatctggaacgacctgctgtccctggaaaccggcagcctgaagctggccaacggaagagtgatcgagaagacactgtacaacagaagaacccggcaggatgagcctgccctgttcgtggccctgaccttcgagcggcgggaggtcctggactcctccaatatcaaaccaatgaacctgatcggcgtggcaagaggcgaaaacatccccgccgtgatcgccctgaccgaccccgagggctgcccactgagccggtttaaggatagcctgggaaacccaacccacatcctgagaatcggcgagagctataaggagaagcagcggaccatccaggccaagaaggaggtggagcagcggagagccggcggctacagccggaagtacgccagcaaagccaagaatctggcagacgatatggtgagaaacaccgctagagatctgctgtactacgccgtgacccaggatgccatgctgatcttcgccaacctgagccggggcttcggccggcagggcaagcggaccttcatggccgagagacagtacacacggatggaggactggctgaccgccaagctggcctacgagggcctgagcaagacctacctgtccaagacactggcccagtacacctccaagacatgcagcaactgtgggtttaccatcaccagcgccgactacgacagggtgctggagaagctgaagaagacagcaacaggctggatgaccacaattaacggcaaggagctgaaggtggagggccagattacctactacaacagatacaagagacagaacgtagtcaaggacctgtccgtcgagctggatagactgagcgaagaatctgtgaacaacgacatctcctcctggacaaagggcagaagcggagaagctctgagcctcctgaagaaaagattctcccatagacccgtgcaggagaagttcgtgtgcctgaactgcggcttcgagacacacgcagccgagcaagccgccctgaacatcgccagatcctggctgttcctgcggagccaggagtacaagaaataccagacaaacaagacaaccggcaacaccgataagagagccttcgtcgagacctggcagtccttttaccggaagaagcttaaggaggtgtggaaacctgccgtgcggtctggcggatctggcggaggctccacaagcatggccgccgtgagccccaccaccaggtgccaggagagcgtgaccttcgaggacgtggccgtggtgttcaccgacgaggagtggagccacctggtgcccacccagagggacctgtacaaggaggtgatgctggagaactacaacagcatcgtgagcctgggcctgcccgtgccccagcccgacgtgatcttccagctgaagaggggcgacaagccctggatggtggacctgcacggcagcgagaccagccccaagaaaaagagaaaagtctaagctgccttctgcggggcttgccttctggccatgcccttcttctctcccttgcacctgtacctcttggtctttgaataaagcctgagtaggaaggctagcaaaaaaaaaaaaaaaaaaaaaaaaaaaaaaaaaaaaaaaaaaaaaaaaaaaaaaaaaaaaaaaaaaaaaaaaaaaaaaaa

SEQ ID NO: 2969 - RNA, 5419 nt, synthetic construct
  source 1..5419: mol_type = other RNA
aggaaataagagagaaaagaagagtaagaagaaatataagagccaccatggcccctaagaagaagcgtaaagtgagccgggtgaacggcagcggcagcggcggcggcatgaaccacgaccaggagttcgacccccctaaggtgtaccctcccgtccccgccgagaagagaaagcccatccgggtcctgagcctgttcgatggcatcgccaccggtctgctggtgctgaaggacctgggcatccaggtggataggtacattgcctccgaggtgtgcgaggactccatcaccgtgggaatggtgcgtcatcagggcaagatcatgtacgtgggcgacgtgcggagcgtgacacagaagcatatccaggagtggggccctttcgacctggtgatcggcggcagcccttgcaatgacctgagcatcgtgaacccagcccggaagggcctgtacgagggaaccggcagactgttcttcgagttttacagactgctgcacgacgcccggcctaaggaaggcgacgaccggcccttcttttggctgttcgagaatgtggtggccatgggagtcagcgacaagcgggatattagccggttcctggagagcaaccccgtgatgatcgatgccaaggaagtgagcgccgcccaccgggccagatacttctggggcaatctgcctggcatgaacagacccctggccagcaccgtgaacgacaagctggagctgcaggagtgcctggagcacggccggatcgccaagttcagcaaggtgagaaccatcaccacccgaagcaacagcatcaaacaaggcaaggaccagcactttcctgtgttcatgaacgagaaggaggacatcctgtggtgtaccgagatggagagagtgttcgggttcccagtccactacacagatgtcagcaacatgtctagactggccagacagagactgctgggaagaagctggtccgtccctgtgatcagacacctgttcgcccctctgaaggagtacttcgcctgcgtgagcagcggcaacagcaacgccaacagccggggccccagcttctctagcggcctggtgccactgtccctgagagggagccacatgggccccatggagatctacaaaaccgtgagcgcctggaagcggcagcctgtgcgcgtgctgagcctgtttcggaatatcgataaagtcctgaaaagcctgggattcctggagagcggctctggctccggcggtggcaccctgaagtacgtggaggatgtgacaaacgtggtcagacgggatgtggagaagtggggccccttcgatctggtgtacggcagcacccaacccctgggcagctcttgtgaccggtgccctggctggtacatgtttcagttccaccggatcctgcagtacgccctgccgagacaggagtcccagcggccattcttttggattttcatggacaacttgctgctgaccgaggatgaccaggaaactaccactcggttcctgcagaccgaagccgtgaccctgcaggacgtgagaggccgggactaccagaacgccatgcgggtgtggtccaacatccctggactgaaaagcaagcacgcacctctgacccctaaagaagaggagtacctgcaggcccaggtgcggagcagaagcaagctggacgcccctaaggtggatctgctggtgaagaattgcctcctgcccctgagagagtacttcaagtatttcagccagaatagtctgcccctgggcggcccaagcagcggcgcccctcctcccagcggcggcagcccagccggctccccaacctctaccgaggagggcacctctgagtccgccacccccgagagcggccctggcacctccaccgagcccagcgagggcagcgcacccggcagccctgccggcagccccacctccacagaggagggaaccagcaccgagcccagcgaaggcagcgccccaggcaccagcaccgagcctagtgagggcggctctggcggcggcagcgcccaggagattaaacggatcaacaagatcagaagaagacttgtgaaagacagcaacaccaagaaggccggcaagacaggccccatgaaaaccctgctggttagagtgatgacacccgatctgagagagcggctggaaaacctgagaaagaagcctgaaaatatcccccagcccatcagcaatacatctagagccaacctgaataagctgctgaccgattacaccgaaatgaagaaggcgatcctgcatgtgtactgggaagagttccagaaggaccctgtgggcctgatgagccgggtggcccagcctgccagcaagaagatcgatcagaacaagctgaaacctgagatggacgagaagggcaacctgaccaccgccggctttgcctgctctcagtgtggccagcccctgttcgtgtacaagctggagcaggtgtctgagaagggcaaggcttacaccaactacttcggacggtgcaatgtggccgagcacgaaaagctgatcctgctggcccagctgaagcccgagaaggatagcgacgaagccgtgacatatagcctgggaaagtttgggcagagggccctggatttctacagcattcatgtgaccaaggagtccacccaccccgtgaagcccctggcccagatcgccggaaacagatacgcctccggacctgtgggaaaggccctgagcgacgcatgtatgggcacaatcgcctccttcctgtctaagtaccaggacatcatcatcgaacaccagaaggtggtgaagggcaaccagaagagactggagagcctgcgggagctggccggcaaggaaaacctggaataccctagcgtgaccctgccacctcagcctcacaccaaggagggcgttgatgcctacaacgaagtgatcgcccgggtgcgaatgtgggtgaacctgaacctgtggcagaagctgaagctaagcagagatgatgccaagcctctgctgagactgaagggattcccttcctttcctctggtcgagagacaggccaacgaagtggactggtgggacatggtgtgtaacgtgaagaagctgatcaacgagaaaaaggaggatggcaaggtgttttggcagaatctggctggctacaagagacaggaagccctgagaccatacctgagcagcgaggaagatcggaagaagggaaagaaattcgctcggtaccagctgggcgacctgctgctgcacctggaaaagaagcacggcgaggactggggaaaggtgtacgacgaggcctgggagcggattgacaagaaagtggaaggcctgagcaagcacatcaagctggaagaggaacggagaagcgaggacgcccagagcaaggccgccctgaccgactggctgcgggctaaggccagcttcgtgatcgagggcctgaaggaggccgacaaggacgagttctgcagatgcgagctgaagctgcagaagtggtacggggacctgcggggaaagcccttcgccatcgaagccgagaacagcatcctggacatcagcggcttcagcaagcagtacaactgtgccttcatctggcagaaggacggcgtgaagaagctgaacctgtacctgatcatcaactacttcaagggcggcaagctgcggttcaagaagatcaaacctgaagccttcgaagccaacagattctacaccgtgatcaacaaaaagagcggcgagatcgtgcccatggaggtgaacttcaacttcgacgaccccaacctgatcatcctgcctctggcctttggcaagagacagggcagagaattcatctggaacgacctgctgtccctggaaaccggcagcctgaagctggccaacggaagagtgatcgagaagacactgtacaacagaagaacccggcaggatgagcctgccctgttcgtggccctgaccttcgagcggcgggaggtcctggactcctccaatatcaaaccaatgaacctgatcggcgtggcaagaggcgaaaacatccccgccgtgatcgccctgaccgaccccgagggctgcccactgagccggtttaaggatagcctgggaaacccaacccacatcctgagaatcggcgagagctataaggagaagcagcggaccatccaggccaagaaggaggtggagcagcggagagccggcggctacagccggaagtacgccagcaaagccaagaatctggcagacgatatggtgagaaacaccgctagagatctgctgtactacgccgtgacccaggatgccatgctgatcttcgccaacctgagccggggcttcggccggcagggcaagcggaccttcatggccgagagacagtacacacggatggaggactggctgaccgccaagctggcctacgagggcctgagcaagacctacctgtccaagacactggcccagtacacctccaagacatgcagcaactgtgggtttaccatcaccagcgccgactacgacagggtgctggagaagctgaagaagacagcaacaggctggatgaccacaattaacggcaaggagctgaaggtggagggccagattacctactacaacagatacaagagacagaacgtagtcaaggacctgtccgtcgagctggatagactgagcgaagaatctgtgaacaacgacatctcctcctggacaaagggcagaagcggagaagctctgagcctcctgaagaaaagattctcccatagacccgtgcaggagaagttcgtgtgcctgaactgcggcttcgagacacacgcagccgagcaagccgccctgaacatcgccagatcctggctgttcctgcggagccaggagtacaagaaataccagacaaacaagacaaccggcaacaccgataagagagccttcgtcgagacctggcagtccttttaccggaagaagcttaaggaggtgtggaaacctgccgtgcggtctggcggatctggcggaggctccacaagcgcccaggtgagcgtgaccttcgacgacgtggccgtgaccttcacccaggaggagtggggccacctggagcccgcccagaggaccctgtaccaggaggtgatgctggagacctgcaggctgctgatgagcctgggctgccccgtgcccaggcccgagctgatctaccagctggagcacggccaggagctgtggaccgtgaagagggacctgagcaggagcacctgccccggctacagcagcgagaccagccccaagaaaaagagaaaagtctaagctgccttctgcggggcttgccttctggccatgcccttcttctctcccttgcacctgtacctcttggtctttgaataaagcctgagtaggaaggctagcaaaaaaaaaaaaaaaaaaaaaaaaaaaaaaaaaaaaaaaaaaaaaaaaaaaaaaaaaaaaaaaaaaaaaaaaaaaaaaaa

SEQ ID NO: 2970 - RNA, 5419 nt, synthetic construct
  source 1..5419: mol_type = other RNA
aggaaataagagagaaaagaagagtaagaagaaatataagagccaccatggcccctaagaagaagcgtaaagtgagccgggtgaacggcagcggcagcggcggcggcatgaaccacgaccaggagttcgacccccctaaggtgtaccctcccgtccccgccgagaagagaaagcccatccgggtcctgagcctgttcgatggcatcgccaccggtctgctggtgctgaaggacctgggcatccaggtggataggtacattgcctccgaggtgtgcgaggactccatcaccgtgggaatggtgcgtcatcagggcaagatcatgtacgtgggcgacgtgcggagcgtgacacagaagcatatccaggagtggggccctttcgacctggtgatcggcggcagcccttgcaatgacctgagcatcgtgaacccagcccggaagggcctgtacgagggaaccggcagactgttcttcgagttttacagactgctgcacgacgcccggcctaaggaaggcgacgaccggcccttcttttggctgttcgagaatgtggtggccatgggagtcagcgacaagcgggatattagccggttcctggagagcaaccccgtgatgatcgatgccaaggaagtgagcgccgcccaccgggccagatacttctggggcaatctgcctggcatgaacagacccctggccagcaccgtgaacgacaagctggagctgcaggagtgcctggagcacggccggatcgccaagttcagcaaggtgagaaccatcaccacccgaagcaacagcatcaaacaaggcaaggaccagcactttcctgtgttcatgaacgagaaggaggacatcctgtggtgtaccgagatggagagagtgttcgggttcccagtccactacacagatgtcagcaacatgtctagactggccagacagagactgctgggaagaagctggtccgtccctgtgatcagacacctgttcgcccctctgaaggagtacttcgcctgcgtgagcagcggcaacagcaacgccaacagccggggccccagcttctctagcggcctggtgccactgtccctgagagggagccacatgggccccatggagatctacaaaaccgtgagcgcctggaagcggcagcctgtgcgcgtgctgagcctgtttcggaatatcgataaagtcctgaaaagcctgggattcctggagagcggctctggctccggcggtggcaccctgaagtacgtggaggatgtgacaaacgtggtcagacgggatgtggagaagtggggccccttcgatctggtgtacggcagcacccaacccctgggcagctcttgtgaccggtgccctggctggtacatgtttcagttccaccggatcctgcagtacgccctgccgagacaggagtcccagcggccattcttttggattttcatggacaacttgctgctgaccgaggatgaccaggaaactaccactcggttcctgcagaccgaagccgtgaccctgcaggacgtgagaggccgggactaccagaacgccatgcgggtgtggtccaacatccctggactgaaaagcaagcacgcacctctgacccctaaagaagaggagtacctgcaggcccaggtgcggagcagaagcaagctggacgcccctaaggtggatctgctggtgaagaattgcctcctgcccctgagagagtacttcaagtatttcagccagaatagtctgcccctgggcggcccaagcagcggcgcccctcctcccagcggcggcagcccagccggctccccaacctctaccgaggagggcacctctgagtccgccacccccgagagcggccctggcacctccaccgagcccagcgagggcagcgcacccggcagccctgccggcagccccacctccacagaggagggaaccagcaccgagcccagcgaaggcagcgccccaggcaccagcaccgagcctagtgagggcggctctggcggcggcagcgcccaggagattaaacggatcaacaagatcagaagaagacttgtgaaagacagcaacaccaagaaggccggcaagacaggccccatgaaaaccctgctggttagagtgatgacacccgatctgagagagcggctggaaaacctgagaaagaagcctgaaaatatcccccagcccatcagcaatacatctagagccaacctgaataagctgctgaccgattacaccgaaatgaagaaggcgatcctgcatgtgtactgggaagagttccagaaggaccctgtgggcctgatgagccgggtggcccagcctgccagcaagaagatcgatcagaacaagctgaaacctgagatggacgagaagggcaacctgaccaccgccggctttgcctgctctcagtgtggccagcccctgttcgtgtacaagctggagcaggtgtctgagaagggcaaggcttacaccaactacttcggacggtgcaatgtggccgagcacgaaaagctgatcctgctggcccagctgaagcccgagaaggatagcgacgaagccgtgacatatagcctgggaaagtttgggcagagggccctggatttctacagcattcatgtgaccaaggagtccacccaccccgtgaagcccctggcccagatcgccggaaacagatacgcctccggacctgtgggaaaggccctgagcgacgcatgtatgggcacaatcgcctccttcctgtctaagtaccaggacatcatcatcgaacaccagaaggtggtgaagggcaaccagaagagactggagagcctgcgggagctggccggcaaggaaaacctggaataccctagcgtgaccctgccacctcagcctcacaccaaggagggcgttgatgcctacaacgaagtgatcgcccgggtgcgaatgtgggtgaacctgaacctgtggcagaagctgaagctaagcagagatgatgccaagcctctgctgagactgaagggattcccttcctttcctctggtcgagagacaggccaacgaagtggactggtgggacatggtgtgtaacgtgaagaagctgatcaacgagaaaaaggaggatggcaaggtgttttggcagaatctggctggctacaagagacaggaagccctgagaccatacctgagcagcgaggaagatcggaagaagggaaagaaattcgctcggtaccagctgggcgacctgctgctgcacctggaaaagaagcacggcgaggactggggaaaggtgtacgacgaggcctgggagcggattgacaagaaagtggaaggcctgagcaagcacatcaagctggaagaggaacggagaagcgaggacgcccagagcaaggccgccctgaccgactggctgcgggctaaggccagcttcgtgatcgagggcctgaaggaggccgacaaggacgagttctgcagatgcgagctgaagctgcagaagtggtacggggacctgcggggaaagcccttcgccatcgaagccgagaacagcatcctggacatcagcggcttcagcaagcagtacaactgtgccttcatctggcagaaggacggcgtgaagaagctgaacctgtacctgatcatcaactacttcaagggcggcaagctgcggttcaagaagatcaaacctgaagccttcgaagccaacagattctacaccgtgatcaacaaaaagagcggcgagatcgtgcccatggaggtgaacttcaacttcgacgaccccaacctgatcatcctgcctctggcctttggcaagagacagggcagagaattcatctggaacgacctgctgtccctggaaaccggcagcctgaagctggccaacggaagagtgatcgagaagacactgtacaacagaagaacccggcaggatgagcctgccctgttcgtggccctgaccttcgagcggcgggaggtcctggactcctccaatatcaaaccaatgaacctgatcggcgtggcaagaggcgaaaacatccccgccgtgatcgccctgaccgaccccgagggctgcccactgagccggtttaaggatagcctgggaaacccaacccacatcctgagaatcggcgagagctataaggagaagcagcggaccatccaggccaagaaggaggtggagcagcggagagccggcggctacagccggaagtacgccagcaaagccaagaatctggcagacgatatggtgagaaacaccgctagagatctgctgtactacgccgtgacccaggatgccatgctgatcttcgccaacctgagccggggcttcggccggcagggcaagcggaccttcatggccgagagacagtacacacggatggaggactggctgaccgccaagctggcctacgagggcctgagcaagacctacctgtccaagacactggcccagtacacctccaagacatgcagcaactgtgggtttaccatcaccagcgccgactacgacagggtgctggagaagctgaagaagacagcaacaggctggatgaccacaattaacggcaaggagctgaaggtggagggccagattacctactacaacagatacaagagacagaacgtagtcaaggacctgtccgtcgagctggatagactgagcgaagaatctgtgaacaacgacatctcctcctggacaaagggcagaagcggagaagctctgagcctcctgaagaaaagattctcccatagacccgtgcaggagaagttcgtgtgcctgaactgcggcttcgagacacacgcagccgagcaagccgccctgaacatcgccagatcctggctgttcctgcggagccaggagtacaagaaataccagacaaacaagacaaccggcaacaccgataagagagccttcgtcgagacctggcagtccttttaccggaagaagcttaaggaggtgtggaaacctgccgtgcggtctggcggatctggcggaggctccacaagcccccaggtgctggtgagcttcgaggacgtggccgtgttcctgagcagggaggagtggggctgcctgggccccgcccagaggggcctgtacagcaacgtgatgctggagacctacaggaacctgatcagcctgggcctgcagggcagcaagcccgacgtgatcagcaggctggagaagggcgaggagccctgggccccctacagccccaagatcgaggagggctggatcaggagccacaggagcaccagccccaagaaaaagagaaaagtctaagctgccttctgcggggcttgccttctggccatgcccttcttctctcccttgcacctgtacctcttggtctttgaataaagcctgagtaggaaggctagcaaaaaaaaaaaaaaaaaaaaaaaaaaaaaaaaaaaaaaaaaaaaaaaaaaaaaaaaaaaaaaaaaaaaaaaaaaaaaaaa

SEQ ID NO: 2971 - RNA, 5419 nt, synthetic construct
  source 1..5419: mol_type = other RNA
aggaaataagagagaaaagaagagtaagaagaaatataagagccaccatggcccctaagaagaagcgtaaagtgagccgggtgaacggcagcggcagcggcggcggcatgaaccacgaccaggagttcgacccccctaaggtgtaccctcccgtccccgccgagaagagaaagcccatccgggtcctgagcctgttcgatggcatcgccaccggtctgctggtgctgaaggacctgggcatccaggtggataggtacattgcctccgaggtgtgcgaggactccatcaccgtgggaatggtgcgtcatcagggcaagatcatgtacgtgggcgacgtgcggagcgtgacacagaagcatatccaggagtggggccctttcgacctggtgatcggcggcagcccttgcaatgacctgagcatcgtgaacccagcccggaagggcctgtacgagggaaccggcagactgttcttcgagttttacagactgctgcacgacgcccggcctaaggaaggcgacgaccggcccttcttttggctgttcgagaatgtggtggccatgggagtcagcgacaagcgggatattagccggttcctggagagcaaccccgtgatgatcgatgccaaggaagtgagcgccgcccaccgggccagatacttctggggcaatctgcctggcatgaacagacccctggccagcaccgtgaacgacaagctggagctgcaggagtgcctggagcacggccggatcgccaagttcagcaaggtgagaaccatcaccacccgaagcaacagcatcaaacaaggcaaggaccagcactttcctgtgttcatgaacgagaaggaggacatcctgtggtgtaccgagatggagagagtgttcgggttcccagtccactacacagatgtcagcaacatgtctagactggccagacagagactgctgggaagaagctggtccgtccctgtgatcagacacctgttcgcccctctgaaggagtacttcgcctgcgtgagcagcggcaacagcaacgccaacagccggggccccagcttctctagcggcctggtgccactgtccctgagagggagccacatgggccccatggagatctacaaaaccgtgagcgcctggaagcggcagcctgtgcgcgtgctgagcctgtttcggaatatcgataaagtcctgaaaagcctgggattcctggagagcggctctggctccggcggtggcaccctgaagtacgtggaggatgtgacaaacgtggtcagacgggatgtggagaagtggggccccttcgatctggtgtacggcagcacccaacccctgggcagctcttgtgaccggtgccctggctggtacatgtttcagttccaccggatcctgcagtacgccctgccgagacaggagtcccagcggccattcttttggattttcatggacaacttgctgctgaccgaggatgaccaggaaactaccactcggttcctgcagaccgaagccgtgaccctgcaggacgtgagaggccgggactaccagaacgccatgcgggtgtggtccaacatccctggactgaaaagcaagcacgcacctctgacccctaaagaagaggagtacctgcaggcccaggtgcggagcagaagcaagctggacgcccctaaggtggatctgctggtgaagaattgcctcctgcccctgagagagtacttcaagtatttcagccagaatagtctgcccctgggcggcccaagcagcggcgcccctcctcccagcggcggcagcccagccggctccccaacctctaccgaggagggcacctctgagtccgccacccccgagagcggccctggcacctccaccgagcccagcgagggcagcgcacccggcagccctgccggcagccccacctccacagaggagggaaccagcaccgagcccagcgaaggcagcgccccaggcaccagcaccgagcctagtgagggcggctctggcggcggcagcgcccaggagattaaacggatcaacaagatcagaagaagacttgtgaaagacagcaacaccaagaaggccggcaagacaggccccatgaaaaccctgctggttagagtgatgacacccgatctgagagagcggctggaaaacctgagaaagaagcctgaaaatatcccccagcccatcagcaatacatctagagccaacctgaataagctgctgaccgattacaccgaaatgaagaaggcgatcctgcatgtgtactgggaagagttccagaaggaccctgtgggcctgatgagccgggtggcccagcctgccagcaagaagatcgatcagaacaagctgaaacctgagatggacgagaagggcaacctgaccaccgccggctttgcctgctctcagtgtggccagcccctgttcgtgtacaagctggagcaggtgtctgagaagggcaaggcttacaccaactacttcggacggtgcaatgtggccgagcacgaaaagctgatcctgctggcccagctgaagcccgagaaggatagcgacgaagccgtgacatatagcctgggaaagtttgggcagagggccctggatttctacagcattcatgtgaccaaggagtccacccaccccgtgaagcccctggcccagatcgccggaaacagatacgcctccggacctgtgggaaaggccctgagcgacgcatgtatgggcacaatcgcctccttcctgtctaagtaccaggacatcatcatcgaacaccagaaggtggtgaagggcaaccagaagagactggagagcctgcgggagctggccggcaaggaaaacctggaataccctagcgtgaccctgccacctcagcctcacaccaaggagggcgttgatgcctacaacgaagtgatcgcccgggtgcgaatgtgggtgaacctgaacctgtggcagaagctgaagctaagcagagatgatgccaagcctctgctgagactgaagggattcccttcctttcctctggtcgagagacaggccaacgaagtggactggtgggacatggtgtgtaacgtgaagaagctgatcaacgagaaaaaggaggatggcaaggtgttttggcagaatctggctggctacaagagacaggaagccctgagaccatacctgagcagcgaggaagatcggaagaagggaaagaaattcgctcggtaccagctgggcgacctgctgctgcacctggaaaagaagcacggcgaggactggggaaaggtgtacgacgaggcctgggagcggattgacaagaaagtggaaggcctgagcaagcacatcaagctggaagaggaacggagaagcgaggacgcccagagcaaggccgccctgaccgactggctgcgggctaaggccagcttcgtgatcgagggcctgaaggaggccgacaaggacgagttctgcagatgcgagctgaagctgcagaagtggtacggggacctgcggggaaagcccttcgccatcgaagccgagaacagcatcctggacatcagcggcttcagcaagcagtacaactgtgccttcatctggcagaaggacggcgtgaagaagctgaacctgtacctgatcatcaactacttcaagggcggcaagctgcggttcaagaagatcaaacctgaagccttcgaagccaacagattctacaccgtgatcaacaaaaagagcggcgagatcgtgcccatggaggtgaacttcaacttcgacgaccccaacctgatcatcctgcctctggcctttggcaagagacagggcagagaattcatctggaacgacctgctgtccctggaaaccggcagcctgaagctggccaacggaagagtgatcgagaagacactgtacaacagaagaacccggcaggatgagcctgccctgttcgtggccctgaccttcgagcggcgggaggtcctggactcctccaatatcaaaccaatgaacctgatcggcgtggcaagaggcgaaaacatccccgccgtgatcgccctgaccgaccccgagggctgcccactgagccggtttaaggatagcctgggaaacccaacccacatcctgagaatcggcgagagctataaggagaagcagcggaccatccaggccaagaaggaggtggagcagcggagagccggcggctacagccggaagtacgccagcaaagccaagaatctggcagacgatatggtgagaaacaccgctagagatctgctgtactacgccgtgacccaggatgccatgctgatcttcgccaacctgagccggggcttcggccggcagggcaagcggaccttcatggccgagagacagtacacacggatggaggactggctgaccgccaagctggcctacgagggcctgagcaagacctacctgtccaagacactggcccagtacacctccaagacatgcagcaactgtgggtttaccatcaccagcgccgactacgacagggtgctggagaagctgaagaagacagcaacaggctggatgaccacaattaacggcaaggagctgaaggtggagggccagattacctactacaacagatacaagagacagaacgtagtcaaggacctgtccgtcgagctggatagactgagcgaagaatctgtgaacaacgacatctcctcctggacaaagggcagaagcggagaagctctgagcctcctgaagaaaagattctcccatagacccgtgcaggagaagttcgtgtgcctgaactgcggcttcgagacacacgcagccgagcaagccgccctgaacatcgccagatcctggctgttcctgcggagccaggagtacaagaaataccagacaaacaagacaaccggcaacaccgataagagagccttcgtcgagacctggcagtccttttaccggaagaagcttaaggaggtgtggaaacctgccgtgcggtctggcggatctggcggaggctccacaagccaggagatccccgtgagcttcaaggacgtggtggtgggcttcacccaggaggagtggcactggctgaaccccgtgcagagggccctgtacagggacgtgatgctggagacctacagcaacctggtgagcgtgggctacgagggcaccaagcccgacgtgatcctgaggctggagcaggaggaggccccctgggtgtgcgaggccccctgccccggctgctgctgctgggaggacatctggcagaccagccccaagaaaaagagaaaagtctaagctgccttctgcggggcttgccttctggccatgcccttcttctctcccttgcacctgtacctcttggtctttgaataaagcctgagtaggaaggctagcaaaaaaaaaaaaaaaaaaaaaaaaaaaaaaaaaaaaaaaaaaaaaaaaaaaaaaaaaaaaaaaaaaaaaaaaaaaaaaaa

SEQ ID NO: 2972 - RNA, 5419 nt, synthetic construct
  source 1..5419: mol_type = other RNA
aggaaataagagagaaaagaagagtaagaagaaatataagagccaccatggcccctaagaagaagcgtaaagtgagccgggtgaacggcagcggcagcggcggcggcatgaaccacgaccaggagttcgacccccctaaggtgtaccctcccgtccccgccgagaagagaaagcccatccgggtcctgagcctgttcgatggcatcgccaccggtctgctggtgctgaaggacctgggcatccaggtggataggtacattgcctccgaggtgtgcgaggactccatcaccgtgggaatggtgcgtcatcagggcaagatcatgtacgtgggcgacgtgcggagcgtgacacagaagcatatccaggagtggggccctttcgacctggtgatcggcggcagcccttgcaatgacctgagcatcgtgaacccagcccggaagggcctgtacgagggaaccggcagactgttcttcgagttttacagactgctgcacgacgcccggcctaaggaaggcgacgaccggcccttcttttggctgttcgagaatgtggtggccatgggagtcagcgacaagcgggatattagccggttcctggagagcaaccccgtgatgatcgatgccaaggaagtgagcgccgcccaccgggccagatacttctggggcaatctgcctggcatgaacagacccctggccagcaccgtgaacgacaagctggagctgcaggagtgcctggagcacggccggatcgccaagttcagcaaggtgagaaccatcaccacccgaagcaacagcatcaaacaaggcaaggaccagcactttcctgtgttcatgaacgagaaggaggacatcctgtggtgtaccgagatggagagagtgttcgggttcccagtccactacacagatgtcagcaacatgtctagactggccagacagagactgctgggaagaagctggtccgtccctgtgatcagacacctgttcgcccctctgaaggagtacttcgcctgcgtgagcagcggcaacagcaacgccaacagccggggccccagcttctctagcggcctggtgccactgtccctgagagggagccacatgggccccatggagatctacaaaaccgtgagcgcctggaagcggcagcctgtgcgcgtgctgagcctgtttcggaatatcgataaagtcctgaaaagcctgggattcctggagagcggctctggctccggcggtggcaccctgaagtacgtggaggatgtgacaaacgtggtcagacgggatgtggagaagtggggccccttcgatctggtgtacggcagcacccaacccctgggcagctcttgtgaccggtgccctggctggtacatgtttcagttccaccggatcctgcagtacgccctgccgagacaggagtcccagcggccattcttttggattttcatggacaacttgctgctgaccgaggatgaccaggaaactaccactcggttcctgcagaccgaagccgtgaccctgcaggacgtgagaggccgggactaccagaacgccatgcgggtgtggtccaacatccctggactgaaaagcaagcacgcacctctgacccctaaagaagaggagtacctgcaggcccaggtgcggagcagaagcaagctggacgcccctaaggtggatctgctggtgaagaattgcctcctgcccctgagagagtacttcaagtatttcagccagaatagtctgcccctgggcggcccaagcagcggcgcccctcctcccagcggcggcagcccagccggctccccaacctctaccgaggagggcacctctgagtccgccacccccgagagcggccctggcacctccaccgagcccagcgagggcagcgcacccggcagccctgccggcagccccacctccacagaggagggaaccagcaccgagcccagcgaaggcagcgccccaggcaccagcaccgagcctagtgagggcggctctggcggcggcagcgcccaggagattaaacggatcaacaagatcagaagaagacttgtgaaagacagcaacaccaagaaggccggcaagacaggccccatgaaaaccctgctggttagagtgatgacacccgatctgagagagcggctggaaaacctgagaaagaagcctgaaaatatcccccagcccatcagcaatacatctagagccaacctgaataagctgctgaccgattacaccgaaatgaagaaggcgatcctgcatgtgtactgggaagagttccagaaggaccctgtgggcctgatgagccgggtggcccagcctgccagcaagaagatcgatcagaacaagctgaaacctgagatggacgagaagggcaacctgaccaccgccggctttgcctgctctcagtgtggccagcccctgttcgtgtacaagctggagcaggtgtctgagaagggcaaggcttacaccaactacttcggacggtgcaatgtggccgagcacgaaaagctgatcctgctggcccagctgaagcccgagaaggatagcgacgaagccgtgacatatagcctgggaaagtttgggcagagggccctggatttctacagcattcatgtgaccaaggagtccacccaccccgtgaagcccctggcccagatcgccggaaacagatacgcctccggacctgtgggaaaggccctgagcgacgcatgtatgggcacaatcgcctccttcctgtctaagtaccaggacatcatcatcgaacaccagaaggtggtgaagggcaaccagaagagactggagagcctgcgggagctggccggcaaggaaaacctggaataccctagcgtgaccctgccacctcagcctcacaccaaggagggcgttgatgcctacaacgaagtgatcgcccgggtgcgaatgtgggtgaacctgaacctgtggcagaagctgaagctaagcagagatgatgccaagcctctgctgagactgaagggattcccttcctttcctctggtcgagagacaggccaacgaagtggactggtgggacatggtgtgtaacgtgaagaagctgatcaacgagaaaaaggaggatggcaaggtgttttggcagaatctggctggctacaagagacaggaagccctgagaccatacctgagcagcgaggaagatcggaagaagggaaagaaattcgctcggtaccagctgggcgacctgctgctgcacctggaaaagaagcacggcgaggactggggaaaggtgtacgacgaggcctgggagcggattgacaagaaagtggaaggcctgagcaagcacatcaagctggaagaggaacggagaagcgaggacgcccagagcaaggccgccctgaccgactggctgcgggctaaggccagcttcgtgatcgagggcctgaaggaggccgacaaggacgagttctgcagatgcgagctgaagctgcagaagtggtacggggacctgcggggaaagcccttcgccatcgaagccgagaacagcatcctggacatcagcggcttcagcaagcagtacaactgtgccttcatctggcagaaggacggcgtgaagaagctgaacctgtacctgatcatcaactacttcaagggcggcaagctgcggttcaagaagatcaaacctgaagccttcgaagccaacagattctacaccgtgatcaacaaaaagagcggcgagatcgtgcccatggaggtgaacttcaacttcgacgaccccaacctgatcatcctgcctctggcctttggcaagagacagggcagagaattcatctggaacgacctgctgtccctggaaaccggcagcctgaagctggccaacggaagagtgatcgagaagacactgtacaacagaagaacccggcaggatgagcctgccctgttcgtggccctgaccttcgagcggcgggaggtcctggactcctccaatatcaaaccaatgaacctgatcggcgtggcaagaggcgaaaacatccccgccgtgatcgccctgaccgaccccgagggctgcccactgagccggtttaaggatagcctgggaaacccaacccacatcctgagaatcggcgagagctataaggagaagcagcggaccatccaggccaagaaggaggtggagcagcggagagccggcggctacagccggaagtacgccagcaaagccaagaatctggcagacgatatggtgagaaacaccgctagagatctgctgtactacgccgtgacccaggatgccatgctgatcttcgccaacctgagccggggcttcggccggcagggcaagcggaccttcatggccgagagacagtacacacggatggaggactggctgaccgccaagctggcctacgagggcctgagcaagacctacctgtccaagacactggcccagtacacctccaagacatgcagcaactgtgggtttaccatcaccagcgccgactacgacagggtgctggagaagctgaagaagacagcaacaggctggatgaccacaattaacggcaaggagctgaaggtggagggccagattacctactacaacagatacaagagacagaacgtagtcaaggacctgtccgtcgagctggatagactgagcgaagaatctgtgaacaacgacatctcctcctggacaaagggcagaagcggagaagctctgagcctcctgaagaaaagattctcccatagacccgtgcaggagaagttcgtgtgcctgaactgcggcttcgagacacacgcagccgagcaagccgccctgaacatcgccagatcctggctgttcctgcggagccaggagtacaagaaataccagacaaacaagacaaccggcaacaccgataagagagccttcgtcgagacctggcagtccttttaccggaagaagcttaaggaggtgtggaaacctgccgtgcggtctggcggatctggcggaggctccacaagcagccagggcagcgtgaccttcagggacgtggccatcgacttcagccaggaggagtggaagtggctgcagcccgcccagagggacctgtacaggtgcgtgatgctggagaactacggccacctggtgagcctgggcctgagcatcagcaagcccgacgtggtgagcctgctggagcagggcaaggagccctggctgggcaagagggacgtgaagagggacctgttccccgccctgagcccccagaccagccccaagaaaaagagaaaagtctaagctgccttctgcggggcttgccttctggccatgcccttcttctctcccttgcacctgtacctcttggtctttgaataaagcctgagtaggaaggctagcaaaaaaaaaaaaaaaaaaaaaaaaaaaaaaaaaaaaaaaaaaaaaaaaaaaaaaaaaaaaaaaaaaaaaaaaaaaaaaaa

SEQ ID NO: 2973 - RNA, 5419 nt, synthetic construct
  source 1..5419: mol_type = other RNA
aggaaataagagagaaaagaagagtaagaagaaatataagagccaccatggcccctaagaagaagcgtaaagtgagccgggtgaacggcagcggcagcggcggcggcatgaaccacgaccaggagttcgacccccctaaggtgtaccctcccgtccccgccgagaagagaaagcccatccgggtcctgagcctgttcgatggcatcgccaccggtctgctggtgctgaaggacctgggcatccaggtggataggtacattgcctccgaggtgtgcgaggactccatcaccgtgggaatggtgcgtcatcagggcaagatcatgtacgtgggcgacgtgcggagcgtgacacagaagcatatccaggagtggggccctttcgacctggtgatcggcggcagcccttgcaatgacctgagcatcgtgaacccagcccggaagggcctgtacgagggaaccggcagactgttcttcgagttttacagactgctgcacgacgcccggcctaaggaaggcgacgaccggcccttcttttggctgttcgagaatgtggtggccatgggagtcagcgacaagcgggatattagccggttcctggagagcaaccccgtgatgatcgatgccaaggaagtgagcgccgcccaccgggccagatacttctggggcaatctgcctggcatgaacagacccctggccagcaccgtgaacgacaagctggagctgcaggagtgcctggagcacggccggatcgccaagttcagcaaggtgagaaccatcaccacccgaagcaacagcatcaaacaaggcaaggaccagcactttcctgtgttcatgaacgagaaggaggacatcctgtggtgtaccgagatggagagagtgttcgggttcccagtccactacacagatgtcagcaacatgtctagactggccagacagagactgctgggaagaagctggtccgtccctgtgatcagacacctgttcgcccctctgaaggagtacttcgcctgcgtgagcagcggcaacagcaacgccaacagccggggccccagcttctctagcggcctggtgccactgtccctgagagggagccacatgggccccatggagatctacaaaaccgtgagcgcctggaagcggcagcctgtgcgcgtgctgagcctgtttcggaatatcgataaagtcctgaaaagcctgggattcctggagagcggctctggctccggcggtggcaccctgaagtacgtggaggatgtgacaaacgtggtcagacgggatgtggagaagtggggccccttcgatctggtgtacggcagcacccaacccctgggcagctcttgtgaccggtgccctggctggtacatgtttcagttccaccggatcctgcagtacgccctgccgagacaggagtcccagcggccattcttttggattttcatggacaacttgctgctgaccgaggatgaccaggaaactaccactcggttcctgcagaccgaagccgtgaccctgcaggacgtgagaggccgggactaccagaacgccatgcgggtgtggtccaacatccctggactgaaaagcaagcacgcacctctgacccctaaagaagaggagtacctgcaggcccaggtgcggagcagaagcaagctggacgcccctaaggtggatctgctggtgaagaattgcctcctgcccctgagagagtacttcaagtatttcagccagaatagtctgcccctgggcggcccaagcagcggcgcccctcctcccagcggcggcagcccagccggctccccaacctctaccgaggagggcacctctgagtccgccacccccgagagcggccctggcacctccaccgagcccagcgagggcagcgcacccggcagccctgccggcagccccacctccacagaggagggaaccagcaccgagcccagcgaaggcagcgccccaggcaccagcaccgagcctagtgagggcggctctggcggcggcagcgcccaggagattaaacggatcaacaagatcagaagaagacttgtgaaagacagcaacaccaagaaggccggcaagacaggccccatgaaaaccctgctggttagagtgatgacacccgatctgagagagcggctggaaaacctgagaaagaagcctgaaaatatcccccagcccatcagcaatacatctagagccaacctgaataagctgctgaccgattacaccgaaatgaagaaggcgatcctgcatgtgtactgggaagagttccagaaggaccctgtgggcctgatgagccgggtggcccagcctgccagcaagaagatcgatcagaacaagctgaaacctgagatggacgagaagggcaacctgaccaccgccggctttgcctgctctcagtgtggccagcccctgttcgtgtacaagctggagcaggtgtctgagaagggcaaggcttacaccaactacttcggacggtgcaatgtggccgagcacgaaaagctgatcctgctggcccagctgaagcccgagaaggatagcgacgaagccgtgacatatagcctgggaaagtttgggcagagggccctggatttctacagcattcatgtgaccaaggagtccacccaccccgtgaagcccctggcccagatcgccggaaacagatacgcctccggacctgtgggaaaggccctgagcgacgcatgtatgggcacaatcgcctccttcctgtctaagtaccaggacatcatcatcgaacaccagaaggtggtgaagggcaaccagaagagactggagagcctgcgggagctggccggcaaggaaaacctggaataccctagcgtgaccctgccacctcagcctcacaccaaggagggcgttgatgcctacaacgaagtgatcgcccgggtgcgaatgtgggtgaacctgaacctgtggcagaagctgaagctaagcagagatgatgccaagcctctgctgagactgaagggattcccttcctttcctctggtcgagagacaggccaacgaagtggactggtgggacatggtgtgtaacgtgaagaagctgatcaacgagaaaaaggaggatggcaaggtgttttggcagaatctggctggctacaagagacaggaagccctgagaccatacctgagcagcgaggaagatcggaagaagggaaagaaattcgctcggtaccagctgggcgacctgctgctgcacctggaaaagaagcacggcgaggactggggaaaggtgtacgacgaggcctgggagcggattgacaagaaagtggaaggcctgagcaagcacatcaagctggaagaggaacggagaagcgaggacgcccagagcaaggccgccctgaccgactggctgcgggctaaggccagcttcgtgatcgagggcctgaaggaggccgacaaggacgagttctgcagatgcgagctgaagctgcagaagtggtacggggacctgcggggaaagcccttcgccatcgaagccgagaacagcatcctggacatcagcggcttcagcaagcagtacaactgtgccttcatctggcagaaggacggcgtgaagaagctgaacctgtacctgatcatcaactacttcaagggcggcaagctgcggttcaagaagatcaaacctgaagccttcgaagccaacagattctacaccgtgatcaacaaaaagagcggcgagatcgtgcccatggaggtgaacttcaacttcgacgaccccaacctgatcatcctgcctctggcctttggcaagagacagggcagagaattcatctggaacgacctgctgtccctggaaaccggcagcctgaagctggccaacggaagagtgatcgagaagacactgtacaacagaagaacccggcaggatgagcctgccctgttcgtggccctgaccttcgagcggcgggaggtcctggactcctccaatatcaaaccaatgaacctgatcggcgtggcaagaggcgaaaacatccccgccgtgatcgccctgaccgaccccgagggctgcccactgagccggtttaaggatagcctgggaaacccaacccacatcctgagaatcggcgagagctataaggagaagcagcggaccatccaggccaagaaggaggtggagcagcggagagccggcggctacagccggaagtacgccagcaaagccaagaatctggcagacgatatggtgagaaacaccgctagagatctgctgtactacgccgtgacccaggatgccatgctgatcttcgccaacctgagccggggcttcggccggcagggcaagcggaccttcatggccgagagacagtacacacggatggaggactggctgaccgccaagctggcctacgagggcctgagcaagacctacctgtccaagacactggcccagtacacctccaagacatgcagcaactgtgggtttaccatcaccagcgccgactacgacagggtgctggagaagctgaagaagacagcaacaggctggatgaccacaattaacggcaaggagctgaaggtggagggccagattacctactacaacagatacaagagacagaacgtagtcaaggacctgtccgtcgagctggatagactgagcgaagaatctgtgaacaacgacatctcctcctggacaaagggcagaagcggagaagctctgagcctcctgaagaaaagattctcccatagacccgtgcaggagaagttcgtgtgcctgaactgcggcttcgagacacacgcagccgagcaagccgccctgaacatcgccagatcctggctgttcctgcggagccaggagtacaagaaataccagacaaacaagacaaccggcaacaccgataagagagccttcgtcgagacctggcagtccttttaccggaagaagcttaaggaggtgtggaaacctgccgtgcggtctggcggatctggcggaggctccacaagcaggcccggcgccgtgagcttcgccgacgtggccgtgtacttcagccccgaggagtggggctgcctgaggcccgcccagagggccctgtacagggacgtgatgagggagacctacggccacctgggcgccctgggcttcgccgacgccaagcccgtgctgatcgcctggctggagaggaaggccgaggtgtggacccccgaggccgaggaccccgaggagggcgccaggcaccccggcagcggcaccagccccaagaaaaagagaaaagtctaagctgccttctgcggggcttgccttctggccatgcccttcttctctcccttgcacctgtacctcttggtctttgaataaagcctgagtaggaaggctagcaaaaaaaaaaaaaaaaaaaaaaaaaaaaaaaaaaaaaaaaaaaaaaaaaaaaaaaaaaaaaaaaaaaaaaaaaaaaaaaa

SEQ ID NO: 2974 - RNA, 5419 nt, synthetic construct
  source 1..5419: mol_type = other RNA
aggaaataagagagaaaagaagagtaagaagaaatataagagccaccatggcccctaagaagaagcgtaaagtgagccgggtgaacggcagcggcagcggcggcggcatgaaccacgaccaggagttcgacccccctaaggtgtaccctcccgtccccgccgagaagagaaagcccatccgggtcctgagcctgttcgatggcatcgccaccggtctgctggtgctgaaggacctgggcatccaggtggataggtacattgcctccgaggtgtgcgaggactccatcaccgtgggaatggtgcgtcatcagggcaagatcatgtacgtgggcgacgtgcggagcgtgacacagaagcatatccaggagtggggccctttcgacctggtgatcggcggcagcccttgcaatgacctgagcatcgtgaacccagcccggaagggcctgtacgagggaaccggcagactgttcttcgagttttacagactgctgcacgacgcccggcctaaggaaggcgacgaccggcccttcttttggctgttcgagaatgtggtggccatgggagtcagcgacaagcgggatattagccggttcctggagagcaaccccgtgatgatcgatgccaaggaagtgagcgccgcccaccgggccagatacttctggggcaatctgcctggcatgaacagacccctggccagcaccgtgaacgacaagctggagctgcaggagtgcctggagcacggccggatcgccaagttcagcaaggtgagaaccatcaccacccgaagcaacagcatcaaacaaggcaaggaccagcactttcctgtgttcatgaacgagaaggaggacatcctgtggtgtaccgagatggagagagtgttcgggttcccagtccactacacagatgtcagcaacatgtctagactggccagacagagactgctgggaagaagctggtccgtccctgtgatcagacacctgttcgcccctctgaaggagtacttcgcctgcgtgagcagcggcaacagcaacgccaacagccggggccccagcttctctagcggcctggtgccactgtccctgagagggagccacatgggccccatggagatctacaaaaccgtgagcgcctggaagcggcagcctgtgcgcgtgctgagcctgtttcggaatatcgataaagtcctgaaaagcctgggattcctggagagcggctctggctccggcggtggcaccctgaagtacgtggaggatgtgacaaacgtggtcagacgggatgtggagaagtggggccccttcgatctggtgtacggcagcacccaacccctgggcagctcttgtgaccggtgccctggctggtacatgtttcagttccaccggatcctgcagtacgccctgccgagacaggagtcccagcggccattcttttggattttcatggacaacttgctgctgaccgaggatgaccaggaaactaccactcggttcctgcagaccgaagccgtgaccctgcaggacgtgagaggccgggactaccagaacgccatgcgggtgtggtccaacatccctggactgaaaagcaagcacgcacctctgacccctaaagaagaggagtacctgcaggcccaggtgcggagcagaagcaagctggacgcccctaaggtggatctgctggtgaagaattgcctcctgcccctgagagagtacttcaagtatttcagccagaatagtctgcccctgggcggcccaagcagcggcgcccctcctcccagcggcggcagcccagccggctccccaacctctaccgaggagggcacctctgagtccgccacccccgagagcggccctggcacctccaccgagcccagcgagggcagcgcacccggcagccctgccggcagccccacctccacagaggagggaaccagcaccgagcccagcgaaggcagcgccccaggcaccagcaccgagcctagtgagggcggctctggcggcggcagcgcccaggagattaaacggatcaacaagatcagaagaagacttgtgaaagacagcaacaccaagaaggccggcaagacaggccccatgaaaaccctgctggttagagtgatgacacccgatctgagagagcggctggaaaacctgagaaagaagcctgaaaatatcccccagcccatcagcaatacatctagagccaacctgaataagctgctgaccgattacaccgaaatgaagaaggcgatcctgcatgtgtactgggaagagttccagaaggaccctgtgggcctgatgagccgggtggcccagcctgccagcaagaagatcgatcagaacaagctgaaacctgagatggacgagaagggcaacctgaccaccgccggctttgcctgctctcagtgtggccagcccctgttcgtgtacaagctggagcaggtgtctgagaagggcaaggcttacaccaactacttcggacggtgcaatgtggccgagcacgaaaagctgatcctgctggcccagctgaagcccgagaaggatagcgacgaagccgtgacatatagcctgggaaagtttgggcagagggccctggatttctacagcattcatgtgaccaaggagtccacccaccccgtgaagcccctggcccagatcgccggaaacagatacgcctccggacctgtgggaaaggccctgagcgacgcatgtatgggcacaatcgcctccttcctgtctaagtaccaggacatcatcatcgaacaccagaaggtggtgaagggcaaccagaagagactggagagcctgcgggagctggccggcaaggaaaacctggaataccctagcgtgaccctgccacctcagcctcacaccaaggagggcgttgatgcctacaacgaagtgatcgcccgggtgcgaatgtgggtgaacctgaacctgtggcagaagctgaagctaagcagagatgatgccaagcctctgctgagactgaagggattcccttcctttcctctggtcgagagacaggccaacgaagtggactggtgggacatggtgtgtaacgtgaagaagctgatcaacgagaaaaaggaggatggcaaggtgttttggcagaatctggctggctacaagagacaggaagccctgagaccatacctgagcagcgaggaagatcggaagaagggaaagaaattcgctcggtaccagctgggcgacctgctgctgcacctggaaaagaagcacggcgaggactggggaaaggtgtacgacgaggcctgggagcggattgacaagaaagtggaaggcctgagcaagcacatcaagctggaagaggaacggagaagcgaggacgcccagagcaaggccgccctgaccgactggctgcgggctaaggccagcttcgtgatcgagggcctgaaggaggccgacaaggacgagttctgcagatgcgagctgaagctgcagaagtggtacggggacctgcggggaaagcccttcgccatcgaagccgagaacagcatcctggacatcagcggcttcagcaagcagtacaactgtgccttcatctggcagaaggacggcgtgaagaagctgaacctgtacctgatcatcaactacttcaagggcggcaagctgcggttcaagaagatcaaacctgaagccttcgaagccaacagattctacaccgtgatcaacaaaaagagcggcgagatcgtgcccatggaggtgaacttcaacttcgacgaccccaacctgatcatcctgcctctggcctttggcaagagacagggcagagaattcatctggaacgacctgctgtccctggaaaccggcagcctgaagctggccaacggaagagtgatcgagaagacactgtacaacagaagaacccggcaggatgagcctgccctgttcgtggccctgaccttcgagcggcgggaggtcctggactcctccaatatcaaaccaatgaacctgatcggcgtggcaagaggcgaaaacatccccgccgtgatcgccctgaccgaccccgagggctgcccactgagccggtttaaggatagcctgggaaacccaacccacatcctgagaatcggcgagagctataaggagaagcagcggaccatccaggccaagaaggaggtggagcagcggagagccggcggctacagccggaagtacgccagcaaagccaagaatctggcagacgatatggtgagaaacaccgctagagatctgctgtactacgccgtgacccaggatgccatgctgatcttcgccaacctgagccggggcttcggccggcagggcaagcggaccttcatggccgagagacagtacacacggatggaggactggctgaccgccaagctggcctacgagggcctgagcaagacctacctgtccaagacactggcccagtacacctccaagacatgcagcaactgtgggtttaccatcaccagcgccgactacgacagggtgctggagaagctgaagaagacagcaacaggctggatgaccacaattaacggcaaggagctgaaggtggagggccagattacctactacaacagatacaagagacagaacgtagtcaaggacctgtccgtcgagctggatagactgagcgaagaatctgtgaacaacgacatctcctcctggacaaagggcagaagcggagaagctctgagcctcctgaagaaaagattctcccatagacccgtgcaggagaagttcgtgtgcctgaactgcggcttcgagacacacgcagccgagcaagccgccctgaacatcgccagatcctggctgttcctgcggagccaggagtacaagaaataccagacaaacaagacaaccggcaacaccgataagagagccttcgtcgagacctggcagtccttttaccggaagaagcttaaggaggtgtggaaacctgccgtgcggtctggcggatctggcggaggctccacaagcagcctgggcagcgagctgttcagggacgtggccatcgtgttcagccaggaggagtggcagtggctggcccccgcccagagggacctgtacagggacgtgatgctggagacctacagcaacctggtgagcctgggcctggccgtgagcaagcccgacgtgatcagcttcctggagcagggcaaggagccctggatggtggagagggtggtgagcggcggcctgtgccccgtgctggagagcaggaccagccccaagaaaaagagaaaagtctaagctgccttctgcggggcttgccttctggccatgcccttcttctctcccttgcacctgtacctcttggtctttgaataaagcctgagtaggaaggctagcaaaaaaaaaaaaaaaaaaaaaaaaaaaaaaaaaaaaaaaaaaaaaaaaaaaaaaaaaaaaaaaaaaaaaaaaaaaaaaaa

SEQ ID NO: 2975 - RNA, 5419 nt, synthetic construct
  source 1..5419: mol_type = other RNA
aggaaataagagagaaaagaagagtaagaagaaatataagagccaccatggcccctaagaagaagcgtaaagtgagccgggtgaacggcagcggcagcggcggcggcatgaaccacgaccaggagttcgacccccctaaggtgtaccctcccgtccccgccgagaagagaaagcccatccgggtcctgagcctgttcgatggcatcgccaccggtctgctggtgctgaaggacctgggcatccaggtggataggtacattgcctccgaggtgtgcgaggactccatcaccgtgggaatggtgcgtcatcagggcaagatcatgtacgtgggcgacgtgcggagcgtgacacagaagcatatccaggagtggggccctttcgacctggtgatcggcggcagcccttgcaatgacctgagcatcgtgaacccagcccggaagggcctgtacgagggaaccggcagactgttcttcgagttttacagactgctgcacgacgcccggcctaaggaaggcgacgaccggcccttcttttggctgttcgagaatgtggtggccatgggagtcagcgacaagcgggatattagccggttcctggagagcaaccccgtgatgatcgatgccaaggaagtgagcgccgcccaccgggccagatacttctggggcaatctgcctggcatgaacagacccctggccagcaccgtgaacgacaagctggagctgcaggagtgcctggagcacggccggatcgccaagttcagcaaggtgagaaccatcaccacccgaagcaacagcatcaaacaaggcaaggaccagcactttcctgtgttcatgaacgagaaggaggacatcctgtggtgtaccgagatggagagagtgttcgggttcccagtccactacacagatgtcagcaacatgtctagactggccagacagagactgctgggaagaagctggtccgtccctgtgatcagacacctgttcgcccctctgaaggagtacttcgcctgcgtgagcagcggcaacagcaacgccaacagccggggccccagcttctctagcggcctggtgccactgtccctgagagggagccacatgggccccatggagatctacaaaaccgtgagcgcctggaagcggcagcctgtgcgcgtgctgagcctgtttcggaatatcgataaagtcctgaaaagcctgggattcctggagagcggctctggctccggcggtggcaccctgaagtacgtggaggatgtgacaaacgtggtcagacgggatgtggagaagtggggccccttcgatctggtgtacggcagcacccaacccctgggcagctcttgtgaccggtgccctggctggtacatgtttcagttccaccggatcctgcagtacgccctgccgagacaggagtcccagcggccattcttttggattttcatggacaacttgctgctgaccgaggatgaccaggaaactaccactcggttcctgcagaccgaagccgtgaccctgcaggacgtgagaggccgggactaccagaacgccatgcgggtgtggtccaacatccctggactgaaaagcaagcacgcacctctgacccctaaagaagaggagtacctgcaggcccaggtgcggagcagaagcaagctggacgcccctaaggtggatctgctggtgaagaattgcctcctgcccctgagagagtacttcaagtatttcagccagaatagtctgcccctgggcggcccaagcagcggcgcccctcctcccagcggcggcagcccagccggctccccaacctctaccgaggagggcacctctgagtccgccacccccgagagcggccctggcacctccaccgagcccagcgagggcagcgcacccggcagccctgccggcagccccacctccacagaggagggaaccagcaccgagcccagcgaaggcagcgccccaggcaccagcaccgagcctagtgagggcggctctggcggcggcagcgcccaggagattaaacggatcaacaagatcagaagaagacttgtgaaagacagcaacaccaagaaggccggcaagacaggccccatgaaaaccctgctggttagagtgatgacacccgatctgagagagcggctggaaaacctgagaaagaagcctgaaaatatcccccagcccatcagcaatacatctagagccaacctgaataagctgctgaccgattacaccgaaatgaagaaggcgatcctgcatgtgtactgggaagagttccagaaggaccctgtgggcctgatgagccgggtggcccagcctgccagcaagaagatcgatcagaacaagctgaaacctgagatggacgagaagggcaacctgaccaccgccggctttgcctgctctcagtgtggccagcccctgttcgtgtacaagctggagcaggtgtctgagaagggcaaggcttacaccaactacttcggacggtgcaatgtggccgagcacgaaaagctgatcctgctggcccagctgaagcccgagaaggatagcgacgaagccgtgacatatagcctgggaaagtttgggcagagggccctggatttctacagcattcatgtgaccaaggagtccacccaccccgtgaagcccctggcccagatcgccggaaacagatacgcctccggacctgtgggaaaggccctgagcgacgcatgtatgggcacaatcgcctccttcctgtctaagtaccaggacatcatcatcgaacaccagaaggtggtgaagggcaaccagaagagactggagagcctgcgggagctggccggcaaggaaaacctggaataccctagcgtgaccctgccacctcagcctcacaccaaggagggcgttgatgcctacaacgaagtgatcgcccgggtgcgaatgtgggtgaacctgaacctgtggcagaagctgaagctaagcagagatgatgccaagcctctgctgagactgaagggattcccttcctttcctctggtcgagagacaggccaacgaagtggactggtgggacatggtgtgtaacgtgaagaagctgatcaacgagaaaaaggaggatggcaaggtgttttggcagaatctggctggctacaagagacaggaagccctgagaccatacctgagcagcgaggaagatcggaagaagggaaagaaattcgctcggtaccagctgggcgacctgctgctgcacctggaaaagaagcacggcgaggactggggaaaggtgtacgacgaggcctgggagcggattgacaagaaagtggaaggcctgagcaagcacatcaagctggaagaggaacggagaagcgaggacgcccagagcaaggccgccctgaccgactggctgcgggctaaggccagcttcgtgatcgagggcctgaaggaggccgacaaggacgagttctgcagatgcgagctgaagctgcagaagtggtacggggacctgcggggaaagcccttcgccatcgaagccgagaacagcatcctggacatcagcggcttcagcaagcagtacaactgtgccttcatctggcagaaggacggcgtgaagaagctgaacctgtacctgatcatcaactacttcaagggcggcaagctgcggttcaagaagatcaaacctgaagccttcgaagccaacagattctacaccgtgatcaacaaaaagagcggcgagatcgtgcccatggaggtgaacttcaacttcgacgaccccaacctgatcatcctgcctctggcctttggcaagagacagggcagagaattcatctggaacgacctgctgtccctggaaaccggcagcctgaagctggccaacggaagagtgatcgagaagacactgtacaacagaagaacccggcaggatgagcctgccctgttcgtggccctgaccttcgagcggcgggaggtcctggactcctccaatatcaaaccaatgaacctgatcggcgtggcaagaggcgaaaacatccccgccgtgatcgccctgaccgaccccgagggctgcccactgagccggtttaaggatagcctgggaaacccaacccacatcctgagaatcggcgagagctataaggagaagcagcggaccatccaggccaagaaggaggtggagcagcggagagccggcggctacagccggaagtacgccagcaaagccaagaatctggcagacgatatggtgagaaacaccgctagagatctgctgtactacgccgtgacccaggatgccatgctgatcttcgccaacctgagccggggcttcggccggcagggcaagcggaccttcatggccgagagacagtacacacggatggaggactggctgaccgccaagctggcctacgagggcctgagcaagacctacctgtccaagacactggcccagtacacctccaagacatgcagcaactgtgggtttaccatcaccagcgccgactacgacagggtgctggagaagctgaagaagacagcaacaggctggatgaccacaattaacggcaaggagctgaaggtggagggccagattacctactacaacagatacaagagacagaacgtagtcaaggacctgtccgtcgagctggatagactgagcgaagaatctgtgaacaacgacatctcctcctggacaaagggcagaagcggagaagctctgagcctcctgaagaaaagattctcccatagacccgtgcaggagaagttcgtgtgcctgaactgcggcttcgagacacacgcagccgagcaagccgccctgaacatcgccagatcctggctgttcctgcggagccaggagtacaagaaataccagacaaacaagacaaccggcaacaccgataagagagccttcgtcgagacctggcagtccttttaccggaagaagcttaaggaggtgtggaaacctgccgtgcggtctggcggatctggcggaggctccacaagccccctgggcagcgagctgttcagggacgtggccatcgtgttcagccaggaggagtggcagtggctggcccccgcccagagggacctgtacagggacgtgatgctggagacctacagcaacctggtgagcctgggcctggccatcagcaagcccgacgtgatcagcttcctggagcagggcaaggagccctggatggtggagagggtggtggccggcggcctgtgccccgtgctggagagcaggaccagccccaagaaaaagagaaaagtctaagctgccttctgcggggcttgccttctggccatgcccttcttctctcccttgcacctgtacctcttggtctttgaataaagcctgagtaggaaggctagcaaaaaaaaaaaaaaaaaaaaaaaaaaaaaaaaaaaaaaaaaaaaaaaaaaaaaaaaaaaaaaaaaaaaaaaaaaaaaaaa

SEQ ID NO: 2976 - RNA, 5419 nt, synthetic construct
  source 1..5419: mol_type = other RNA
aggaaataagagagaaaagaagagtaagaagaaatataagagccaccatggcccctaagaagaagcgtaaagtgagccgggtgaacggcagcggcagcggcggcggcatgaaccacgaccaggagttcgacccccctaaggtgtaccctcccgtccccgccgagaagagaaagcccatccgggtcctgagcctgttcgatggcatcgccaccggtctgctggtgctgaaggacctgggcatccaggtggataggtacattgcctccgaggtgtgcgaggactccatcaccgtgggaatggtgcgtcatcagggcaagatcatgtacgtgggcgacgtgcggagcgtgacacagaagcatatccaggagtggggccctttcgacctggtgatcggcggcagcccttgcaatgacctgagcatcgtgaacccagcccggaagggcctgtacgagggaaccggcagactgttcttcgagttttacagactgctgcacgacgcccggcctaaggaaggcgacgaccggcccttcttttggctgttcgagaatgtggtggccatgggagtcagcgacaagcgggatattagccggttcctggagagcaaccccgtgatgatcgatgccaaggaagtgagcgccgcccaccgggccagatacttctggggcaatctgcctggcatgaacagacccctggccagcaccgtgaacgacaagctggagctgcaggagtgcctggagcacggccggatcgccaagttcagcaaggtgagaaccatcaccacccgaagcaacagcatcaaacaaggcaaggaccagcactttcctgtgttcatgaacgagaaggaggacatcctgtggtgtaccgagatggagagagtgttcgggttcccagtccactacacagatgtcagcaacatgtctagactggccagacagagactgctgggaagaagctggtccgtccctgtgatcagacacctgttcgcccctctgaaggagtacttcgcctgcgtgagcagcggcaacagcaacgccaacagccggggccccagcttctctagcggcctggtgccactgtccctgagagggagccacatgggccccatggagatctacaaaaccgtgagcgcctggaagcggcagcctgtgcgcgtgctgagcctgtttcggaatatcgataaagtcctgaaaagcctgggattcctggagagcggctctggctccggcggtggcaccctgaagtacgtggaggatgtgacaaacgtggtcagacgggatgtggagaagtggggccccttcgatctggtgtacggcagcacccaacccctgggcagctcttgtgaccggtgccctggctggtacatgtttcagttccaccggatcctgcagtacgccctgccgagacaggagtcccagcggccattcttttggattttcatggacaacttgctgctgaccgaggatgaccaggaaactaccactcggttcctgcagaccgaagccgtgaccctgcaggacgtgagaggccgggactaccagaacgccatgcgggtgtggtccaacatccctggactgaaaagcaagcacgcacctctgacccctaaagaagaggagtacctgcaggcccaggtgcggagcagaagcaagctggacgcccctaaggtggatctgctggtgaagaattgcctcctgcccctgagagagtacttcaagtatttcagccagaatagtctgcccctgggcggcccaagcagcggcgcccctcctcccagcggcggcagcccagccggctccccaacctctaccgaggagggcacctctgagtccgccacccccgagagcggccctggcacctccaccgagcccagcgagggcagcgcacccggcagccctgccggcagccccacctccacagaggagggaaccagcaccgagcccagcgaaggcagcgccccaggcaccagcaccgagcctagtgagggcggctctggcggcggcagcgcccaggagattaaacggatcaacaagatcagaagaagacttgtgaaagacagcaacaccaagaaggccggcaagacaggccccatgaaaaccctgctggttagagtgatgacacccgatctgagagagcggctggaaaacctgagaaagaagcctgaaaatatcccccagcccatcagcaatacatctagagccaacctgaataagctgctgaccgattacaccgaaatgaagaaggcgatcctgcatgtgtactgggaagagttccagaaggaccctgtgggcctgatgagccgggtggcccagcctgccagcaagaagatcgatcagaacaagctgaaacctgagatggacgagaagggcaacctgaccaccgccggctttgcctgctctcagtgtggccagcccctgttcgtgtacaagctggagcaggtgtctgagaagggcaaggcttacaccaactacttcggacggtgcaatgtggccgagcacgaaaagctgatcctgctggcccagctgaagcccgagaaggatagcgacgaagccgtgacatatagcctgggaaagtttgggcagagggccctggatttctacagcattcatgtgaccaaggagtccacccaccccgtgaagcccctggcccagatcgccggaaacagatacgcctccggacctgtgggaaaggccctgagcgacgcatgtatgggcacaatcgcctccttcctgtctaagtaccaggacatcatcatcgaacaccagaaggtggtgaagggcaaccagaagagactggagagcctgcgggagctggccggcaaggaaaacctggaataccctagcgtgaccctgccacctcagcctcacaccaaggagggcgttgatgcctacaacgaagtgatcgcccgggtgcgaatgtgggtgaacctgaacctgtggcagaagctgaagctaagcagagatgatgccaagcctctgctgagactgaagggattcccttcctttcctctggtcgagagacaggccaacgaagtggactggtgggacatggtgtgtaacgtgaagaagctgatcaacgagaaaaaggaggatggcaaggtgttttggcagaatctggctggctacaagagacaggaagccctgagaccatacctgagcagcgaggaagatcggaagaagggaaagaaattcgctcggtaccagctgggcgacctgctgctgcacctggaaaagaagcacggcgaggactggggaaaggtgtacgacgaggcctgggagcggattgacaagaaagtggaaggcctgagcaagcacatcaagctggaagaggaacggagaagcgaggacgcccagagcaaggccgccctgaccgactggctgcgggctaaggccagcttcgtgatcgagggcctgaaggaggccgacaaggacgagttctgcagatgcgagctgaagctgcagaagtggtacggggacctgcggggaaagcccttcgccatcgaagccgagaacagcatcctggacatcagcggcttcagcaagcagtacaactgtgccttcatctggcagaaggacggcgtgaagaagctgaacctgtacctgatcatcaactacttcaagggcggcaagctgcggttcaagaagatcaaacctgaagccttcgaagccaacagattctacaccgtgatcaacaaaaagagcggcgagatcgtgcccatggaggtgaacttcaacttcgacgaccccaacctgatcatcctgcctctggcctttggcaagagacagggcagagaattcatctggaacgacctgctgtccctggaaaccggcagcctgaagctggccaacggaagagtgatcgagaagacactgtacaacagaagaacccggcaggatgagcctgccctgttcgtggccctgaccttcgagcggcgggaggtcctggactcctccaatatcaaaccaatgaacctgatcggcgtggcaagaggcgaaaacatccccgccgtgatcgccctgaccgaccccgagggctgcccactgagccggtttaaggatagcctgggaaacccaacccacatcctgagaatcggcgagagctataaggagaagcagcggaccatccaggccaagaaggaggtggagcagcggagagccggcggctacagccggaagtacgccagcaaagccaagaatctggcagacgatatggtgagaaacaccgctagagatctgctgtactacgccgtgacccaggatgccatgctgatcttcgccaacctgagccggggcttcggccggcagggcaagcggaccttcatggccgagagacagtacacacggatggaggactggctgaccgccaagctggcctacgagggcctgagcaagacctacctgtccaagacactggcccagtacacctccaagacatgcagcaactgtgggtttaccatcaccagcgccgactacgacagggtgctggagaagctgaagaagacagcaacaggctggatgaccacaattaacggcaaggagctgaaggtggagggccagattacctactacaacagatacaagagacagaacgtagtcaaggacctgtccgtcgagctggatagactgagcgaagaatctgtgaacaacgacatctcctcctggacaaagggcagaagcggagaagctctgagcctcctgaagaaaagattctcccatagacccgtgcaggagaagttcgtgtgcctgaactgcggcttcgagacacacgcagccgagcaagccgccctgaacatcgccagatcctggctgttcctgcggagccaggagtacaagaaataccagacaaacaagacaaccggcaacaccgataagagagccttcgtcgagacctggcagtccttttaccggaagaagcttaaggaggtgtggaaacctgccgtgcggtctggcggatctggcggaggctccacaagcctgctgaccttcgaggacgtggccgtgagcttcagcgaggaggagtggaggctgctggaccccacccagaagagcctgtacaacgacgtgatgcaggagaactacgagaccgtggtgagcctgggcctgaagctgaagaacgacaccggcaacgaccagcccatcagcctgagcgccctggagatccaggccagcggctgcagggtgctgaggaaggccaggatgaaggtggcccagaagaccaccagccccaagaaaaagagaaaagtctaagctgccttctgcggggcttgccttctggccatgcccttcttctctcccttgcacctgtacctcttggtctttgaataaagcctgagtaggaaggctagcaaaaaaaaaaaaaaaaaaaaaaaaaaaaaaaaaaaaaaaaaaaaaaaaaaaaaaaaaaaaaaaaaaaaaaaaaaaaaaaa

SEQ ID NO: 2977 - RNA, 5419 nt, synthetic construct
  source 1..5419: mol_type = other RNA
aggaaataagagagaaaagaagagtaagaagaaatataagagccaccatggcccctaagaagaagcgtaaagtgagccgggtgaacggcagcggcagcggcggcggcatgaaccacgaccaggagttcgacccccctaaggtgtaccctcccgtccccgccgagaagagaaagcccatccgggtcctgagcctgttcgatggcatcgccaccggtctgctggtgctgaaggacctgggcatccaggtggataggtacattgcctccgaggtgtgcgaggactccatcaccgtgggaatggtgcgtcatcagggcaagatcatgtacgtgggcgacgtgcggagcgtgacacagaagcatatccaggagtggggccctttcgacctggtgatcggcggcagcccttgcaatgacctgagcatcgtgaacccagcccggaagggcctgtacgagggaaccggcagactgttcttcgagttttacagactgctgcacgacgcccggcctaaggaaggcgacgaccggcccttcttttggctgttcgagaatgtggtggccatgggagtcagcgacaagcgggatattagccggttcctggagagcaaccccgtgatgatcgatgccaaggaagtgagcgccgcccaccgggccagatacttctggggcaatctgcctggcatgaacagacccctggccagcaccgtgaacgacaagctggagctgcaggagtgcctggagcacggccggatcgccaagttcagcaaggtgagaaccatcaccacccgaagcaacagcatcaaacaaggcaaggaccagcactttcctgtgttcatgaacgagaaggaggacatcctgtggtgtaccgagatggagagagtgttcgggttcccagtccactacacagatgtcagcaacatgtctagactggccagacagagactgctgggaagaagctggtccgtccctgtgatcagacacctgttcgcccctctgaaggagtacttcgcctgcgtgagcagcggcaacagcaacgccaacagccggggccccagcttctctagcggcctggtgccactgtccctgagagggagccacatgggccccatggagatctacaaaaccgtgagcgcctggaagcggcagcctgtgcgcgtgctgagcctgtttcggaatatcgataaagtcctgaaaagcctgggattcctggagagcggctctggctccggcggtggcaccctgaagtacgtggaggatgtgacaaacgtggtcagacgggatgtggagaagtggggccccttcgatctggtgtacggcagcacccaacccctgggcagctcttgtgaccggtgccctggctggtacatgtttcagttccaccggatcctgcagtacgccctgccgagacaggagtcccagcggccattcttttggattttcatggacaacttgctgctgaccgaggatgaccaggaaactaccactcggttcctgcagaccgaagccgtgaccctgcaggacgtgagaggccgggactaccagaacgccatgcgggtgtggtccaacatccctggactgaaaagcaagcacgcacctctgacccctaaagaagaggagtacctgcaggcccaggtgcggagcagaagcaagctggacgcccctaaggtggatctgctggtgaagaattgcctcctgcccctgagagagtacttcaagtatttcagccagaatagtctgcccctgggcggcccaagcagcggcgcccctcctcccagcggcggcagcccagccggctccccaacctctaccgaggagggcacctctgagtccgccacccccgagagcggccctggcacctccaccgagcccagcgagggcagcgcacccggcagccctgccggcagccccacctccacagaggagggaaccagcaccgagcccagcgaaggcagcgccccaggcaccagcaccgagcctagtgagggcggctctggcggcggcagcgcccaggagattaaacggatcaacaagatcagaagaagacttgtgaaagacagcaacaccaagaaggccggcaagacaggccccatgaaaaccctgctggttagagtgatgacacccgatctgagagagcggctggaaaacctgagaaagaagcctgaaaatatcccccagcccatcagcaatacatctagagccaacctgaataagctgctgaccgattacaccgaaatgaagaaggcgatcctgcatgtgtactgggaagagttccagaaggaccctgtgggcctgatgagccgggtggcccagcctgccagcaagaagatcgatcagaacaagctgaaacctgagatggacgagaagggcaacctgaccaccgccggctttgcctgctctcagtgtggccagcccctgttcgtgtacaagctggagcaggtgtctgagaagggcaaggcttacaccaactacttcggacggtgcaatgtggccgagcacgaaaagctgatcctgctggcccagctgaagcccgagaaggatagcgacgaagccgtgacatatagcctgggaaagtttgggcagagggccctggatttctacagcattcatgtgaccaaggagtccacccaccccgtgaagcccctggcccagatcgccggaaacagatacgcctccggacctgtgggaaaggccctgagcgacgcatgtatgggcacaatcgcctccttcctgtctaagtaccaggacatcatcatcgaacaccagaaggtggtgaagggcaaccagaagagactggagagcctgcgggagctggccggcaaggaaaacctggaataccctagcgtgaccctgccacctcagcctcacaccaaggagggcgttgatgcctacaacgaagtgatcgcccgggtgcgaatgtgggtgaacctgaacctgtggcagaagctgaagctaagcagagatgatgccaagcctctgctgagactgaagggattcccttcctttcctctggtcgagagacaggccaacgaagtggactggtgggacatggtgtgtaacgtgaagaagctgatcaacgagaaaaaggaggatggcaaggtgttttggcagaatctggctggctacaagagacaggaagccctgagaccatacctgagcagcgaggaagatcggaagaagggaaagaaattcgctcggtaccagctgggcgacctgctgctgcacctggaaaagaagcacggcgaggactggggaaaggtgtacgacgaggcctgggagcggattgacaagaaagtggaaggcctgagcaagcacatcaagctggaagaggaacggagaagcgaggacgcccagagcaaggccgccctgaccgactggctgcgggctaaggccagcttcgtgatcgagggcctgaaggaggccgacaaggacgagttctgcagatgcgagctgaagctgcagaagtggtacggggacctgcggggaaagcccttcgccatcgaagccgagaacagcatcctggacatcagcggcttcagcaagcagtacaactgtgccttcatctggcagaaggacggcgtgaagaagctgaacctgtacctgatcatcaactacttcaagggcggcaagctgcggttcaagaagatcaaacctgaagccttcgaagccaacagattctacaccgtgatcaacaaaaagagcggcgagatcgtgcccatggaggtgaacttcaacttcgacgaccccaacctgatcatcctgcctctggcctttggcaagagacagggcagagaattcatctggaacgacctgctgtccctggaaaccggcagcctgaagctggccaacggaagagtgatcgagaagacactgtacaacagaagaacccggcaggatgagcctgccctgttcgtggccctgaccttcgagcggcgggaggtcctggactcctccaatatcaaaccaatgaacctgatcggcgtggcaagaggcgaaaacatccccgccgtgatcgccctgaccgaccccgagggctgcccactgagccggtttaaggatagcctgggaaacccaacccacatcctgagaatcggcgagagctataaggagaagcagcggaccatccaggccaagaaggaggtggagcagcggagagccggcggctacagccggaagtacgccagcaaagccaagaatctggcagacgatatggtgagaaacaccgctagagatctgctgtactacgccgtgacccaggatgccatgctgatcttcgccaacctgagccggggcttcggccggcagggcaagcggaccttcatggccgagagacagtacacacggatggaggactggctgaccgccaagctggcctacgagggcctgagcaagacctacctgtccaagacactggcccagtacacctccaagacatgcagcaactgtgggtttaccatcaccagcgccgactacgacagggtgctggagaagctgaagaagacagcaacaggctggatgaccacaattaacggcaaggagctgaaggtggagggccagattacctactacaacagatacaagagacagaacgtagtcaaggacctgtccgtcgagctggatagactgagcgaagaatctgtgaacaacgacatctcctcctggacaaagggcagaagcggagaagctctgagcctcctgaagaaaagattctcccatagacccgtgcaggagaagttcgtgtgcctgaactgcggcttcgagacacacgcagccgagcaagccgccctgaacatcgccagatcctggctgttcctgcggagccaggagtacaagaaataccagacaaacaagacaaccggcaacaccgataagagagccttcgtcgagacctggcagtccttttaccggaagaagcttaaggaggtgtggaaacctgccgtgcggtctggcggatctggcggaggctccacaagcaccgagggccccctgaccttcagggacgtggccatcgagttcagccaggaggagtggaagttcctggtgcccgcccagagggccctgtacagggacgtgatgctggagacctacaggaacctggtgttcctgggcacctgccccagcgacctgagcgtgctgagctggctggagcagggcagggagctgtggaccgtgaacggccccgaggagatcagcaggcccgccaacgagtgggcctgcaccagccccaagaaaaagagaaaagtctaagctgccttctgcggggcttgccttctggccatgcccttcttctctcccttgcacctgtacctcttggtctttgaataaagcctgagtaggaaggctagcaaaaaaaaaaaaaaaaaaaaaaaaaaaaaaaaaaaaaaaaaaaaaaaaaaaaaaaaaaaaaaaaaaaaaaaaaaaaaaaa

SEQ ID NO: 2978 - RNA, 5419 nt, synthetic construct
  source 1..5419: mol_type = other RNA
aggaaataagagagaaaagaagagtaagaagaaatataagagccaccatggcccctaagaagaagcgtaaagtgagccgggtgaacggcagcggcagcggcggcggcatgaaccacgaccaggagttcgacccccctaaggtgtaccctcccgtccccgccgagaagagaaagcccatccgggtcctgagcctgttcgatggcatcgccaccggtctgctggtgctgaaggacctgggcatccaggtggataggtacattgcctccgaggtgtgcgaggactccatcaccgtgggaatggtgcgtcatcagggcaagatcatgtacgtgggcgacgtgcggagcgtgacacagaagcatatccaggagtggggccctttcgacctggtgatcggcggcagcccttgcaatgacctgagcatcgtgaacccagcccggaagggcctgtacgagggaaccggcagactgttcttcgagttttacagactgctgcacgacgcccggcctaaggaaggcgacgaccggcccttcttttggctgttcgagaatgtggtggccatgggagtcagcgacaagcgggatattagccggttcctggagagcaaccccgtgatgatcgatgccaaggaagtgagcgccgcccaccgggccagatacttctggggcaatctgcctggcatgaacagacccctggccagcaccgtgaacgacaagctggagctgcaggagtgcctggagcacggccggatcgccaagttcagcaaggtgagaaccatcaccacccgaagcaacagcatcaaacaaggcaaggaccagcactttcctgtgttcatgaacgagaaggaggacatcctgtggtgtaccgagatggagagagtgttcgggttcccagtccactacacagatgtcagcaacatgtctagactggccagacagagactgctgggaagaagctggtccgtccctgtgatcagacacctgttcgcccctctgaaggagtacttcgcctgcgtgagcagcggcaacagcaacgccaacagccggggccccagcttctctagcggcctggtgccactgtccctgagagggagccacatgggccccatggagatctacaaaaccgtgagcgcctggaagcggcagcctgtgcgcgtgctgagcctgtttcggaatatcgataaagtcctgaaaagcctgggattcctggagagcggctctggctccggcggtggcaccctgaagtacgtggaggatgtgacaaacgtggtcagacgggatgtggagaagtggggccccttcgatctggtgtacggcagcacccaacccctgggcagctcttgtgaccggtgccctggctggtacatgtttcagttccaccggatcctgcagtacgccctgccgagacaggagtcccagcggccattcttttggattttcatggacaacttgctgctgaccgaggatgaccaggaaactaccactcggttcctgcagaccgaagccgtgaccctgcaggacgtgagaggccgggactaccagaacgccatgcgggtgtggtccaacatccctggactgaaaagcaagcacgcacctctgacccctaaagaagaggagtacctgcaggcccaggtgcggagcagaagcaagctggacgcccctaaggtggatctgctggtgaagaattgcctcctgcccctgagagagtacttcaagtatttcagccagaatagtctgcccctgggcggcccaagcagcggcgcccctcctcccagcggcggcagcccagccggctccccaacctctaccgaggagggcacctctgagtccgccacccccgagagcggccctggcacctccaccgagcccagcgagggcagcgcacccggcagccctgccggcagccccacctccacagaggagggaaccagcaccgagcccagcgaaggcagcgccccaggcaccagcaccgagcctagtgagggcggctctggcggcggcagcgcccaggagattaaacggatcaacaagatcagaagaagacttgtgaaagacagcaacaccaagaaggccggcaagacaggccccatgaaaaccctgctggttagagtgatgacacccgatctgagagagcggctggaaaacctgagaaagaagcctgaaaatatcccccagcccatcagcaatacatctagagccaacctgaataagctgctgaccgattacaccgaaatgaagaaggcgatcctgcatgtgtactgggaagagttccagaaggaccctgtgggcctgatgagccgggtggcccagcctgccagcaagaagatcgatcagaacaagctgaaacctgagatggacgagaagggcaacctgaccaccgccggctttgcctgctctcagtgtggccagcccctgttcgtgtacaagctggagcaggtgtctgagaagggcaaggcttacaccaactacttcggacggtgcaatgtggccgagcacgaaaagctgatcctgctggcccagctgaagcccgagaaggatagcgacgaagccgtgacatatagcctgggaaagtttgggcagagggccctggatttctacagcattcatgtgaccaaggagtccacccaccccgtgaagcccctggcccagatcgccggaaacagatacgcctccggacctgtgggaaaggccctgagcgacgcatgtatgggcacaatcgcctccttcctgtctaagtaccaggacatcatcatcgaacaccagaaggtggtgaagggcaaccagaagagactggagagcctgcgggagctggccggcaaggaaaacctggaataccctagcgtgaccctgccacctcagcctcacaccaaggagggcgttgatgcctacaacgaagtgatcgcccgggtgcgaatgtgggtgaacctgaacctgtggcagaagctgaagctaagcagagatgatgccaagcctctgctgagactgaagggattcccttcctttcctctggtcgagagacaggccaacgaagtggactggtgggacatggtgtgtaacgtgaagaagctgatcaacgagaaaaaggaggatggcaaggtgttttggcagaatctggctggctacaagagacaggaagccctgagaccatacctgagcagcgaggaagatcggaagaagggaaagaaattcgctcggtaccagctgggcgacctgctgctgcacctggaaaagaagcacggcgaggactggggaaaggtgtacgacgaggcctgggagcggattgacaagaaagtggaaggcctgagcaagcacatcaagctggaagaggaacggagaagcgaggacgcccagagcaaggccgccctgaccgactggctgcgggctaaggccagcttcgtgatcgagggcctgaaggaggccgacaaggacgagttctgcagatgcgagctgaagctgcagaagtggtacggggacctgcggggaaagcccttcgccatcgaagccgagaacagcatcctggacatcagcggcttcagcaagcagtacaactgtgccttcatctggcagaaggacggcgtgaagaagctgaacctgtacctgatcatcaactacttcaagggcggcaagctgcggttcaagaagatcaaacctgaagccttcgaagccaacagattctacaccgtgatcaacaaaaagagcggcgagatcgtgcccatggaggtgaacttcaacttcgacgaccccaacctgatcatcctgcctctggcctttggcaagagacagggcagagaattcatctggaacgacctgctgtccctggaaaccggcagcctgaagctggccaacggaagagtgatcgagaagacactgtacaacagaagaacccggcaggatgagcctgccctgttcgtggccctgaccttcgagcggcgggaggtcctggactcctccaatatcaaaccaatgaacctgatcggcgtggcaagaggcgaaaacatccccgccgtgatcgccctgaccgaccccgagggctgcccactgagccggtttaaggatagcctgggaaacccaacccacatcctgagaatcggcgagagctataaggagaagcagcggaccatccaggccaagaaggaggtggagcagcggagagccggcggctacagccggaagtacgccagcaaagccaagaatctggcagacgatatggtgagaaacaccgctagagatctgctgtactacgccgtgacccaggatgccatgctgatcttcgccaacctgagccggggcttcggccggcagggcaagcggaccttcatggccgagagacagtacacacggatggaggactggctgaccgccaagctggcctacgagggcctgagcaagacctacctgtccaagacactggcccagtacacctccaagacatgcagcaactgtgggtttaccatcaccagcgccgactacgacagggtgctggagaagctgaagaagacagcaacaggctggatgaccacaattaacggcaaggagctgaaggtggagggccagattacctactacaacagatacaagagacagaacgtagtcaaggacctgtccgtcgagctggatagactgagcgaagaatctgtgaacaacgacatctcctcctggacaaagggcagaagcggagaagctctgagcctcctgaagaaaagattctcccatagacccgtgcaggagaagttcgtgtgcctgaactgcggcttcgagacacacgcagccgagcaagccgccctgaacatcgccagatcctggctgttcctgcggagccaggagtacaagaaataccagacaaacaagacaaccggcaacaccgataagagagccttcgtcgagacctggcagtccttttaccggaagaagcttaaggaggtgtggaaacctgccgtgcggtctggcggatctggcggaggctccacaagcgccgagggccacgtgaccttcgaggacgtggccgtgtacttcagctgggaggagtggggcctgctggacgaggcccagaggctgctgtacagggacgtgatgctggagaacctggccctgatggccagcctgggcctggccagcagcaggacccacgagatcacccagctggagtggtggagggagcccttcctgcccccctgcggcgtggtgaccgccgccatgcccaggggctggaggaggaccagccccaagaaaaagagaaaagtctaagctgccttctgcggggcttgccttctggccatgcccttcttctctcccttgcacctgtacctcttggtctttgaataaagcctgagtaggaaggctagcaaaaaaaaaaaaaaaaaaaaaaaaaaaaaaaaaaaaaaaaaaaaaaaaaaaaaaaaaaaaaaaaaaaaaaaaaaaaaaaa

SEQ ID NO: 2979 - RNA, 5419 nt, synthetic construct
  source 1..5419: mol_type = other RNA
aggaaataagagagaaaagaagagtaagaagaaatataagagccaccatggcccctaagaagaagcgtaaagtgagccgggtgaacggcagcggcagcggcggcggcatgaaccacgaccaggagttcgacccccctaaggtgtaccctcccgtccccgccgagaagagaaagcccatccgggtcctgagcctgttcgatggcatcgccaccggtctgctggtgctgaaggacctgggcatccaggtggataggtacattgcctccgaggtgtgcgaggactccatcaccgtgggaatggtgcgtcatcagggcaagatcatgtacgtgggcgacgtgcggagcgtgacacagaagcatatccaggagtggggccctttcgacctggtgatcggcggcagcccttgcaatgacctgagcatcgtgaacccagcccggaagggcctgtacgagggaaccggcagactgttcttcgagttttacagactgctgcacgacgcccggcctaaggaaggcgacgaccggcccttcttttggctgttcgagaatgtggtggccatgggagtcagcgacaagcgggatattagccggttcctggagagcaaccccgtgatgatcgatgccaaggaagtgagcgccgcccaccgggccagatacttctggggcaatctgcctggcatgaacagacccctggccagcaccgtgaacgacaagctggagctgcaggagtgcctggagcacggccggatcgccaagttcagcaaggtgagaaccatcaccacccgaagcaacagcatcaaacaaggcaaggaccagcactttcctgtgttcatgaacgagaaggaggacatcctgtggtgtaccgagatggagagagtgttcgggttcccagtccactacacagatgtcagcaacatgtctagactggccagacagagactgctgggaagaagctggtccgtccctgtgatcagacacctgttcgcccctctgaaggagtacttcgcctgcgtgagcagcggcaacagcaacgccaacagccggggccccagcttctctagcggcctggtgccactgtccctgagagggagccacatgggccccatggagatctacaaaaccgtgagcgcctggaagcggcagcctgtgcgcgtgctgagcctgtttcggaatatcgataaagtcctgaaaagcctgggattcctggagagcggctctggctccggcggtggcaccctgaagtacgtggaggatgtgacaaacgtggtcagacgggatgtggagaagtggggccccttcgatctggtgtacggcagcacccaacccctgggcagctcttgtgaccggtgccctggctggtacatgtttcagttccaccggatcctgcagtacgccctgccgagacaggagtcccagcggccattcttttggattttcatggacaacttgctgctgaccgaggatgaccaggaaactaccactcggttcctgcagaccgaagccgtgaccctgcaggacgtgagaggccgggactaccagaacgccatgcgggtgtggtccaacatccctggactgaaaagcaagcacgcacctctgacccctaaagaagaggagtacctgcaggcccaggtgcggagcagaagcaagctggacgcccctaaggtggatctgctggtgaagaattgcctcctgcccctgagagagtacttcaagtatttcagccagaatagtctgcccctgggcggcccaagcagcggcgcccctcctcccagcggcggcagcccagccggctccccaacctctaccgaggagggcacctctgagtccgccacccccgagagcggccctggcacctccaccgagcccagcgagggcagcgcacccggcagccctgccggcagccccacctccacagaggagggaaccagcaccgagcccagcgaaggcagcgccccaggcaccagcaccgagcctagtgagggcggctctggcggcggcagcgcccaggagattaaacggatcaacaagatcagaagaagacttgtgaaagacagcaacaccaagaaggccggcaagacaggccccatgaaaaccctgctggttagagtgatgacacccgatctgagagagcggctggaaaacctgagaaagaagcctgaaaatatcccccagcccatcagcaatacatctagagccaacctgaataagctgctgaccgattacaccgaaatgaagaaggcgatcctgcatgtgtactgggaagagttccagaaggaccctgtgggcctgatgagccgggtggcccagcctgccagcaagaagatcgatcagaacaagctgaaacctgagatggacgagaagggcaacctgaccaccgccggctttgcctgctctcagtgtggccagcccctgttcgtgtacaagctggagcaggtgtctgagaagggcaaggcttacaccaactacttcggacggtgcaatgtggccgagcacgaaaagctgatcctgctggcccagctgaagcccgagaaggatagcgacgaagccgtgacatatagcctgggaaagtttgggcagagggccctggatttctacagcattcatgtgaccaaggagtccacccaccccgtgaagcccctggcccagatcgccggaaacagatacgcctccggacctgtgggaaaggccctgagcgacgcatgtatgggcacaatcgcctccttcctgtctaagtaccaggacatcatcatcgaacaccagaaggtggtgaagggcaaccagaagagactggagagcctgcgggagctggccggcaaggaaaacctggaataccctagcgtgaccctgccacctcagcctcacaccaaggagggcgttgatgcctacaacgaagtgatcgcccgggtgcgaatgtgggtgaacctgaacctgtggcagaagctgaagctaagcagagatgatgccaagcctctgctgagactgaagggattcccttcctttcctctggtcgagagacaggccaacgaagtggactggtgggacatggtgtgtaacgtgaagaagctgatcaacgagaaaaaggaggatggcaaggtgttttggcagaatctggctggctacaagagacaggaagccctgagaccatacctgagcagcgaggaagatcggaagaagggaaagaaattcgctcggtaccagctgggcgacctgctgctgcacctggaaaagaagcacggcgaggactggggaaaggtgtacgacgaggcctgggagcggattgacaagaaagtggaaggcctgagcaagcacatcaagctggaagaggaacggagaagcgaggacgcccagagcaaggccgccctgaccgactggctgcgggctaaggccagcttcgtgatcgagggcctgaaggaggccgacaaggacgagttctgcagatgcgagctgaagctgcagaagtggtacggggacctgcggggaaagcccttcgccatcgaagccgagaacagcatcctggacatcagcggcttcagcaagcagtacaactgtgccttcatctggcagaaggacggcgtgaagaagctgaacctgtacctgatcatcaactacttcaagggcggcaagctgcggttcaagaagatcaaacctgaagccttcgaagccaacagattctacaccgtgatcaacaaaaagagcggcgagatcgtgcccatggaggtgaacttcaacttcgacgaccccaacctgatcatcctgcctctggcctttggcaagagacagggcagagaattcatctggaacgacctgctgtccctggaaaccggcagcctgaagctggccaacggaagagtgatcgagaagacactgtacaacagaagaacccggcaggatgagcctgccctgttcgtggccctgaccttcgagcggcgggaggtcctggactcctccaatatcaaaccaatgaacctgatcggcgtggcaagaggcgaaaacatccccgccgtgatcgccctgaccgaccccgagggctgcccactgagccggtttaaggatagcctgggaaacccaacccacatcctgagaatcggcgagagctataaggagaagcagcggaccatccaggccaagaaggaggtggagcagcggagagccggcggctacagccggaagtacgccagcaaagccaagaatctggcagacgatatggtgagaaacaccgctagagatctgctgtactacgccgtgacccaggatgccatgctgatcttcgccaacctgagccggggcttcggccggcagggcaagcggaccttcatggccgagagacagtacacacggatggaggactggctgaccgccaagctggcctacgagggcctgagcaagacctacctgtccaagacactggcccagtacacctccaagacatgcagcaactgtgggtttaccatcaccagcgccgactacgacagggtgctggagaagctgaagaagacagcaacaggctggatgaccacaattaacggcaaggagctgaaggtggagggccagattacctactacaacagatacaagagacagaacgtagtcaaggacctgtccgtcgagctggatagactgagcgaagaatctgtgaacaacgacatctcctcctggacaaagggcagaagcggagaagctctgagcctcctgaagaaaagattctcccatagacccgtgcaggagaagttcgtgtgcctgaactgcggcttcgagacacacgcagccgagcaagccgccctgaacatcgccagatcctggctgttcctgcggagccaggagtacaagaaataccagacaaacaagacaaccggcaacaccgataagagagccttcgtcgagacctggcagtccttttaccggaagaagcttaaggaggtgtggaaacctgccgtgcggtctggcggatctggcggaggctccacaagcccccaggacctggtgaccttcaaggacgtggccatcgacttcagccaggaggagtgggagtggctgaaccccgcccagaggagcctgtacaggagcatgatgctggagaactaccagagcctggtgagcgtgggcctgtgcgtgagcaagccctacgtgatcagcctgctggagcagggcaaggagccctgggagatgaagagcgagatgaggaggacccccttccccgactgggagagcgtgaccagccccaagaaaaagagaaaagtctaagctgccttctgcggggcttgccttctggccatgcccttcttctctcccttgcacctgtacctcttggtctttgaataaagcctgagtaggaaggctagcaaaaaaaaaaaaaaaaaaaaaaaaaaaaaaaaaaaaaaaaaaaaaaaaaaaaaaaaaaaaaaaaaaaaaaaaaaaaaaaa

SEQ ID NO: 2980 - RNA, 5419 nt, synthetic construct
  source 1..5419: mol_type = other RNA
aggaaataagagagaaaagaagagtaagaagaaatataagagccaccatggcccctaagaagaagcgtaaagtgagccgggtgaacggcagcggcagcggcggcggcatgaaccacgaccaggagttcgacccccctaaggtgtaccctcccgtccccgccgagaagagaaagcccatccgggtcctgagcctgttcgatggcatcgccaccggtctgctggtgctgaaggacctgggcatccaggtggataggtacattgcctccgaggtgtgcgaggactccatcaccgtgggaatggtgcgtcatcagggcaagatcatgtacgtgggcgacgtgcggagcgtgacacagaagcatatccaggagtggggccctttcgacctggtgatcggcggcagcccttgcaatgacctgagcatcgtgaacccagcccggaagggcctgtacgagggaaccggcagactgttcttcgagttttacagactgctgcacgacgcccggcctaaggaaggcgacgaccggcccttcttttggctgttcgagaatgtggtggccatgggagtcagcgacaagcgggatattagccggttcctggagagcaaccccgtgatgatcgatgccaaggaagtgagcgccgcccaccgggccagatacttctggggcaatctgcctggcatgaacagacccctggccagcaccgtgaacgacaagctggagctgcaggagtgcctggagcacggccggatcgccaagttcagcaaggtgagaaccatcaccacccgaagcaacagcatcaaacaaggcaaggaccagcactttcctgtgttcatgaacgagaaggaggacatcctgtggtgtaccgagatggagagagtgttcgggttcccagtccactacacagatgtcagcaacatgtctagactggccagacagagactgctgggaagaagctggtccgtccctgtgatcagacacctgttcgcccctctgaaggagtacttcgcctgcgtgagcagcggcaacagcaacgccaacagccggggccccagcttctctagcggcctggtgccactgtccctgagagggagccacatgggccccatggagatctacaaaaccgtgagcgcctggaagcggcagcctgtgcgcgtgctgagcctgtttcggaatatcgataaagtcctgaaaagcctgggattcctggagagcggctctggctccggcggtggcaccctgaagtacgtggaggatgtgacaaacgtggtcagacgggatgtggagaagtggggccccttcgatctggtgtacggcagcacccaacccctgggcagctcttgtgaccggtgccctggctggtacatgtttcagttccaccggatcctgcagtacgccctgccgagacaggagtcccagcggccattcttttggattttcatggacaacttgctgctgaccgaggatgaccaggaaactaccactcggttcctgcagaccgaagccgtgaccctgcaggacgtgagaggccgggactaccagaacgccatgcgggtgtggtccaacatccctggactgaaaagcaagcacgcacctctgacccctaaagaagaggagtacctgcaggcccaggtgcggagcagaagcaagctggacgcccctaaggtggatctgctggtgaagaattgcctcctgcccctgagagagtacttcaagtatttcagccagaatagtctgcccctgggcggcccaagcagcggcgcccctcctcccagcggcggcagcccagccggctccccaacctctaccgaggagggcacctctgagtccgccacccccgagagcggccctggcacctccaccgagcccagcgagggcagcgcacccggcagccctgccggcagccccacctccacagaggagggaaccagcaccgagcccagcgaaggcagcgccccaggcaccagcaccgagcctagtgagggcggctctggcggcggcagcgcccaggagattaaacggatcaacaagatcagaagaagacttgtgaaagacagcaacaccaagaaggccggcaagacaggccccatgaaaaccctgctggttagagtgatgacacccgatctgagagagcggctggaaaacctgagaaagaagcctgaaaatatcccccagcccatcagcaatacatctagagccaacctgaataagctgctgaccgattacaccgaaatgaagaaggcgatcctgcatgtgtactgggaagagttccagaaggaccctgtgggcctgatgagccgggtggcccagcctgccagcaagaagatcgatcagaacaagctgaaacctgagatggacgagaagggcaacctgaccaccgccggctttgcctgctctcagtgtggccagcccctgttcgtgtacaagctggagcaggtgtctgagaagggcaaggcttacaccaactacttcggacggtgcaatgtggccgagcacgaaaagctgatcctgctggcccagctgaagcccgagaaggatagcgacgaagccgtgacatatagcctgggaaagtttgggcagagggccctggatttctacagcattcatgtgaccaaggagtccacccaccccgtgaagcccctggcccagatcgccggaaacagatacgcctccggacctgtgggaaaggccctgagcgacgcatgtatgggcacaatcgcctccttcctgtctaagtaccaggacatcatcatcgaacaccagaaggtggtgaagggcaaccagaagagactggagagcctgcgggagctggccggcaaggaaaacctggaataccctagcgtgaccctgccacctcagcctcacaccaaggagggcgttgatgcctacaacgaagtgatcgcccgggtgcgaatgtgggtgaacctgaacctgtggcagaagctgaagctaagcagagatgatgccaagcctctgctgagactgaagggattcccttcctttcctctggtcgagagacaggccaacgaagtggactggtgggacatggtgtgtaacgtgaagaagctgatcaacgagaaaaaggaggatggcaaggtgttttggcagaatctggctggctacaagagacaggaagccctgagaccatacctgagcagcgaggaagatcggaagaagggaaagaaattcgctcggtaccagctgggcgacctgctgctgcacctggaaaagaagcacggcgaggactggggaaaggtgtacgacgaggcctgggagcggattgacaagaaagtggaaggcctgagcaagcacatcaagctggaagaggaacggagaagcgaggacgcccagagcaaggccgccctgaccgactggctgcgggctaaggccagcttcgtgatcgagggcctgaaggaggccgacaaggacgagttctgcagatgcgagctgaagctgcagaagtggtacggggacctgcggggaaagcccttcgccatcgaagccgagaacagcatcctggacatcagcggcttcagcaagcagtacaactgtgccttcatctggcagaaggacggcgtgaagaagctgaacctgtacctgatcatcaactacttcaagggcggcaagctgcggttcaagaagatcaaacctgaagccttcgaagccaacagattctacaccgtgatcaacaaaaagagcggcgagatcgtgcccatggaggtgaacttcaacttcgacgaccccaacctgatcatcctgcctctggcctttggcaagagacagggcagagaattcatctggaacgacctgctgtccctggaaaccggcagcctgaagctggccaacggaagagtgatcgagaagacactgtacaacagaagaacccggcaggatgagcctgccctgttcgtggccctgaccttcgagcggcgggaggtcctggactcctccaatatcaaaccaatgaacctgatcggcgtggcaagaggcgaaaacatccccgccgtgatcgccctgaccgaccccgagggctgcccactgagccggtttaaggatagcctgggaaacccaacccacatcctgagaatcggcgagagctataaggagaagcagcggaccatccaggccaagaaggaggtggagcagcggagagccggcggctacagccggaagtacgccagcaaagccaagaatctggcagacgatatggtgagaaacaccgctagagatctgctgtactacgccgtgacccaggatgccatgctgatcttcgccaacctgagccggggcttcggccggcagggcaagcggaccttcatggccgagagacagtacacacggatggaggactggctgaccgccaagctggcctacgagggcctgagcaagacctacctgtccaagacactggcccagtacacctccaagacatgcagcaactgtgggtttaccatcaccagcgccgactacgacagggtgctggagaagctgaagaagacagcaacaggctggatgaccacaattaacggcaaggagctgaaggtggagggccagattacctactacaacagatacaagagacagaacgtagtcaaggacctgtccgtcgagctggatagactgagcgaagaatctgtgaacaacgacatctcctcctggacaaagggcagaagcggagaagctctgagcctcctgaagaaaagattctcccatagacccgtgcaggagaagttcgtgtgcctgaactgcggcttcgagacacacgcagccgagcaagccgccctgaacatcgccagatcctggctgttcctgcggagccaggagtacaagaaataccagacaaacaagacaaccggcaacaccgataagagagccttcgtcgagacctggcagtccttttaccggaagaagcttaaggaggtgtggaaacctgccgtgcggtctggcggatctggcggaggctccacaagcttccagggcagcatcagcttcaaggacgtgaccgtgggcttcagccaggaggagtggcagcacctgaaccccagccagagggccctgtacagggacgtgatgctggagaactacagcaacctggtgagcgtgggctactgcgtgcacaagcccgaggtgatcagcaggctggagcagggcgaggagccctggaggctggaggaggagttccccagccagagcttcagcgaggtgtggaccgccaccagccccaagaaaaagagaaaagtctaagctgccttctgcggggcttgccttctggccatgcccttcttctctcccttgcacctgtacctcttggtctttgaataaagcctgagtaggaaggctagcaaaaaaaaaaaaaaaaaaaaaaaaaaaaaaaaaaaaaaaaaaaaaaaaaaaaaaaaaaaaaaaaaaaaaaaaaaaaaaaa

SEQ ID NO: 2981 - RNA, 5419 nt, synthetic construct
  source 1..5419: mol_type = other RNA
aggaaataagagagaaaagaagagtaagaagaaatataagagccaccatggcccctaagaagaagcgtaaagtgagccgggtgaacggcagcggcagcggcggcggcatgaaccacgaccaggagttcgacccccctaaggtgtaccctcccgtccccgccgagaagagaaagcccatccgggtcctgagcctgttcgatggcatcgccaccggtctgctggtgctgaaggacctgggcatccaggtggataggtacattgcctccgaggtgtgcgaggactccatcaccgtgggaatggtgcgtcatcagggcaagatcatgtacgtgggcgacgtgcggagcgtgacacagaagcatatccaggagtggggccctttcgacctggtgatcggcggcagcccttgcaatgacctgagcatcgtgaacccagcccggaagggcctgtacgagggaaccggcagactgttcttcgagttttacagactgctgcacgacgcccggcctaaggaaggcgacgaccggcccttcttttggctgttcgagaatgtggtggccatgggagtcagcgacaagcgggatattagccggttcctggagagcaaccccgtgatgatcgatgccaaggaagtgagcgccgcccaccgggccagatacttctggggcaatctgcctggcatgaacagacccctggccagcaccgtgaacgacaagctggagctgcaggagtgcctggagcacggccggatcgccaagttcagcaaggtgagaaccatcaccacccgaagcaacagcatcaaacaaggcaaggaccagcactttcctgtgttcatgaacgagaaggaggacatcctgtggtgtaccgagatggagagagtgttcgggttcccagtccactacacagatgtcagcaacatgtctagactggccagacagagactgctgggaagaagctggtccgtccctgtgatcagacacctgttcgcccctctgaaggagtacttcgcctgcgtgagcagcggcaacagcaacgccaacagccggggccccagcttctctagcggcctggtgccactgtccctgagagggagccacatgggccccatggagatctacaaaaccgtgagcgcctggaagcggcagcctgtgcgcgtgctgagcctgtttcggaatatcgataaagtcctgaaaagcctgggattcctggagagcggctctggctccggcggtggcaccctgaagtacgtggaggatgtgacaaacgtggtcagacgggatgtggagaagtggggccccttcgatctggtgtacggcagcacccaacccctgggcagctcttgtgaccggtgccctggctggtacatgtttcagttccaccggatcctgcagtacgccctgccgagacaggagtcccagcggccattcttttggattttcatggacaacttgctgctgaccgaggatgaccaggaaactaccactcggttcctgcagaccgaagccgtgaccctgcaggacgtgagaggccgggactaccagaacgccatgcgggtgtggtccaacatccctggactgaaaagcaagcacgcacctctgacccctaaagaagaggagtacctgcaggcccaggtgcggagcagaagcaagctggacgcccctaaggtggatctgctggtgaagaattgcctcctgcccctgagagagtacttcaagtatttcagccagaatagtctgcccctgggcggcccaagcagcggcgcccctcctcccagcggcggcagcccagccggctccccaacctctaccgaggagggcacctctgagtccgccacccccgagagcggccctggcacctccaccgagcccagcgagggcagcgcacccggcagccctgccggcagccccacctccacagaggagggaaccagcaccgagcccagcgaaggcagcgccccaggcaccagcaccgagcctagtgagggcggctctggcggcggcagcgcccaggagattaaacggatcaacaagatcagaagaagacttgtgaaagacagcaacaccaagaaggccggcaagacaggccccatgaaaaccctgctggttagagtgatgacacccgatctgagagagcggctggaaaacctgagaaagaagcctgaaaatatcccccagcccatcagcaatacatctagagccaacctgaataagctgctgaccgattacaccgaaatgaagaaggcgatcctgcatgtgtactgggaagagttccagaaggaccctgtgggcctgatgagccgggtggcccagcctgccagcaagaagatcgatcagaacaagctgaaacctgagatggacgagaagggcaacctgaccaccgccggctttgcctgctctcagtgtggccagcccctgttcgtgtacaagctggagcaggtgtctgagaagggcaaggcttacaccaactacttcggacggtgcaatgtggccgagcacgaaaagctgatcctgctggcccagctgaagcccgagaaggatagcgacgaagccgtgacatatagcctgggaaagtttgggcagagggccctggatttctacagcattcatgtgaccaaggagtccacccaccccgtgaagcccctggcccagatcgccggaaacagatacgcctccggacctgtgggaaaggccctgagcgacgcatgtatgggcacaatcgcctccttcctgtctaagtaccaggacatcatcatcgaacaccagaaggtggtgaagggcaaccagaagagactggagagcctgcgggagctggccggcaaggaaaacctggaataccctagcgtgaccctgccacctcagcctcacaccaaggagggcgttgatgcctacaacgaagtgatcgcccgggtgcgaatgtgggtgaacctgaacctgtggcagaagctgaagctaagcagagatgatgccaagcctctgctgagactgaagggattcccttcctttcctctggtcgagagacaggccaacgaagtggactggtgggacatggtgtgtaacgtgaagaagctgatcaacgagaaaaaggaggatggcaaggtgttttggcagaatctggctggctacaagagacaggaagccctgagaccatacctgagcagcgaggaagatcggaagaagggaaagaaattcgctcggtaccagctgggcgacctgctgctgcacctggaaaagaagcacggcgaggactggggaaaggtgtacgacgaggcctgggagcggattgacaagaaagtggaaggcctgagcaagcacatcaagctggaagaggaacggagaagcgaggacgcccagagcaaggccgccctgaccgactggctgcgggctaaggccagcttcgtgatcgagggcctgaaggaggccgacaaggacgagttctgcagatgcgagctgaagctgcagaagtggtacggggacctgcggggaaagcccttcgccatcgaagccgagaacagcatcctggacatcagcggcttcagcaagcagtacaactgtgccttcatctggcagaaggacggcgtgaagaagctgaacctgtacctgatcatcaactacttcaagggcggcaagctgcggttcaagaagatcaaacctgaagccttcgaagccaacagattctacaccgtgatcaacaaaaagagcggcgagatcgtgcccatggaggtgaacttcaacttcgacgaccccaacctgatcatcctgcctctggcctttggcaagagacagggcagagaattcatctggaacgacctgctgtccctggaaaccggcagcctgaagctggccaacggaagagtgatcgagaagacactgtacaacagaagaacccggcaggatgagcctgccctgttcgtggccctgaccttcgagcggcgggaggtcctggactcctccaatatcaaaccaatgaacctgatcggcgtggcaagaggcgaaaacatccccgccgtgatcgccctgaccgaccccgagggctgcccactgagccggtttaaggatagcctgggaaacccaacccacatcctgagaatcggcgagagctataaggagaagcagcggaccatccaggccaagaaggaggtggagcagcggagagccggcggctacagccggaagtacgccagcaaagccaagaatctggcagacgatatggtgagaaacaccgctagagatctgctgtactacgccgtgacccaggatgccatgctgatcttcgccaacctgagccggggcttcggccggcagggcaagcggaccttcatggccgagagacagtacacacggatggaggactggctgaccgccaagctggcctacgagggcctgagcaagacctacctgtccaagacactggcccagtacacctccaagacatgcagcaactgtgggtttaccatcaccagcgccgactacgacagggtgctggagaagctgaagaagacagcaacaggctggatgaccacaattaacggcaaggagctgaaggtggagggccagattacctactacaacagatacaagagacagaacgtagtcaaggacctgtccgtcgagctggatagactgagcgaagaatctgtgaacaacgacatctcctcctggacaaagggcagaagcggagaagctctgagcctcctgaagaaaagattctcccatagacccgtgcaggagaagttcgtgtgcctgaactgcggcttcgagacacacgcagccgagcaagccgccctgaacatcgccagatcctggctgttcctgcggagccaggagtacaagaaataccagacaaacaagacaaccggcaacaccgataagagagccttcgtcgagacctggcagtccttttaccggaagaagcttaaggaggtgtggaaacctgccgtgcggtctggcggatctggcggaggctccacaagcacccagcccgacgaggacctgcacctgcaggtggaggagacccagctggtgaaggagagcgtgaccttcaaggacgtggccatcgacttcaccctggaggagtggaggctgatggaccccacccagaggaacctgcacaaggacgtgatgctggagaactacaggaacctggtgagcctgggcctggccgtgagcaagcccgacatgatcagccacctggagaacggcaagggcccctgggtgaccagccccaagaaaaagagaaaagtctaagctgccttctgcggggcttgccttctggccatgcccttcttctctcccttgcacctgtacctcttggtctttgaataaagcctgagtaggaaggctagcaaaaaaaaaaaaaaaaaaaaaaaaaaaaaaaaaaaaaaaaaaaaaaaaaaaaaaaaaaaaaaaaaaaaaaaaaaaaaaaa

SEQ ID NO: 2982 - RNA, 5419 nt, synthetic construct
  source 1..5419: mol_type = other RNA
aggaaataagagagaaaagaagagtaagaagaaatataagagccaccatggcccctaagaagaagcgtaaagtgagccgggtgaacggcagcggcagcggcggcggcatgaaccacgaccaggagttcgacccccctaaggtgtaccctcccgtccccgccgagaagagaaagcccatccgggtcctgagcctgttcgatggcatcgccaccggtctgctggtgctgaaggacctgggcatccaggtggataggtacattgcctccgaggtgtgcgaggactccatcaccgtgggaatggtgcgtcatcagggcaagatcatgtacgtgggcgacgtgcggagcgtgacacagaagcatatccaggagtggggccctttcgacctggtgatcggcggcagcccttgcaatgacctgagcatcgtgaacccagcccggaagggcctgtacgagggaaccggcagactgttcttcgagttttacagactgctgcacgacgcccggcctaaggaaggcgacgaccggcccttcttttggctgttcgagaatgtggtggccatgggagtcagcgacaagcgggatattagccggttcctggagagcaaccccgtgatgatcgatgccaaggaagtgagcgccgcccaccgggccagatacttctggggcaatctgcctggcatgaacagacccctggccagcaccgtgaacgacaagctggagctgcaggagtgcctggagcacggccggatcgccaagttcagcaaggtgagaaccatcaccacccgaagcaacagcatcaaacaaggcaaggaccagcactttcctgtgttcatgaacgagaaggaggacatcctgtggtgtaccgagatggagagagtgttcgggttcccagtccactacacagatgtcagcaacatgtctagactggccagacagagactgctgggaagaagctggtccgtccctgtgatcagacacctgttcgcccctctgaaggagtacttcgcctgcgtgagcagcggcaacagcaacgccaacagccggggccccagcttctctagcggcctggtgccactgtccctgagagggagccacatgggccccatggagatctacaaaaccgtgagcgcctggaagcggcagcctgtgcgcgtgctgagcctgtttcggaatatcgataaagtcctgaaaagcctgggattcctggagagcggctctggctccggcggtggcaccctgaagtacgtggaggatgtgacaaacgtggtcagacgggatgtggagaagtggggccccttcgatctggtgtacggcagcacccaacccctgggcagctcttgtgaccggtgccctggctggtacatgtttcagttccaccggatcctgcagtacgccctgccgagacaggagtcccagcggccattcttttggattttcatggacaacttgctgctgaccgaggatgaccaggaaactaccactcggttcctgcagaccgaagccgtgaccctgcaggacgtgagaggccgggactaccagaacgccatgcgggtgtggtccaacatccctggactgaaaagcaagcacgcacctctgacccctaaagaagaggagtacctgcaggcccaggtgcggagcagaagcaagctggacgcccctaaggtggatctgctggtgaagaattgcctcctgcccctgagagagtacttcaagtatttcagccagaatagtctgcccctgggcggcccaagcagcggcgcccctcctcccagcggcggcagcccagccggctccccaacctctaccgaggagggcacctctgagtccgccacccccgagagcggccctggcacctccaccgagcccagcgagggcagcgcacccggcagccctgccggcagccccacctccacagaggagggaaccagcaccgagcccagcgaaggcagcgccccaggcaccagcaccgagcctagtgagggcggctctggcggcggcagcgcccaggagattaaacggatcaacaagatcagaagaagacttgtgaaagacagcaacaccaagaaggccggcaagacaggccccatgaaaaccctgctggttagagtgatgacacccgatctgagagagcggctggaaaacctgagaaagaagcctgaaaatatcccccagcccatcagcaatacatctagagccaacctgaataagctgctgaccgattacaccgaaatgaagaaggcgatcctgcatgtgtactgggaagagttccagaaggaccctgtgggcctgatgagccgggtggcccagcctgccagcaagaagatcgatcagaacaagctgaaacctgagatggacgagaagggcaacctgaccaccgccggctttgcctgctctcagtgtggccagcccctgttcgtgtacaagctggagcaggtgtctgagaagggcaaggcttacaccaactacttcggacggtgcaatgtggccgagcacgaaaagctgatcctgctggcccagctgaagcccgagaaggatagcgacgaagccgtgacatatagcctgggaaagtttgggcagagggccctggatttctacagcattcatgtgaccaaggagtccacccaccccgtgaagcccctggcccagatcgccggaaacagatacgcctccggacctgtgggaaaggccctgagcgacgcatgtatgggcacaatcgcctccttcctgtctaagtaccaggacatcatcatcgaacaccagaaggtggtgaagggcaaccagaagagactggagagcctgcgggagctggccggcaaggaaaacctggaataccctagcgtgaccctgccacctcagcctcacaccaaggagggcgttgatgcctacaacgaagtgatcgcccgggtgcgaatgtgggtgaacctgaacctgtggcagaagctgaagctaagcagagatgatgccaagcctctgctgagactgaagggattcccttcctttcctctggtcgagagacaggccaacgaagtggactggtgggacatggtgtgtaacgtgaagaagctgatcaacgagaaaaaggaggatggcaaggtgttttggcagaatctggctggctacaagagacaggaagccctgagaccatacctgagcagcgaggaagatcggaagaagggaaagaaattcgctcggtaccagctgggcgacctgctgctgcacctggaaaagaagcacggcgaggactggggaaaggtgtacgacgaggcctgggagcggattgacaagaaagtggaaggcctgagcaagcacatcaagctggaagaggaacggagaagcgaggacgcccagagcaaggccgccctgaccgactggctgcgggctaaggccagcttcgtgatcgagggcctgaaggaggccgacaaggacgagttctgcagatgcgagctgaagctgcagaagtggtacggggacctgcggggaaagcccttcgccatcgaagccgagaacagcatcctggacatcagcggcttcagcaagcagtacaactgtgccttcatctggcagaaggacggcgtgaagaagctgaacctgtacctgatcatcaactacttcaagggcggcaagctgcggttcaagaagatcaaacctgaagccttcgaagccaacagattctacaccgtgatcaacaaaaagagcggcgagatcgtgcccatggaggtgaacttcaacttcgacgaccccaacctgatcatcctgcctctggcctttggcaagagacagggcagagaattcatctggaacgacctgctgtccctggaaaccggcagcctgaagctggccaacggaagagtgatcgagaagacactgtacaacagaagaacccggcaggatgagcctgccctgttcgtggccctgaccttcgagcggcgggaggtcctggactcctccaatatcaaaccaatgaacctgatcggcgtggcaagaggcgaaaacatccccgccgtgatcgccctgaccgaccccgagggctgcccactgagccggtttaaggatagcctgggaaacccaacccacatcctgagaatcggcgagagctataaggagaagcagcggaccatccaggccaagaaggaggtggagcagcggagagccggcggctacagccggaagtacgccagcaaagccaagaatctggcagacgatatggtgagaaacaccgctagagatctgctgtactacgccgtgacccaggatgccatgctgatcttcgccaacctgagccggggcttcggccggcagggcaagcggaccttcatggccgagagacagtacacacggatggaggactggctgaccgccaagctggcctacgagggcctgagcaagacctacctgtccaagacactggcccagtacacctccaagacatgcagcaactgtgggtttaccatcaccagcgccgactacgacagggtgctggagaagctgaagaagacagcaacaggctggatgaccacaattaacggcaaggagctgaaggtggagggccagattacctactacaacagatacaagagacagaacgtagtcaaggacctgtccgtcgagctggatagactgagcgaagaatctgtgaacaacgacatctcctcctggacaaagggcagaagcggagaagctctgagcctcctgaagaaaagattctcccatagacccgtgcaggagaagttcgtgtgcctgaactgcggcttcgagacacacgcagccgagcaagccgccctgaacatcgccagatcctggctgttcctgcggagccaggagtacaagaaataccagacaaacaagacaaccggcaacaccgataagagagccttcgtcgagacctggcagtccttttaccggaagaagcttaaggaggtgtggaaacctgccgtgcggtctggcggatctggcggaggctccacaagcgcccaggagttcgtgatgttcagggacgtggccgtgttcttcagccaggaggagtggggccacctggaccccgcccagagggccctgtacagggaggtgatgctggagaactacagcaacctggtgagcctgggcatcaggttcagcaagcccaaggtgatcagccagctgcagcagggcgaggacccctggatggtggacaggggcgtgccccagggcgcctgccagggctggaagagcctgaccagccccaagaaaaagagaaaagtctaagctgccttctgcggggcttgccttctggccatgcccttcttctctcccttgcacctgtacctcttggtctttgaataaagcctgagtaggaaggctagcaaaaaaaaaaaaaaaaaaaaaaaaaaaaaaaaaaaaaaaaaaaaaaaaaaaaaaaaaaaaaaaaaaaaaaaaaaaaaaaa

SEQ ID NO: 2983 - RNA, 5419 nt, synthetic construct
  source 1..5419: mol_type = other RNA
aggaaataagagagaaaagaagagtaagaagaaatataagagccaccatggcccctaagaagaagcgtaaagtgagccgggtgaacggcagcggcagcggcggcggcatgaaccacgaccaggagttcgacccccctaaggtgtaccctcccgtccccgccgagaagagaaagcccatccgggtcctgagcctgttcgatggcatcgccaccggtctgctggtgctgaaggacctgggcatccaggtggataggtacattgcctccgaggtgtgcgaggactccatcaccgtgggaatggtgcgtcatcagggcaagatcatgtacgtgggcgacgtgcggagcgtgacacagaagcatatccaggagtggggccctttcgacctggtgatcggcggcagcccttgcaatgacctgagcatcgtgaacccagcccggaagggcctgtacgagggaaccggcagactgttcttcgagttttacagactgctgcacgacgcccggcctaaggaaggcgacgaccggcccttcttttggctgttcgagaatgtggtggccatgggagtcagcgacaagcgggatattagccggttcctggagagcaaccccgtgatgatcgatgccaaggaagtgagcgccgcccaccgggccagatacttctggggcaatctgcctggcatgaacagacccctggccagcaccgtgaacgacaagctggagctgcaggagtgcctggagcacggccggatcgccaagttcagcaaggtgagaaccatcaccacccgaagcaacagcatcaaacaaggcaaggaccagcactttcctgtgttcatgaacgagaaggaggacatcctgtggtgtaccgagatggagagagtgttcgggttcccagtccactacacagatgtcagcaacatgtctagactggccagacagagactgctgggaagaagctggtccgtccctgtgatcagacacctgttcgcccctctgaaggagtacttcgcctgcgtgagcagcggcaacagcaacgccaacagccggggccccagcttctctagcggcctggtgccactgtccctgagagggagccacatgggccccatggagatctacaaaaccgtgagcgcctggaagcggcagcctgtgcgcgtgctgagcctgtttcggaatatcgataaagtcctgaaaagcctgggattcctggagagcggctctggctccggcggtggcaccctgaagtacgtggaggatgtgacaaacgtggtcagacgggatgtggagaagtggggccccttcgatctggtgtacggcagcacccaacccctgggcagctcttgtgaccggtgccctggctggtacatgtttcagttccaccggatcctgcagtacgccctgccgagacaggagtcccagcggccattcttttggattttcatggacaacttgctgctgaccgaggatgaccaggaaactaccactcggttcctgcagaccgaagccgtgaccctgcaggacgtgagaggccgggactaccagaacgccatgcgggtgtggtccaacatccctggactgaaaagcaagcacgcacctctgacccctaaagaagaggagtacctgcaggcccaggtgcggagcagaagcaagctggacgcccctaaggtggatctgctggtgaagaattgcctcctgcccctgagagagtacttcaagtatttcagccagaatagtctgcccctgggcggcccaagcagcggcgcccctcctcccagcggcggcagcccagccggctccccaacctctaccgaggagggcacctctgagtccgccacccccgagagcggccctggcacctccaccgagcccagcgagggcagcgcacccggcagccctgccggcagccccacctccacagaggagggaaccagcaccgagcccagcgaaggcagcgccccaggcaccagcaccgagcctagtgagggcggctctggcggcggcagcgcccaggagattaaacggatcaacaagatcagaagaagacttgtgaaagacagcaacaccaagaaggccggcaagacaggccccatgaaaaccctgctggttagagtgatgacacccgatctgagagagcggctggaaaacctgagaaagaagcctgaaaatatcccccagcccatcagcaatacatctagagccaacctgaataagctgctgaccgattacaccgaaatgaagaaggcgatcctgcatgtgtactgggaagagttccagaaggaccctgtgggcctgatgagccgggtggcccagcctgccagcaagaagatcgatcagaacaagctgaaacctgagatggacgagaagggcaacctgaccaccgccggctttgcctgctctcagtgtggccagcccctgttcgtgtacaagctggagcaggtgtctgagaagggcaaggcttacaccaactacttcggacggtgcaatgtggccgagcacgaaaagctgatcctgctggcccagctgaagcccgagaaggatagcgacgaagccgtgacatatagcctgggaaagtttgggcagagggccctggatttctacagcattcatgtgaccaaggagtccacccaccccgtgaagcccctggcccagatcgccggaaacagatacgcctccggacctgtgggaaaggccctgagcgacgcatgtatgggcacaatcgcctccttcctgtctaagtaccaggacatcatcatcgaacaccagaaggtggtgaagggcaaccagaagagactggagagcctgcgggagctggccggcaaggaaaacctggaataccctagcgtgaccctgccacctcagcctcacaccaaggagggcgttgatgcctacaacgaagtgatcgcccgggtgcgaatgtgggtgaacctgaacctgtggcagaagctgaagctaagcagagatgatgccaagcctctgctgagactgaagggattcccttcctttcctctggtcgagagacaggccaacgaagtggactggtgggacatggtgtgtaacgtgaagaagctgatcaacgagaaaaaggaggatggcaaggtgttttggcagaatctggctggctacaagagacaggaagccctgagaccatacctgagcagcgaggaagatcggaagaagggaaagaaattcgctcggtaccagctgggcgacctgctgctgcacctggaaaagaagcacggcgaggactggggaaaggtgtacgacgaggcctgggagcggattgacaagaaagtggaaggcctgagcaagcacatcaagctggaagaggaacggagaagcgaggacgcccagagcaaggccgccctgaccgactggctgcgggctaaggccagcttcgtgatcgagggcctgaaggaggccgacaaggacgagttctgcagatgcgagctgaagctgcagaagtggtacggggacctgcggggaaagcccttcgccatcgaagccgagaacagcatcctggacatcagcggcttcagcaagcagtacaactgtgccttcatctggcagaaggacggcgtgaagaagctgaacctgtacctgatcatcaactacttcaagggcggcaagctgcggttcaagaagatcaaacctgaagccttcgaagccaacagattctacaccgtgatcaacaaaaagagcggcgagatcgtgcccatggaggtgaacttcaacttcgacgaccccaacctgatcatcctgcctctggcctttggcaagagacagggcagagaattcatctggaacgacctgctgtccctggaaaccggcagcctgaagctggccaacggaagagtgatcgagaagacactgtacaacagaagaacccggcaggatgagcctgccctgttcgtggccctgaccttcgagcggcgggaggtcctggactcctccaatatcaaaccaatgaacctgatcggcgtggcaagaggcgaaaacatccccgccgtgatcgccctgaccgaccccgagggctgcccactgagccggtttaaggatagcctgggaaacccaacccacatcctgagaatcggcgagagctataaggagaagcagcggaccatccaggccaagaaggaggtggagcagcggagagccggcggctacagccggaagtacgccagcaaagccaagaatctggcagacgatatggtgagaaacaccgctagagatctgctgtactacgccgtgacccaggatgccatgctgatcttcgccaacctgagccggggcttcggccggcagggcaagcggaccttcatggccgagagacagtacacacggatggaggactggctgaccgccaagctggcctacgagggcctgagcaagacctacctgtccaagacactggcccagtacacctccaagacatgcagcaactgtgggtttaccatcaccagcgccgactacgacagggtgctggagaagctgaagaagacagcaacaggctggatgaccacaattaacggcaaggagctgaaggtggagggccagattacctactacaacagatacaagagacagaacgtagtcaaggacctgtccgtcgagctggatagactgagcgaagaatctgtgaacaacgacatctcctcctggacaaagggcagaagcggagaagctctgagcctcctgaagaaaagattctcccatagacccgtgcaggagaagttcgtgtgcctgaactgcggcttcgagacacacgcagccgagcaagccgccctgaacatcgccagatcctggctgttcctgcggagccaggagtacaagaaataccagacaaacaagacaaccggcaacaccgataagagagccttcgtcgagacctggcagtccttttaccggaagaagcttaaggaggtgtggaaacctgccgtgcggtctggcggatctggcggaggctccacaagcatggacagcgtggccttcgaggacgtggccgtgagcttcacccaggaggagtgggccctgctggaccccagccagaagaacctgtacagggacgtgatgcaggagaccttcaagaacctgaccagcgtgggcaagacctggaaggtgcagaacatcgaggacgagtacaagaaccccaggaggaacctgaggaggagcttcaccctggtggcccaggccggcgtgaggcaggacctgggcagcaccagccccaagaaaaagagaaaagtctaagctgccttctgcggggcttgccttctggccatgcccttcttctctcccttgcacctgtacctcttggtctttgaataaagcctgagtaggaaggctagcaaaaaaaaaaaaaaaaaaaaaaaaaaaaaaaaaaaaaaaaaaaaaaaaaaaaaaaaaaaaaaaaaaaaaaaaaaaaaaaa

SEQ ID NO: 2984 - RNA, 5419 nt, synthetic construct
  source 1..5419: mol_type = other RNA
aggaaataagagagaaaagaagagtaagaagaaatataagagccaccatggcccctaagaagaagcgtaaagtgagccgggtgaacggcagcggcagcggcggcggcatgaaccacgaccaggagttcgacccccctaaggtgtaccctcccgtccccgccgagaagagaaagcccatccgggtcctgagcctgttcgatggcatcgccaccggtctgctggtgctgaaggacctgggcatccaggtggataggtacattgcctccgaggtgtgcgaggactccatcaccgtgggaatggtgcgtcatcagggcaagatcatgtacgtgggcgacgtgcggagcgtgacacagaagcatatccaggagtggggccctttcgacctggtgatcggcggcagcccttgcaatgacctgagcatcgtgaacccagcccggaagggcctgtacgagggaaccggcagactgttcttcgagttttacagactgctgcacgacgcccggcctaaggaaggcgacgaccggcccttcttttggctgttcgagaatgtggtggccatgggagtcagcgacaagcgggatattagccggttcctggagagcaaccccgtgatgatcgatgccaaggaagtgagcgccgcccaccgggccagatacttctggggcaatctgcctggcatgaacagacccctggccagcaccgtgaacgacaagctggagctgcaggagtgcctggagcacggccggatcgccaagttcagcaaggtgagaaccatcaccacccgaagcaacagcatcaaacaaggcaaggaccagcactttcctgtgttcatgaacgagaaggaggacatcctgtggtgtaccgagatggagagagtgttcgggttcccagtccactacacagatgtcagcaacatgtctagactggccagacagagactgctgggaagaagctggtccgtccctgtgatcagacacctgttcgcccctctgaaggagtacttcgcctgcgtgagcagcggcaacagcaacgccaacagccggggccccagcttctctagcggcctggtgccactgtccctgagagggagccacatgggccccatggagatctacaaaaccgtgagcgcctggaagcggcagcctgtgcgcgtgctgagcctgtttcggaatatcgataaagtcctgaaaagcctgggattcctggagagcggctctggctccggcggtggcaccctgaagtacgtggaggatgtgacaaacgtggtcagacgggatgtggagaagtggggccccttcgatctggtgtacggcagcacccaacccctgggcagctcttgtgaccggtgccctggctggtacatgtttcagttccaccggatcctgcagtacgccctgccgagacaggagtcccagcggccattcttttggattttcatggacaacttgctgctgaccgaggatgaccaggaaactaccactcggttcctgcagaccgaagccgtgaccctgcaggacgtgagaggccgggactaccagaacgccatgcgggtgtggtccaacatccctggactgaaaagcaagcacgcacctctgacccctaaagaagaggagtacctgcaggcccaggtgcggagcagaagcaagctggacgcccctaaggtggatctgctggtgaagaattgcctcctgcccctgagagagtacttcaagtatttcagccagaatagtctgcccctgggcggcccaagcagcggcgcccctcctcccagcggcggcagcccagccggctccccaacctctaccgaggagggcacctctgagtccgccacccccgagagcggccctggcacctccaccgagcccagcgagggcagcgcacccggcagccctgccggcagccccacctccacagaggagggaaccagcaccgagcccagcgaaggcagcgccccaggcaccagcaccgagcctagtgagggcggctctggcggcggcagcgcccaggagattaaacggatcaacaagatcagaagaagacttgtgaaagacagcaacaccaagaaggccggcaagacaggccccatgaaaaccctgctggttagagtgatgacacccgatctgagagagcggctggaaaacctgagaaagaagcctgaaaatatcccccagcccatcagcaatacatctagagccaacctgaataagctgctgaccgattacaccgaaatgaagaaggcgatcctgcatgtgtactgggaagagttccagaaggaccctgtgggcctgatgagccgggtggcccagcctgccagcaagaagatcgatcagaacaagctgaaacctgagatggacgagaagggcaacctgaccaccgccggctttgcctgctctcagtgtggccagcccctgttcgtgtacaagctggagcaggtgtctgagaagggcaaggcttacaccaactacttcggacggtgcaatgtggccgagcacgaaaagctgatcctgctggcccagctgaagcccgagaaggatagcgacgaagccgtgacatatagcctgggaaagtttgggcagagggccctggatttctacagcattcatgtgaccaaggagtccacccaccccgtgaagcccctggcccagatcgccggaaacagatacgcctccggacctgtgggaaaggccctgagcgacgcatgtatgggcacaatcgcctccttcctgtctaagtaccaggacatcatcatcgaacaccagaaggtggtgaagggcaaccagaagagactggagagcctgcgggagctggccggcaaggaaaacctggaataccctagcgtgaccctgccacctcagcctcacaccaaggagggcgttgatgcctacaacgaagtgatcgcccgggtgcgaatgtgggtgaacctgaacctgtggcagaagctgaagctaagcagagatgatgccaagcctctgctgagactgaagggattcccttcctttcctctggtcgagagacaggccaacgaagtggactggtgggacatggtgtgtaacgtgaagaagctgatcaacgagaaaaaggaggatggcaaggtgttttggcagaatctggctggctacaagagacaggaagccctgagaccatacctgagcagcgaggaagatcggaagaagggaaagaaattcgctcggtaccagctgggcgacctgctgctgcacctggaaaagaagcacggcgaggactggggaaaggtgtacgacgaggcctgggagcggattgacaagaaagtggaaggcctgagcaagcacatcaagctggaagaggaacggagaagcgaggacgcccagagcaaggccgccctgaccgactggctgcgggctaaggccagcttcgtgatcgagggcctgaaggaggccgacaaggacgagttctgcagatgcgagctgaagctgcagaagtggtacggggacctgcggggaaagcccttcgccatcgaagccgagaacagcatcctggacatcagcggcttcagcaagcagtacaactgtgccttcatctggcagaaggacggcgtgaagaagctgaacctgtacctgatcatcaactacttcaagggcggcaagctgcggttcaagaagatcaaacctgaagccttcgaagccaacagattctacaccgtgatcaacaaaaagagcggcgagatcgtgcccatggaggtgaacttcaacttcgacgaccccaacctgatcatcctgcctctggcctttggcaagagacagggcagagaattcatctggaacgacctgctgtccctggaaaccggcagcctgaagctggccaacggaagagtgatcgagaagacactgtacaacagaagaacccggcaggatgagcctgccctgttcgtggccctgaccttcgagcggcgggaggtcctggactcctccaatatcaaaccaatgaacctgatcggcgtggcaagaggcgaaaacatccccgccgtgatcgccctgaccgaccccgagggctgcccactgagccggtttaaggatagcctgggaaacccaacccacatcctgagaatcggcgagagctataaggagaagcagcggaccatccaggccaagaaggaggtggagcagcggagagccggcggctacagccggaagtacgccagcaaagccaagaatctggcagacgatatggtgagaaacaccgctagagatctgctgtactacgccgtgacccaggatgccatgctgatcttcgccaacctgagccggggcttcggccggcagggcaagcggaccttcatggccgagagacagtacacacggatggaggactggctgaccgccaagctggcctacgagggcctgagcaagacctacctgtccaagacactggcccagtacacctccaagacatgcagcaactgtgggtttaccatcaccagcgccgactacgacagggtgctggagaagctgaagaagacagcaacaggctggatgaccacaattaacggcaaggagctgaaggtggagggccagattacctactacaacagatacaagagacagaacgtagtcaaggacctgtccgtcgagctggatagactgagcgaagaatctgtgaacaacgacatctcctcctggacaaagggcagaagcggagaagctctgagcctcctgaagaaaagattctcccatagacccgtgcaggagaagttcgtgtgcctgaactgcggcttcgagacacacgcagccgagcaagccgccctgaacatcgccagatcctggctgttcctgcggagccaggagtacaagaaataccagacaaacaagacaaccggcaacaccgataagagagccttcgtcgagacctggcagtccttttaccggaagaagcttaaggaggtgtggaaacctgccgtgcggtctggcggatctggcggaggctccacaagcacccaggaccccgtggtgttcgaggacgtggccgtggacttcacccaggaggagtgggccctgctgaacctggcccagaggaacctgtacagggacgtgatgctggagaacttccagaacctggccagcctgggctaccccctgcacatcccctacctgatcagccagtggaagcaggaggaggacctgggcaccgtggagaggggcaccatccagggcgagcaccaggagggcttcgagaccaccagccccaagaaaaagagaaaagtctaagctgccttctgcggggcttgccttctggccatgcccttcttctctcccttgcacctgtacctcttggtctttgaataaagcctgagtaggaaggctagcaaaaaaaaaaaaaaaaaaaaaaaaaaaaaaaaaaaaaaaaaaaaaaaaaaaaaaaaaaaaaaaaaaaaaaaaaaaaaaaa

SEQ ID NO: 2985 - RNA, 5419 nt, synthetic construct
  source 1..5419: mol_type = other RNA
aggaaataagagagaaaagaagagtaagaagaaatataagagccaccatggcccctaagaagaagcgtaaagtgagccgggtgaacggcagcggcagcggcggcggcatgaaccacgaccaggagttcgacccccctaaggtgtaccctcccgtccccgccgagaagagaaagcccatccgggtcctgagcctgttcgatggcatcgccaccggtctgctggtgctgaaggacctgggcatccaggtggataggtacattgcctccgaggtgtgcgaggactccatcaccgtgggaatggtgcgtcatcagggcaagatcatgtacgtgggcgacgtgcggagcgtgacacagaagcatatccaggagtggggccctttcgacctggtgatcggcggcagcccttgcaatgacctgagcatcgtgaacccagcccggaagggcctgtacgagggaaccggcagactgttcttcgagttttacagactgctgcacgacgcccggcctaaggaaggcgacgaccggcccttcttttggctgttcgagaatgtggtggccatgggagtcagcgacaagcgggatattagccggttcctggagagcaaccccgtgatgatcgatgccaaggaagtgagcgccgcccaccgggccagatacttctggggcaatctgcctggcatgaacagacccctggccagcaccgtgaacgacaagctggagctgcaggagtgcctggagcacggccggatcgccaagttcagcaaggtgagaaccatcaccacccgaagcaacagcatcaaacaaggcaaggaccagcactttcctgtgttcatgaacgagaaggaggacatcctgtggtgtaccgagatggagagagtgttcgggttcccagtccactacacagatgtcagcaacatgtctagactggccagacagagactgctgggaagaagctggtccgtccctgtgatcagacacctgttcgcccctctgaaggagtacttcgcctgcgtgagcagcggcaacagcaacgccaacagccggggccccagcttctctagcggcctggtgccactgtccctgagagggagccacatgggccccatggagatctacaaaaccgtgagcgcctggaagcggcagcctgtgcgcgtgctgagcctgtttcggaatatcgataaagtcctgaaaagcctgggattcctggagagcggctctggctccggcggtggcaccctgaagtacgtggaggatgtgacaaacgtggtcagacgggatgtggagaagtggggccccttcgatctggtgtacggcagcacccaacccctgggcagctcttgtgaccggtgccctggctggtacatgtttcagttccaccggatcctgcagtacgccctgccgagacaggagtcccagcggccattcttttggattttcatggacaacttgctgctgaccgaggatgaccaggaaactaccactcggttcctgcagaccgaagccgtgaccctgcaggacgtgagaggccgggactaccagaacgccatgcgggtgtggtccaacatccctggactgaaaagcaagcacgcacctctgacccctaaagaagaggagtacctgcaggcccaggtgcggagcagaagcaagctggacgcccctaaggtggatctgctggtgaagaattgcctcctgcccctgagagagtacttcaagtatttcagccagaatagtctgcccctgggcggcccaagcagcggcgcccctcctcccagcggcggcagcccagccggctccccaacctctaccgaggagggcacctctgagtccgccacccccgagagcggccctggcacctccaccgagcccagcgagggcagcgcacccggcagccctgccggcagccccacctccacagaggagggaaccagcaccgagcccagcgaaggcagcgccccaggcaccagcaccgagcctagtgagggcggctctggcggcggcagcgcccaggagattaaacggatcaacaagatcagaagaagacttgtgaaagacagcaacaccaagaaggccggcaagacaggccccatgaaaaccctgctggttagagtgatgacacccgatctgagagagcggctggaaaacctgagaaagaagcctgaaaatatcccccagcccatcagcaatacatctagagccaacctgaataagctgctgaccgattacaccgaaatgaagaaggcgatcctgcatgtgtactgggaagagttccagaaggaccctgtgggcctgatgagccgggtggcccagcctgccagcaagaagatcgatcagaacaagctgaaacctgagatggacgagaagggcaacctgaccaccgccggctttgcctgctctcagtgtggccagcccctgttcgtgtacaagctggagcaggtgtctgagaagggcaaggcttacaccaactacttcggacggtgcaatgtggccgagcacgaaaagctgatcctgctggcccagctgaagcccgagaaggatagcgacgaagccgtgacatatagcctgggaaagtttgggcagagggccctggatttctacagcattcatgtgaccaaggagtccacccaccccgtgaagcccctggcccagatcgccggaaacagatacgcctccggacctgtgggaaaggccctgagcgacgcatgtatgggcacaatcgcctccttcctgtctaagtaccaggacatcatcatcgaacaccagaaggtggtgaagggcaaccagaagagactggagagcctgcgggagctggccggcaaggaaaacctggaataccctagcgtgaccctgccacctcagcctcacaccaaggagggcgttgatgcctacaacgaagtgatcgcccgggtgcgaatgtgggtgaacctgaacctgtggcagaagctgaagctaagcagagatgatgccaagcctctgctgagactgaagggattcccttcctttcctctggtcgagagacaggccaacgaagtggactggtgggacatggtgtgtaacgtgaagaagctgatcaacgagaaaaaggaggatggcaaggtgttttggcagaatctggctggctacaagagacaggaagccctgagaccatacctgagcagcgaggaagatcggaagaagggaaagaaattcgctcggtaccagctgggcgacctgctgctgcacctggaaaagaagcacggcgaggactggggaaaggtgtacgacgaggcctgggagcggattgacaagaaagtggaaggcctgagcaagcacatcaagctggaagaggaacggagaagcgaggacgcccagagcaaggccgccctgaccgactggctgcgggctaaggccagcttcgtgatcgagggcctgaaggaggccgacaaggacgagttctgcagatgcgagctgaagctgcagaagtggtacggggacctgcggggaaagcccttcgccatcgaagccgagaacagcatcctggacatcagcggcttcagcaagcagtacaactgtgccttcatctggcagaaggacggcgtgaagaagctgaacctgtacctgatcatcaactacttcaagggcggcaagctgcggttcaagaagatcaaacctgaagccttcgaagccaacagattctacaccgtgatcaacaaaaagagcggcgagatcgtgcccatggaggtgaacttcaacttcgacgaccccaacctgatcatcctgcctctggcctttggcaagagacagggcagagaattcatctggaacgacctgctgtccctggaaaccggcagcctgaagctggccaacggaagagtgatcgagaagacactgtacaacagaagaacccggcaggatgagcctgccctgttcgtggccctgaccttcgagcggcgggaggtcctggactcctccaatatcaaaccaatgaacctgatcggcgtggcaagaggcgaaaacatccccgccgtgatcgccctgaccgaccccgagggctgcccactgagccggtttaaggatagcctgggaaacccaacccacatcctgagaatcggcgagagctataaggagaagcagcggaccatccaggccaagaaggaggtggagcagcggagagccggcggctacagccggaagtacgccagcaaagccaagaatctggcagacgatatggtgagaaacaccgctagagatctgctgtactacgccgtgacccaggatgccatgctgatcttcgccaacctgagccggggcttcggccggcagggcaagcggaccttcatggccgagagacagtacacacggatggaggactggctgaccgccaagctggcctacgagggcctgagcaagacctacctgtccaagacactggcccagtacacctccaagacatgcagcaactgtgggtttaccatcaccagcgccgactacgacagggtgctggagaagctgaagaagacagcaacaggctggatgaccacaattaacggcaaggagctgaaggtggagggccagattacctactacaacagatacaagagacagaacgtagtcaaggacctgtccgtcgagctggatagactgagcgaagaatctgtgaacaacgacatctcctcctggacaaagggcagaagcggagaagctctgagcctcctgaagaaaagattctcccatagacccgtgcaggagaagttcgtgtgcctgaactgcggcttcgagacacacgcagccgagcaagccgccctgaacatcgccagatcctggctgttcctgcggagccaggagtacaagaaataccagacaaacaagacaaccggcaacaccgataagagagccttcgtcgagacctggcagtccttttaccggaagaagcttaaggaggtgtggaaacctgccgtgcggtctggcggatctggcggaggctccacaagcagcaaggtgcccgtgaccttcggcgacctggccatctacttcagccaggaggagtgggagtggctgagccccatccagaaggacctgtacgaggacgtgatgctggagaactaccagaacctggtgagcctgggcctgagcttcaggaggcccaacgtgatcaccctgctggagaagggcagggccccctggatggtggagcccgtgaggaagaggaggggcctggacagcaggagcaagtacaccagccccaagaaaaagagaaaagtctaagctgccttctgcggggcttgccttctggccatgcccttcttctctcccttgcacctgtacctcttggtctttgaataaagcctgagtaggaaggctagcaaaaaaaaaaaaaaaaaaaaaaaaaaaaaaaaaaaaaaaaaaaaaaaaaaaaaaaaaaaaaaaaaaaaaaaaaaaaaaaa

SEQ ID NO: 2986 - RNA, 5419 nt, synthetic construct
  source 1..5419: mol_type = other RNA
aggaaataagagagaaaagaagagtaagaagaaatataagagccaccatggcccctaagaagaagcgtaaagtgagccgggtgaacggcagcggcagcggcggcggcatgaaccacgaccaggagttcgacccccctaaggtgtaccctcccgtccccgccgagaagagaaagcccatccgggtcctgagcctgttcgatggcatcgccaccggtctgctggtgctgaaggacctgggcatccaggtggataggtacattgcctccgaggtgtgcgaggactccatcaccgtgggaatggtgcgtcatcagggcaagatcatgtacgtgggcgacgtgcggagcgtgacacagaagcatatccaggagtggggccctttcgacctggtgatcggcggcagcccttgcaatgacctgagcatcgtgaacccagcccggaagggcctgtacgagggaaccggcagactgttcttcgagttttacagactgctgcacgacgcccggcctaaggaaggcgacgaccggcccttcttttggctgttcgagaatgtggtggccatgggagtcagcgacaagcgggatattagccggttcctggagagcaaccccgtgatgatcgatgccaaggaagtgagcgccgcccaccgggccagatacttctggggcaatctgcctggcatgaacagacccctggccagcaccgtgaacgacaagctggagctgcaggagtgcctggagcacggccggatcgccaagttcagcaaggtgagaaccatcaccacccgaagcaacagcatcaaacaaggcaaggaccagcactttcctgtgttcatgaacgagaaggaggacatcctgtggtgtaccgagatggagagagtgttcgggttcccagtccactacacagatgtcagcaacatgtctagactggccagacagagactgctgggaagaagctggtccgtccctgtgatcagacacctgttcgcccctctgaaggagtacttcgcctgcgtgagcagcggcaacagcaacgccaacagccggggccccagcttctctagcggcctggtgccactgtccctgagagggagccacatgggccccatggagatctacaaaaccgtgagcgcctggaagcggcagcctgtgcgcgtgctgagcctgtttcggaatatcgataaagtcctgaaaagcctgggattcctggagagcggctctggctccggcggtggcaccctgaagtacgtggaggatgtgacaaacgtggtcagacgggatgtggagaagtggggccccttcgatctggtgtacggcagcacccaacccctgggcagctcttgtgaccggtgccctggctggtacatgtttcagttccaccggatcctgcagtacgccctgccgagacaggagtcccagcggccattcttttggattttcatggacaacttgctgctgaccgaggatgaccaggaaactaccactcggttcctgcagaccgaagccgtgaccctgcaggacgtgagaggccgggactaccagaacgccatgcgggtgtggtccaacatccctggactgaaaagcaagcacgcacctctgacccctaaagaagaggagtacctgcaggcccaggtgcggagcagaagcaagctggacgcccctaaggtggatctgctggtgaagaattgcctcctgcccctgagagagtacttcaagtatttcagccagaatagtctgcccctgggcggcccaagcagcggcgcccctcctcccagcggcggcagcccagccggctccccaacctctaccgaggagggcacctctgagtccgccacccccgagagcggccctggcacctccaccgagcccagcgagggcagcgcacccggcagccctgccggcagccccacctccacagaggagggaaccagcaccgagcccagcgaaggcagcgccccaggcaccagcaccgagcctagtgagggcggctctggcggcggcagcgcccaggagattaaacggatcaacaagatcagaagaagacttgtgaaagacagcaacaccaagaaggccggcaagacaggccccatgaaaaccctgctggttagagtgatgacacccgatctgagagagcggctggaaaacctgagaaagaagcctgaaaatatcccccagcccatcagcaatacatctagagccaacctgaataagctgctgaccgattacaccgaaatgaagaaggcgatcctgcatgtgtactgggaagagttccagaaggaccctgtgggcctgatgagccgggtggcccagcctgccagcaagaagatcgatcagaacaagctgaaacctgagatggacgagaagggcaacctgaccaccgccggctttgcctgctctcagtgtggccagcccctgttcgtgtacaagctggagcaggtgtctgagaagggcaaggcttacaccaactacttcggacggtgcaatgtggccgagcacgaaaagctgatcctgctggcccagctgaagcccgagaaggatagcgacgaagccgtgacatatagcctgggaaagtttgggcagagggccctggatttctacagcattcatgtgaccaaggagtccacccaccccgtgaagcccctggcccagatcgccggaaacagatacgcctccggacctgtgggaaaggccctgagcgacgcatgtatgggcacaatcgcctccttcctgtctaagtaccaggacatcatcatcgaacaccagaaggtggtgaagggcaaccagaagagactggagagcctgcgggagctggccggcaaggaaaacctggaataccctagcgtgaccctgccacctcagcctcacaccaaggagggcgttgatgcctacaacgaagtgatcgcccgggtgcgaatgtgggtgaacctgaacctgtggcagaagctgaagctaagcagagatgatgccaagcctctgctgagactgaagggattcccttcctttcctctggtcgagagacaggccaacgaagtggactggtgggacatggtgtgtaacgtgaagaagctgatcaacgagaaaaaggaggatggcaaggtgttttggcagaatctggctggctacaagagacaggaagccctgagaccatacctgagcagcgaggaagatcggaagaagggaaagaaattcgctcggtaccagctgggcgacctgctgctgcacctggaaaagaagcacggcgaggactggggaaaggtgtacgacgaggcctgggagcggattgacaagaaagtggaaggcctgagcaagcacatcaagctggaagaggaacggagaagcgaggacgcccagagcaaggccgccctgaccgactggctgcgggctaaggccagcttcgtgatcgagggcctgaaggaggccgacaaggacgagttctgcagatgcgagctgaagctgcagaagtggtacggggacctgcggggaaagcccttcgccatcgaagccgagaacagcatcctggacatcagcggcttcagcaagcagtacaactgtgccttcatctggcagaaggacggcgtgaagaagctgaacctgtacctgatcatcaactacttcaagggcggcaagctgcggttcaagaagatcaaacctgaagccttcgaagccaacagattctacaccgtgatcaacaaaaagagcggcgagatcgtgcccatggaggtgaacttcaacttcgacgaccccaacctgatcatcctgcctctggcctttggcaagagacagggcagagaattcatctggaacgacctgctgtccctggaaaccggcagcctgaagctggccaacggaagagtgatcgagaagacactgtacaacagaagaacccggcaggatgagcctgccctgttcgtggccctgaccttcgagcggcgggaggtcctggactcctccaatatcaaaccaatgaacctgatcggcgtggcaagaggcgaaaacatccccgccgtgatcgccctgaccgaccccgagggctgcccactgagccggtttaaggatagcctgggaaacccaacccacatcctgagaatcggcgagagctataaggagaagcagcggaccatccaggccaagaaggaggtggagcagcggagagccggcggctacagccggaagtacgccagcaaagccaagaatctggcagacgatatggtgagaaacaccgctagagatctgctgtactacgccgtgacccaggatgccatgctgatcttcgccaacctgagccggggcttcggccggcagggcaagcggaccttcatggccgagagacagtacacacggatggaggactggctgaccgccaagctggcctacgagggcctgagcaagacctacctgtccaagacactggcccagtacacctccaagacatgcagcaactgtgggtttaccatcaccagcgccgactacgacagggtgctggagaagctgaagaagacagcaacaggctggatgaccacaattaacggcaaggagctgaaggtggagggccagattacctactacaacagatacaagagacagaacgtagtcaaggacctgtccgtcgagctggatagactgagcgaagaatctgtgaacaacgacatctcctcctggacaaagggcagaagcggagaagctctgagcctcctgaagaaaagattctcccatagacccgtgcaggagaagttcgtgtgcctgaactgcggcttcgagacacacgcagccgagcaagccgccctgaacatcgccagatcctggctgttcctgcggagccaggagtacaagaaataccagacaaacaagacaaccggcaacaccgataagagagccttcgtcgagacctggcagtccttttaccggaagaagcttaaggaggtgtggaaacctgccgtgcggtctggcggatctggcggaggctccacaagcttccaggagcccgtgaccttcgaggacgtggccgtgtacttcacccagaacgagtgggccagcctgcaccccacccagagggccctgtacaggggcgtgatgctggagaactacgccaacgtgaccagcctgagcgccttccccttccccaagcccgacctgatcttccagctggagcagggcgaggccgcctggggccccgacccctggaccctggacggcggcgaggccctgaggggcatgaccagccccaagaaaaagagaaaagtctaagctgccttctgcggggcttgccttctggccatgcccttcttctctcccttgcacctgtacctcttggtctttgaataaagcctgagtaggaaggctagcaaaaaaaaaaaaaaaaaaaaaaaaaaaaaaaaaaaaaaaaaaaaaaaaaaaaaaaaaaaaaaaaaaaaaaaaaaaaaaaa

SEQ ID NO: 2987 - RNA, 5419 nt, synthetic construct
  source 1..5419: mol_type = other RNA
aggaaataagagagaaaagaagagtaagaagaaatataagagccaccatggcccctaagaagaagcgtaaagtgagccgggtgaacggcagcggcagcggcggcggcatgaaccacgaccaggagttcgacccccctaaggtgtaccctcccgtccccgccgagaagagaaagcccatccgggtcctgagcctgttcgatggcatcgccaccggtctgctggtgctgaaggacctgggcatccaggtggataggtacattgcctccgaggtgtgcgaggactccatcaccgtgggaatggtgcgtcatcagggcaagatcatgtacgtgggcgacgtgcggagcgtgacacagaagcatatccaggagtggggccctttcgacctggtgatcggcggcagcccttgcaatgacctgagcatcgtgaacccagcccggaagggcctgtacgagggaaccggcagactgttcttcgagttttacagactgctgcacgacgcccggcctaaggaaggcgacgaccggcccttcttttggctgttcgagaatgtggtggccatgggagtcagcgacaagcgggatattagccggttcctggagagcaaccccgtgatgatcgatgccaaggaagtgagcgccgcccaccgggccagatacttctggggcaatctgcctggcatgaacagacccctggccagcaccgtgaacgacaagctggagctgcaggagtgcctggagcacggccggatcgccaagttcagcaaggtgagaaccatcaccacccgaagcaacagcatcaaacaaggcaaggaccagcactttcctgtgttcatgaacgagaaggaggacatcctgtggtgtaccgagatggagagagtgttcgggttcccagtccactacacagatgtcagcaacatgtctagactggccagacagagactgctgggaagaagctggtccgtccctgtgatcagacacctgttcgcccctctgaaggagtacttcgcctgcgtgagcagcggcaacagcaacgccaacagccggggccccagcttctctagcggcctggtgccactgtccctgagagggagccacatgggccccatggagatctacaaaaccgtgagcgcctggaagcggcagcctgtgcgcgtgctgagcctgtttcggaatatcgataaagtcctgaaaagcctgggattcctggagagcggctctggctccggcggtggcaccctgaagtacgtggaggatgtgacaaacgtggtcagacgggatgtggagaagtggggccccttcgatctggtgtacggcagcacccaacccctgggcagctcttgtgaccggtgccctggctggtacatgtttcagttccaccggatcctgcagtacgccctgccgagacaggagtcccagcggccattcttttggattttcatggacaacttgctgctgaccgaggatgaccaggaaactaccactcggttcctgcagaccgaagccgtgaccctgcaggacgtgagaggccgggactaccagaacgccatgcgggtgtggtccaacatccctggactgaaaagcaagcacgcacctctgacccctaaagaagaggagtacctgcaggcccaggtgcggagcagaagcaagctggacgcccctaaggtggatctgctggtgaagaattgcctcctgcccctgagagagtacttcaagtatttcagccagaatagtctgcccctgggcggcccaagcagcggcgcccctcctcccagcggcggcagcccagccggctccccaacctctaccgaggagggcacctctgagtccgccacccccgagagcggccctggcacctccaccgagcccagcgagggcagcgcacccggcagccctgccggcagccccacctccacagaggagggaaccagcaccgagcccagcgaaggcagcgccccaggcaccagcaccgagcctagtgagggcggctctggcggcggcagcgcccaggagattaaacggatcaacaagatcagaagaagacttgtgaaagacagcaacaccaagaaggccggcaagacaggccccatgaaaaccctgctggttagagtgatgacacccgatctgagagagcggctggaaaacctgagaaagaagcctgaaaatatcccccagcccatcagcaatacatctagagccaacctgaataagctgctgaccgattacaccgaaatgaagaaggcgatcctgcatgtgtactgggaagagttccagaaggaccctgtgggcctgatgagccgggtggcccagcctgccagcaagaagatcgatcagaacaagctgaaacctgagatggacgagaagggcaacctgaccaccgccggctttgcctgctctcagtgtggccagcccctgttcgtgtacaagctggagcaggtgtctgagaagggcaaggcttacaccaactacttcggacggtgcaatgtggccgagcacgaaaagctgatcctgctggcccagctgaagcccgagaaggatagcgacgaagccgtgacatatagcctgggaaagtttgggcagagggccctggatttctacagcattcatgtgaccaaggagtccacccaccccgtgaagcccctggcccagatcgccggaaacagatacgcctccggacctgtgggaaaggccctgagcgacgcatgtatgggcacaatcgcctccttcctgtctaagtaccaggacatcatcatcgaacaccagaaggtggtgaagggcaaccagaagagactggagagcctgcgggagctggccggcaaggaaaacctggaataccctagcgtgaccctgccacctcagcctcacaccaaggagggcgttgatgcctacaacgaagtgatcgcccgggtgcgaatgtgggtgaacctgaacctgtggcagaagctgaagctaagcagagatgatgccaagcctctgctgagactgaagggattcccttcctttcctctggtcgagagacaggccaacgaagtggactggtgggacatggtgtgtaacgtgaagaagctgatcaacgagaaaaaggaggatggcaaggtgttttggcagaatctggctggctacaagagacaggaagccctgagaccatacctgagcagcgaggaagatcggaagaagggaaagaaattcgctcggtaccagctgggcgacctgctgctgcacctggaaaagaagcacggcgaggactggggaaaggtgtacgacgaggcctgggagcggattgacaagaaagtggaaggcctgagcaagcacatcaagctggaagaggaacggagaagcgaggacgcccagagcaaggccgccctgaccgactggctgcgggctaaggccagcttcgtgatcgagggcctgaaggaggccgacaaggacgagttctgcagatgcgagctgaagctgcagaagtggtacggggacctgcggggaaagcccttcgccatcgaagccgagaacagcatcctggacatcagcggcttcagcaagcagtacaactgtgccttcatctggcagaaggacggcgtgaagaagctgaacctgtacctgatcatcaactacttcaagggcggcaagctgcggttcaagaagatcaaacctgaagccttcgaagccaacagattctacaccgtgatcaacaaaaagagcggcgagatcgtgcccatggaggtgaacttcaacttcgacgaccccaacctgatcatcctgcctctggcctttggcaagagacagggcagagaattcatctggaacgacctgctgtccctggaaaccggcagcctgaagctggccaacggaagagtgatcgagaagacactgtacaacagaagaacccggcaggatgagcctgccctgttcgtggccctgaccttcgagcggcgggaggtcctggactcctccaatatcaaaccaatgaacctgatcggcgtggcaagaggcgaaaacatccccgccgtgatcgccctgaccgaccccgagggctgcccactgagccggtttaaggatagcctgggaaacccaacccacatcctgagaatcggcgagagctataaggagaagcagcggaccatccaggccaagaaggaggtggagcagcggagagccggcggctacagccggaagtacgccagcaaagccaagaatctggcagacgatatggtgagaaacaccgctagagatctgctgtactacgccgtgacccaggatgccatgctgatcttcgccaacctgagccggggcttcggccggcagggcaagcggaccttcatggccgagagacagtacacacggatggaggactggctgaccgccaagctggcctacgagggcctgagcaagacctacctgtccaagacactggcccagtacacctccaagacatgcagcaactgtgggtttaccatcaccagcgccgactacgacagggtgctggagaagctgaagaagacagcaacaggctggatgaccacaattaacggcaaggagctgaaggtggagggccagattacctactacaacagatacaagagacagaacgtagtcaaggacctgtccgtcgagctggatagactgagcgaagaatctgtgaacaacgacatctcctcctggacaaagggcagaagcggagaagctctgagcctcctgaagaaaagattctcccatagacccgtgcaggagaagttcgtgtgcctgaactgcggcttcgagacacacgcagccgagcaagccgccctgaacatcgccagatcctggctgttcctgcggagccaggagtacaagaaataccagacaaacaagacaaccggcaacaccgataagagagccttcgtcgagacctggcagtccttttaccggaagaagcttaaggaggtgtggaaacctgccgtgcggtctggcggatctggcggaggctccacaagcatgaccttcgaggacgtgaccgtggagttcaccccctgggagtggggccagctggaccccgcccagaaggacctgtacagggaggtgatgctggagaacttcaggaacctggccagcctgggcctgcccgtgagcaagccccacgtgatctgccagctggaggagggcgaggagccctgcgtgctggagagggagatcagcgtgggcgcccagagcgacctgaagaggaggcccaaggccaagaccagccccaagaaaaagagaaaagtctaagctgccttctgcggggcttgccttctggccatgcccttcttctctcccttgcacctgtacctcttggtctttgaataaagcctgagtaggaaggctagcaaaaaaaaaaaaaaaaaaaaaaaaaaaaaaaaaaaaaaaaaaaaaaaaaaaaaaaaaaaaaaaaaaaaaaaaaaaaaaaa

SEQ ID NO: 2988 - RNA, 5419 nt, synthetic construct
  source 1..5419: mol_type = other RNA
aggaaataagagagaaaagaagagtaagaagaaatataagagccaccatggcccctaagaagaagcgtaaagtgagccgggtgaacggcagcggcagcggcggcggcatgaaccacgaccaggagttcgacccccctaaggtgtaccctcccgtccccgccgagaagagaaagcccatccgggtcctgagcctgttcgatggcatcgccaccggtctgctggtgctgaaggacctgggcatccaggtggataggtacattgcctccgaggtgtgcgaggactccatcaccgtgggaatggtgcgtcatcagggcaagatcatgtacgtgggcgacgtgcggagcgtgacacagaagcatatccaggagtggggccctttcgacctggtgatcggcggcagcccttgcaatgacctgagcatcgtgaacccagcccggaagggcctgtacgagggaaccggcagactgttcttcgagttttacagactgctgcacgacgcccggcctaaggaaggcgacgaccggcccttcttttggctgttcgagaatgtggtggccatgggagtcagcgacaagcgggatattagccggttcctggagagcaaccccgtgatgatcgatgccaaggaagtgagcgccgcccaccgggccagatacttctggggcaatctgcctggcatgaacagacccctggccagcaccgtgaacgacaagctggagctgcaggagtgcctggagcacggccggatcgccaagttcagcaaggtgagaaccatcaccacccgaagcaacagcatcaaacaaggcaaggaccagcactttcctgtgttcatgaacgagaaggaggacatcctgtggtgtaccgagatggagagagtgttcgggttcccagtccactacacagatgtcagcaacatgtctagactggccagacagagactgctgggaagaagctggtccgtccctgtgatcagacacctgttcgcccctctgaaggagtacttcgcctgcgtgagcagcggcaacagcaacgccaacagccggggccccagcttctctagcggcctggtgccactgtccctgagagggagccacatgggccccatggagatctacaaaaccgtgagcgcctggaagcggcagcctgtgcgcgtgctgagcctgtttcggaatatcgataaagtcctgaaaagcctgggattcctggagagcggctctggctccggcggtggcaccctgaagtacgtggaggatgtgacaaacgtggtcagacgggatgtggagaagtggggccccttcgatctggtgtacggcagcacccaacccctgggcagctcttgtgaccggtgccctggctggtacatgtttcagttccaccggatcctgcagtacgccctgccgagacaggagtcccagcggccattcttttggattttcatggacaacttgctgctgaccgaggatgaccaggaaactaccactcggttcctgcagaccgaagccgtgaccctgcaggacgtgagaggccgggactaccagaacgccatgcgggtgtggtccaacatccctggactgaaaagcaagcacgcacctctgacccctaaagaagaggagtacctgcaggcccaggtgcggagcagaagcaagctggacgcccctaaggtggatctgctggtgaagaattgcctcctgcccctgagagagtacttcaagtatttcagccagaatagtctgcccctgggcggcccaagcagcggcgcccctcctcccagcggcggcagcccagccggctccccaacctctaccgaggagggcacctctgagtccgccacccccgagagcggccctggcacctccaccgagcccagcgagggcagcgcacccggcagccctgccggcagccccacctccacagaggagggaaccagcaccgagcccagcgaaggcagcgccccaggcaccagcaccgagcctagtgagggcggctctggcggcggcagcgcccaggagattaaacggatcaacaagatcagaagaagacttgtgaaagacagcaacaccaagaaggccggcaagacaggccccatgaaaaccctgctggttagagtgatgacacccgatctgagagagcggctggaaaacctgagaaagaagcctgaaaatatcccccagcccatcagcaatacatctagagccaacctgaataagctgctgaccgattacaccgaaatgaagaaggcgatcctgcatgtgtactgggaagagttccagaaggaccctgtgggcctgatgagccgggtggcccagcctgccagcaagaagatcgatcagaacaagctgaaacctgagatggacgagaagggcaacctgaccaccgccggctttgcctgctctcagtgtggccagcccctgttcgtgtacaagctggagcaggtgtctgagaagggcaaggcttacaccaactacttcggacggtgcaatgtggccgagcacgaaaagctgatcctgctggcccagctgaagcccgagaaggatagcgacgaagccgtgacatatagcctgggaaagtttgggcagagggccctggatttctacagcattcatgtgaccaaggagtccacccaccccgtgaagcccctggcccagatcgccggaaacagatacgcctccggacctgtgggaaaggccctgagcgacgcatgtatgggcacaatcgcctccttcctgtctaagtaccaggacatcatcatcgaacaccagaaggtggtgaagggcaaccagaagagactggagagcctgcgggagctggccggcaaggaaaacctggaataccctagcgtgaccctgccacctcagcctcacaccaaggagggcgttgatgcctacaacgaagtgatcgcccgggtgcgaatgtgggtgaacctgaacctgtggcagaagctgaagctaagcagagatgatgccaagcctctgctgagactgaagggattcccttcctttcctctggtcgagagacaggccaacgaagtggactggtgggacatggtgtgtaacgtgaagaagctgatcaacgagaaaaaggaggatggcaaggtgttttggcagaatctggctggctacaagagacaggaagccctgagaccatacctgagcagcgaggaagatcggaagaagggaaagaaattcgctcggtaccagctgggcgacctgctgctgcacctggaaaagaagcacggcgaggactggggaaaggtgtacgacgaggcctgggagcggattgacaagaaagtggaaggcctgagcaagcacatcaagctggaagaggaacggagaagcgaggacgcccagagcaaggccgccctgaccgactggctgcgggctaaggccagcttcgtgatcgagggcctgaaggaggccgacaaggacgagttctgcagatgcgagctgaagctgcagaagtggtacggggacctgcggggaaagcccttcgccatcgaagccgagaacagcatcctggacatcagcggcttcagcaagcagtacaactgtgccttcatctggcagaaggacggcgtgaagaagctgaacctgtacctgatcatcaactacttcaagggcggcaagctgcggttcaagaagatcaaacctgaagccttcgaagccaacagattctacaccgtgatcaacaaaaagagcggcgagatcgtgcccatggaggtgaacttcaacttcgacgaccccaacctgatcatcctgcctctggcctttggcaagagacagggcagagaattcatctggaacgacctgctgtccctggaaaccggcagcctgaagctggccaacggaagagtgatcgagaagacactgtacaacagaagaacccggcaggatgagcctgccctgttcgtggccctgaccttcgagcggcgggaggtcctggactcctccaatatcaaaccaatgaacctgatcggcgtggcaagaggcgaaaacatccccgccgtgatcgccctgaccgaccccgagggctgcccactgagccggtttaaggatagcctgggaaacccaacccacatcctgagaatcggcgagagctataaggagaagcagcggaccatccaggccaagaaggaggtggagcagcggagagccggcggctacagccggaagtacgccagcaaagccaagaatctggcagacgatatggtgagaaacaccgctagagatctgctgtactacgccgtgacccaggatgccatgctgatcttcgccaacctgagccggggcttcggccggcagggcaagcggaccttcatggccgagagacagtacacacggatggaggactggctgaccgccaagctggcctacgagggcctgagcaagacctacctgtccaagacactggcccagtacacctccaagacatgcagcaactgtgggtttaccatcaccagcgccgactacgacagggtgctggagaagctgaagaagacagcaacaggctggatgaccacaattaacggcaaggagctgaaggtggagggccagattacctactacaacagatacaagagacagaacgtagtcaaggacctgtccgtcgagctggatagactgagcgaagaatctgtgaacaacgacatctcctcctggacaaagggcagaagcggagaagctctgagcctcctgaagaaaagattctcccatagacccgtgcaggagaagttcgtgtgcctgaactgcggcttcgagacacacgcagccgagcaagccgccctgaacatcgccagatcctggctgttcctgcggagccaggagtacaagaaataccagacaaacaagacaaccggcaacaccgataagagagccttcgtcgagacctggcagtccttttaccggaagaagcttaaggaggtgtggaaacctgccgtgcggtctggcggatctggcggaggctccacaagctaccagacccccgtgagcttcaaggacgtggtggtgggcttcacccaggaggagtggcacaggctgagccccgcccagagggccctgtacagggacgtgatgctggagacctacagcaacctggtgagcgtgggctacgagggcaccaagcccgacgtgatcctgaggctggagcaggaggaggccccctggatctgcgaggtggcctgccccggctgccacaggtgggaggacatctggcagaccagccccaagaaaaagagaaaagtctaagctgccttctgcggggcttgccttctggccatgcccttcttctctcccttgcacctgtacctcttggtctttgaataaagcctgagtaggaaggctagcaaaaaaaaaaaaaaaaaaaaaaaaaaaaaaaaaaaaaaaaaaaaaaaaaaaaaaaaaaaaaaaaaaaaaaaaaaaaaaaa

SEQ ID NO: 2989 - RNA, 5419 nt, synthetic construct
  source 1..5419: mol_type = other RNA
aggaaataagagagaaaagaagagtaagaagaaatataagagccaccatggcccctaagaagaagcgtaaagtgagccgggtgaacggcagcggcagcggcggcggcatgaaccacgaccaggagttcgacccccctaaggtgtaccctcccgtccccgccgagaagagaaagcccatccgggtcctgagcctgttcgatggcatcgccaccggtctgctggtgctgaaggacctgggcatccaggtggataggtacattgcctccgaggtgtgcgaggactccatcaccgtgggaatggtgcgtcatcagggcaagatcatgtacgtgggcgacgtgcggagcgtgacacagaagcatatccaggagtggggccctttcgacctggtgatcggcggcagcccttgcaatgacctgagcatcgtgaacccagcccggaagggcctgtacgagggaaccggcagactgttcttcgagttttacagactgctgcacgacgcccggcctaaggaaggcgacgaccggcccttcttttggctgttcgagaatgtggtggccatgggagtcagcgacaagcgggatattagccggttcctggagagcaaccccgtgatgatcgatgccaaggaagtgagcgccgcccaccgggccagatacttctggggcaatctgcctggcatgaacagacccctggccagcaccgtgaacgacaagctggagctgcaggagtgcctggagcacggccggatcgccaagttcagcaaggtgagaaccatcaccacccgaagcaacagcatcaaacaaggcaaggaccagcactttcctgtgttcatgaacgagaaggaggacatcctgtggtgtaccgagatggagagagtgttcgggttcccagtccactacacagatgtcagcaacatgtctagactggccagacagagactgctgggaagaagctggtccgtccctgtgatcagacacctgttcgcccctctgaaggagtacttcgcctgcgtgagcagcggcaacagcaacgccaacagccggggccccagcttctctagcggcctggtgccactgtccctgagagggagccacatgggccccatggagatctacaaaaccgtgagcgcctggaagcggcagcctgtgcgcgtgctgagcctgtttcggaatatcgataaagtcctgaaaagcctgggattcctggagagcggctctggctccggcggtggcaccctgaagtacgtggaggatgtgacaaacgtggtcagacgggatgtggagaagtggggccccttcgatctggtgtacggcagcacccaacccctgggcagctcttgtgaccggtgccctggctggtacatgtttcagttccaccggatcctgcagtacgccctgccgagacaggagtcccagcggccattcttttggattttcatggacaacttgctgctgaccgaggatgaccaggaaactaccactcggttcctgcagaccgaagccgtgaccctgcaggacgtgagaggccgggactaccagaacgccatgcgggtgtggtccaacatccctggactgaaaagcaagcacgcacctctgacccctaaagaagaggagtacctgcaggcccaggtgcggagcagaagcaagctggacgcccctaaggtggatctgctggtgaagaattgcctcctgcccctgagagagtacttcaagtatttcagccagaatagtctgcccctgggcggcccaagcagcggcgcccctcctcccagcggcggcagcccagccggctccccaacctctaccgaggagggcacctctgagtccgccacccccgagagcggccctggcacctccaccgagcccagcgagggcagcgcacccggcagccctgccggcagccccacctccacagaggagggaaccagcaccgagcccagcgaaggcagcgccccaggcaccagcaccgagcctagtgagggcggctctggcggcggcagcgcccaggagattaaacggatcaacaagatcagaagaagacttgtgaaagacagcaacaccaagaaggccggcaagacaggccccatgaaaaccctgctggttagagtgatgacacccgatctgagagagcggctggaaaacctgagaaagaagcctgaaaatatcccccagcccatcagcaatacatctagagccaacctgaataagctgctgaccgattacaccgaaatgaagaaggcgatcctgcatgtgtactgggaagagttccagaaggaccctgtgggcctgatgagccgggtggcccagcctgccagcaagaagatcgatcagaacaagctgaaacctgagatggacgagaagggcaacctgaccaccgccggctttgcctgctctcagtgtggccagcccctgttcgtgtacaagctggagcaggtgtctgagaagggcaaggcttacaccaactacttcggacggtgcaatgtggccgagcacgaaaagctgatcctgctggcccagctgaagcccgagaaggatagcgacgaagccgtgacatatagcctgggaaagtttgggcagagggccctggatttctacagcattcatgtgaccaaggagtccacccaccccgtgaagcccctggcccagatcgccggaaacagatacgcctccggacctgtgggaaaggccctgagcgacgcatgtatgggcacaatcgcctccttcctgtctaagtaccaggacatcatcatcgaacaccagaaggtggtgaagggcaaccagaagagactggagagcctgcgggagctggccggcaaggaaaacctggaataccctagcgtgaccctgccacctcagcctcacaccaaggagggcgttgatgcctacaacgaagtgatcgcccgggtgcgaatgtgggtgaacctgaacctgtggcagaagctgaagctaagcagagatgatgccaagcctctgctgagactgaagggattcccttcctttcctctggtcgagagacaggccaacgaagtggactggtgggacatggtgtgtaacgtgaagaagctgatcaacgagaaaaaggaggatggcaaggtgttttggcagaatctggctggctacaagagacaggaagccctgagaccatacctgagcagcgaggaagatcggaagaagggaaagaaattcgctcggtaccagctgggcgacctgctgctgcacctggaaaagaagcacggcgaggactggggaaaggtgtacgacgaggcctgggagcggattgacaagaaagtggaaggcctgagcaagcacatcaagctggaagaggaacggagaagcgaggacgcccagagcaaggccgccctgaccgactggctgcgggctaaggccagcttcgtgatcgagggcctgaaggaggccgacaaggacgagttctgcagatgcgagctgaagctgcagaagtggtacggggacctgcggggaaagcccttcgccatcgaagccgagaacagcatcctggacatcagcggcttcagcaagcagtacaactgtgccttcatctggcagaaggacggcgtgaagaagctgaacctgtacctgatcatcaactacttcaagggcggcaagctgcggttcaagaagatcaaacctgaagccttcgaagccaacagattctacaccgtgatcaacaaaaagagcggcgagatcgtgcccatggaggtgaacttcaacttcgacgaccccaacctgatcatcctgcctctggcctttggcaagagacagggcagagaattcatctggaacgacctgctgtccctggaaaccggcagcctgaagctggccaacggaagagtgatcgagaagacactgtacaacagaagaacccggcaggatgagcctgccctgttcgtggccctgaccttcgagcggcgggaggtcctggactcctccaatatcaaaccaatgaacctgatcggcgtggcaagaggcgaaaacatccccgccgtgatcgccctgaccgaccccgagggctgcccactgagccggtttaaggatagcctgggaaacccaacccacatcctgagaatcggcgagagctataaggagaagcagcggaccatccaggccaagaaggaggtggagcagcggagagccggcggctacagccggaagtacgccagcaaagccaagaatctggcagacgatatggtgagaaacaccgctagagatctgctgtactacgccgtgacccaggatgccatgctgatcttcgccaacctgagccggggcttcggccggcagggcaagcggaccttcatggccgagagacagtacacacggatggaggactggctgaccgccaagctggcctacgagggcctgagcaagacctacctgtccaagacactggcccagtacacctccaagacatgcagcaactgtgggtttaccatcaccagcgccgactacgacagggtgctggagaagctgaagaagacagcaacaggctggatgaccacaattaacggcaaggagctgaaggtggagggccagattacctactacaacagatacaagagacagaacgtagtcaaggacctgtccgtcgagctggatagactgagcgaagaatctgtgaacaacgacatctcctcctggacaaagggcagaagcggagaagctctgagcctcctgaagaaaagattctcccatagacccgtgcaggagaagttcgtgtgcctgaactgcggcttcgagacacacgcagccgagcaagccgccctgaacatcgccagatcctggctgttcctgcggagccaggagtacaagaaataccagacaaacaagacaaccggcaacaccgataagagagccttcgtcgagacctggcagtccttttaccggaagaagcttaaggaggtgtggaaacctgccgtgcggtctggcggatctggcggaggctccacaagcaagcccggcgccgtgagcttcgccgacgtggccgtgtacttcagccccgaggagtggggctgcctgaggcccgcccagagggccctgtacagggacgtgatgagggagacctacggccacctgggcgccctgggcttcaggggcaccaagcccgccctgatctgctgggtggaggaggaggccgacctgtggggccccgaggccagggaccccgaggtgggcgcctgcctgaccgaggccgacaccagccccaagaaaaagagaaaagtctaagctgccttctgcggggcttgccttctggccatgcccttcttctctcccttgcacctgtacctcttggtctttgaataaagcctgagtaggaaggctagcaaaaaaaaaaaaaaaaaaaaaaaaaaaaaaaaaaaaaaaaaaaaaaaaaaaaaaaaaaaaaaaaaaaaaaaaaaaaaaaa

SEQ ID NO: 2990 - RNA, 5419 nt, synthetic construct
  source 1..5419: mol_type = other RNA
aggaaataagagagaaaagaagagtaagaagaaatataagagccaccatggcccctaagaagaagcgtaaagtgagccgggtgaacggcagcggcagcggcggcggcatgaaccacgaccaggagttcgacccccctaaggtgtaccctcccgtccccgccgagaagagaaagcccatccgggtcctgagcctgttcgatggcatcgccaccggtctgctggtgctgaaggacctgggcatccaggtggataggtacattgcctccgaggtgtgcgaggactccatcaccgtgggaatggtgcgtcatcagggcaagatcatgtacgtgggcgacgtgcggagcgtgacacagaagcatatccaggagtggggccctttcgacctggtgatcggcggcagcccttgcaatgacctgagcatcgtgaacccagcccggaagggcctgtacgagggaaccggcagactgttcttcgagttttacagactgctgcacgacgcccggcctaaggaaggcgacgaccggcccttcttttggctgttcgagaatgtggtggccatgggagtcagcgacaagcgggatattagccggttcctggagagcaaccccgtgatgatcgatgccaaggaagtgagcgccgcccaccgggccagatacttctggggcaatctgcctggcatgaacagacccctggccagcaccgtgaacgacaagctggagctgcaggagtgcctggagcacggccggatcgccaagttcagcaaggtgagaaccatcaccacccgaagcaacagcatcaaacaaggcaaggaccagcactttcctgtgttcatgaacgagaaggaggacatcctgtggtgtaccgagatggagagagtgttcgggttcccagtccactacacagatgtcagcaacatgtctagactggccagacagagactgctgggaagaagctggtccgtccctgtgatcagacacctgttcgcccctctgaaggagtacttcgcctgcgtgagcagcggcaacagcaacgccaacagccggggccccagcttctctagcggcctggtgccactgtccctgagagggagccacatgggccccatggagatctacaaaaccgtgagcgcctggaagcggcagcctgtgcgcgtgctgagcctgtttcggaatatcgataaagtcctgaaaagcctgggattcctggagagcggctctggctccggcggtggcaccctgaagtacgtggaggatgtgacaaacgtggtcagacgggatgtggagaagtggggccccttcgatctggtgtacggcagcacccaacccctgggcagctcttgtgaccggtgccctggctggtacatgtttcagttccaccggatcctgcagtacgccctgccgagacaggagtcccagcggccattcttttggattttcatggacaacttgctgctgaccgaggatgaccaggaaactaccactcggttcctgcagaccgaagccgtgaccctgcaggacgtgagaggccgggactaccagaacgccatgcgggtgtggtccaacatccctggactgaaaagcaagcacgcacctctgacccctaaagaagaggagtacctgcaggcccaggtgcggagcagaagcaagctggacgcccctaaggtggatctgctggtgaagaattgcctcctgcccctgagagagtacttcaagtatttcagccagaatagtctgcccctgggcggcccaagcagcggcgcccctcctcccagcggcggcagcccagccggctccccaacctctaccgaggagggcacctctgagtccgccacccccgagagcggccctggcacctccaccgagcccagcgagggcagcgcacccggcagccctgccggcagccccacctccacagaggagggaaccagcaccgagcccagcgaaggcagcgccccaggcaccagcaccgagcctagtgagggcggctctggcggcggcagcgcccaggagattaaacggatcaacaagatcagaagaagacttgtgaaagacagcaacaccaagaaggccggcaagacaggccccatgaaaaccctgctggttagagtgatgacacccgatctgagagagcggctggaaaacctgagaaagaagcctgaaaatatcccccagcccatcagcaatacatctagagccaacctgaataagctgctgaccgattacaccgaaatgaagaaggcgatcctgcatgtgtactgggaagagttccagaaggaccctgtgggcctgatgagccgggtggcccagcctgccagcaagaagatcgatcagaacaagctgaaacctgagatggacgagaagggcaacctgaccaccgccggctttgcctgctctcagtgtggccagcccctgttcgtgtacaagctggagcaggtgtctgagaagggcaaggcttacaccaactacttcggacggtgcaatgtggccgagcacgaaaagctgatcctgctggcccagctgaagcccgagaaggatagcgacgaagccgtgacatatagcctgggaaagtttgggcagagggccctggatttctacagcattcatgtgaccaaggagtccacccaccccgtgaagcccctggcccagatcgccggaaacagatacgcctccggacctgtgggaaaggccctgagcgacgcatgtatgggcacaatcgcctccttcctgtctaagtaccaggacatcatcatcgaacaccagaaggtggtgaagggcaaccagaagagactggagagcctgcgggagctggccggcaaggaaaacctggaataccctagcgtgaccctgccacctcagcctcacaccaaggagggcgttgatgcctacaacgaagtgatcgcccgggtgcgaatgtgggtgaacctgaacctgtggcagaagctgaagctaagcagagatgatgccaagcctctgctgagactgaagggattcccttcctttcctctggtcgagagacaggccaacgaagtggactggtgggacatggtgtgtaacgtgaagaagctgatcaacgagaaaaaggaggatggcaaggtgttttggcagaatctggctggctacaagagacaggaagccctgagaccatacctgagcagcgaggaagatcggaagaagggaaagaaattcgctcggtaccagctgggcgacctgctgctgcacctggaaaagaagcacggcgaggactggggaaaggtgtacgacgaggcctgggagcggattgacaagaaagtggaaggcctgagcaagcacatcaagctggaagaggaacggagaagcgaggacgcccagagcaaggccgccctgaccgactggctgcgggctaaggccagcttcgtgatcgagggcctgaaggaggccgacaaggacgagttctgcagatgcgagctgaagctgcagaagtggtacggggacctgcggggaaagcccttcgccatcgaagccgagaacagcatcctggacatcagcggcttcagcaagcagtacaactgtgccttcatctggcagaaggacggcgtgaagaagctgaacctgtacctgatcatcaactacttcaagggcggcaagctgcggttcaagaagatcaaacctgaagccttcgaagccaacagattctacaccgtgatcaacaaaaagagcggcgagatcgtgcccatggaggtgaacttcaacttcgacgaccccaacctgatcatcctgcctctggcctttggcaagagacagggcagagaattcatctggaacgacctgctgtccctggaaaccggcagcctgaagctggccaacggaagagtgatcgagaagacactgtacaacagaagaacccggcaggatgagcctgccctgttcgtggccctgaccttcgagcggcgggaggtcctggactcctccaatatcaaaccaatgaacctgatcggcgtggcaagaggcgaaaacatccccgccgtgatcgccctgaccgaccccgagggctgcccactgagccggtttaaggatagcctgggaaacccaacccacatcctgagaatcggcgagagctataaggagaagcagcggaccatccaggccaagaaggaggtggagcagcggagagccggcggctacagccggaagtacgccagcaaagccaagaatctggcagacgatatggtgagaaacaccgctagagatctgctgtactacgccgtgacccaggatgccatgctgatcttcgccaacctgagccggggcttcggccggcagggcaagcggaccttcatggccgagagacagtacacacggatggaggactggctgaccgccaagctggcctacgagggcctgagcaagacctacctgtccaagacactggcccagtacacctccaagacatgcagcaactgtgggtttaccatcaccagcgccgactacgacagggtgctggagaagctgaagaagacagcaacaggctggatgaccacaattaacggcaaggagctgaaggtggagggccagattacctactacaacagatacaagagacagaacgtagtcaaggacctgtccgtcgagctggatagactgagcgaagaatctgtgaacaacgacatctcctcctggacaaagggcagaagcggagaagctctgagcctcctgaagaaaagattctcccatagacccgtgcaggagaagttcgtgtgcctgaactgcggcttcgagacacacgcagccgagcaagccgccctgaacatcgccagatcctggctgttcctgcggagccaggagtacaagaaataccagacaaacaagacaaccggcaacaccgataagagagccttcgtcgagacctggcagtccttttaccggaagaagcttaaggaggtgtggaaacctgccgtgcggtctggcggatctggcggaggctccacaagcccccagaagagcgtgaccttcgaggacgtggccgtgtacttcacccagaccgagtgggacggcctgagccccgcccagagggccctgtacagggacgtgatgctggagaactacggcaacgtggccagcctgggcttccccctgctgaagcccgccgtgatcagccagctggagggcggcggcaagctgggcggccccagccccctggccagcggcaccggcaccggcccccagggcctgtggaccagccccaagaaaaagagaaaagtctaagctgccttctgcggggcttgccttctggccatgcccttcttctctcccttgcacctgtacctcttggtctttgaataaagcctgagtaggaaggctagcaaaaaaaaaaaaaaaaaaaaaaaaaaaaaaaaaaaaaaaaaaaaaaaaaaaaaaaaaaaaaaaaaaaaaaaaaaaaaaaa

SEQ ID NO: 2991 - RNA, 5419 nt, synthetic construct
  source 1..5419: mol_type = other RNA
aggaaataagagagaaaagaagagtaagaagaaatataagagccaccatggcccctaagaagaagcgtaaagtgagccgggtgaacggcagcggcagcggcggcggcatgaaccacgaccaggagttcgacccccctaaggtgtaccctcccgtccccgccgagaagagaaagcccatccgggtcctgagcctgttcgatggcatcgccaccggtctgctggtgctgaaggacctgggcatccaggtggataggtacattgcctccgaggtgtgcgaggactccatcaccgtgggaatggtgcgtcatcagggcaagatcatgtacgtgggcgacgtgcggagcgtgacacagaagcatatccaggagtggggccctttcgacctggtgatcggcggcagcccttgcaatgacctgagcatcgtgaacccagcccggaagggcctgtacgagggaaccggcagactgttcttcgagttttacagactgctgcacgacgcccggcctaaggaaggcgacgaccggcccttcttttggctgttcgagaatgtggtggccatgggagtcagcgacaagcgggatattagccggttcctggagagcaaccccgtgatgatcgatgccaaggaagtgagcgccgcccaccgggccagatacttctggggcaatctgcctggcatgaacagacccctggccagcaccgtgaacgacaagctggagctgcaggagtgcctggagcacggccggatcgccaagttcagcaaggtgagaaccatcaccacccgaagcaacagcatcaaacaaggcaaggaccagcactttcctgtgttcatgaacgagaaggaggacatcctgtggtgtaccgagatggagagagtgttcgggttcccagtccactacacagatgtcagcaacatgtctagactggccagacagagactgctgggaagaagctggtccgtccctgtgatcagacacctgttcgcccctctgaaggagtacttcgcctgcgtgagcagcggcaacagcaacgccaacagccggggccccagcttctctagcggcctggtgccactgtccctgagagggagccacatgggccccatggagatctacaaaaccgtgagcgcctggaagcggcagcctgtgcgcgtgctgagcctgtttcggaatatcgataaagtcctgaaaagcctgggattcctggagagcggctctggctccggcggtggcaccctgaagtacgtggaggatgtgacaaacgtggtcagacgggatgtggagaagtggggccccttcgatctggtgtacggcagcacccaacccctgggcagctcttgtgaccggtgccctggctggtacatgtttcagttccaccggatcctgcagtacgccctgccgagacaggagtcccagcggccattcttttggattttcatggacaacttgctgctgaccgaggatgaccaggaaactaccactcggttcctgcagaccgaagccgtgaccctgcaggacgtgagaggccgggactaccagaacgccatgcgggtgtggtccaacatccctggactgaaaagcaagcacgcacctctgacccctaaagaagaggagtacctgcaggcccaggtgcggagcagaagcaagctggacgcccctaaggtggatctgctggtgaagaattgcctcctgcccctgagagagtacttcaagtatttcagccagaatagtctgcccctgggcggcccaagcagcggcgcccctcctcccagcggcggcagcccagccggctccccaacctctaccgaggagggcacctctgagtccgccacccccgagagcggccctggcacctccaccgagcccagcgagggcagcgcacccggcagccctgccggcagccccacctccacagaggagggaaccagcaccgagcccagcgaaggcagcgccccaggcaccagcaccgagcctagtgagggcggctctggcggcggcagcgcccaggagattaaacggatcaacaagatcagaagaagacttgtgaaagacagcaacaccaagaaggccggcaagacaggccccatgaaaaccctgctggttagagtgatgacacccgatctgagagagcggctggaaaacctgagaaagaagcctgaaaatatcccccagcccatcagcaatacatctagagccaacctgaataagctgctgaccgattacaccgaaatgaagaaggcgatcctgcatgtgtactgggaagagttccagaaggaccctgtgggcctgatgagccgggtggcccagcctgccagcaagaagatcgatcagaacaagctgaaacctgagatggacgagaagggcaacctgaccaccgccggctttgcctgctctcagtgtggccagcccctgttcgtgtacaagctggagcaggtgtctgagaagggcaaggcttacaccaactacttcggacggtgcaatgtggccgagcacgaaaagctgatcctgctggcccagctgaagcccgagaaggatagcgacgaagccgtgacatatagcctgggaaagtttgggcagagggccctggatttctacagcattcatgtgaccaaggagtccacccaccccgtgaagcccctggcccagatcgccggaaacagatacgcctccggacctgtgggaaaggccctgagcgacgcatgtatgggcacaatcgcctccttcctgtctaagtaccaggacatcatcatcgaacaccagaaggtggtgaagggcaaccagaagagactggagagcctgcgggagctggccggcaaggaaaacctggaataccctagcgtgaccctgccacctcagcctcacaccaaggagggcgttgatgcctacaacgaagtgatcgcccgggtgcgaatgtgggtgaacctgaacctgtggcagaagctgaagctaagcagagatgatgccaagcctctgctgagactgaagggattcccttcctttcctctggtcgagagacaggccaacgaagtggactggtgggacatggtgtgtaacgtgaagaagctgatcaacgagaaaaaggaggatggcaaggtgttttggcagaatctggctggctacaagagacaggaagccctgagaccatacctgagcagcgaggaagatcggaagaagggaaagaaattcgctcggtaccagctgggcgacctgctgctgcacctggaaaagaagcacggcgaggactggggaaaggtgtacgacgaggcctgggagcggattgacaagaaagtggaaggcctgagcaagcacatcaagctggaagaggaacggagaagcgaggacgcccagagcaaggccgccctgaccgactggctgcgggctaaggccagcttcgtgatcgagggcctgaaggaggccgacaaggacgagttctgcagatgcgagctgaagctgcagaagtggtacggggacctgcggggaaagcccttcgccatcgaagccgagaacagcatcctggacatcagcggcttcagcaagcagtacaactgtgccttcatctggcagaaggacggcgtgaagaagctgaacctgtacctgatcatcaactacttcaagggcggcaagctgcggttcaagaagatcaaacctgaagccttcgaagccaacagattctacaccgtgatcaacaaaaagagcggcgagatcgtgcccatggaggtgaacttcaacttcgacgaccccaacctgatcatcctgcctctggcctttggcaagagacagggcagagaattcatctggaacgacctgctgtccctggaaaccggcagcctgaagctggccaacggaagagtgatcgagaagacactgtacaacagaagaacccggcaggatgagcctgccctgttcgtggccctgaccttcgagcggcgggaggtcctggactcctccaatatcaaaccaatgaacctgatcggcgtggcaagaggcgaaaacatccccgccgtgatcgccctgaccgaccccgagggctgcccactgagccggtttaaggatagcctgggaaacccaacccacatcctgagaatcggcgagagctataaggagaagcagcggaccatccaggccaagaaggaggtggagcagcggagagccggcggctacagccggaagtacgccagcaaagccaagaatctggcagacgatatggtgagaaacaccgctagagatctgctgtactacgccgtgacccaggatgccatgctgatcttcgccaacctgagccggggcttcggccggcagggcaagcggaccttcatggccgagagacagtacacacggatggaggactggctgaccgccaagctggcctacgagggcctgagcaagacctacctgtccaagacactggcccagtacacctccaagacatgcagcaactgtgggtttaccatcaccagcgccgactacgacagggtgctggagaagctgaagaagacagcaacaggctggatgaccacaattaacggcaaggagctgaaggtggagggccagattacctactacaacagatacaagagacagaacgtagtcaaggacctgtccgtcgagctggatagactgagcgaagaatctgtgaacaacgacatctcctcctggacaaagggcagaagcggagaagctctgagcctcctgaagaaaagattctcccatagacccgtgcaggagaagttcgtgtgcctgaactgcggcttcgagacacacgcagccgagcaagccgccctgaacatcgccagatcctggctgttcctgcggagccaggagtacaagaaataccagacaaacaagacaaccggcaacaccgataagagagccttcgtcgagacctggcagtccttttaccggaagaagcttaaggaggtgtggaaacctgccgtgcggtctggcggatctggcggaggctccacaagcgacgccgtgacctacgaggacgtgcacgtgaacttcacccacgaggagtgggccctgctggaccccagccagaagagcctgtacaaggacgtgatgctggagacctactggaacctgaccagcatcggctacaagtgggaggaccacaacttcgaggagaactgccagagcagcaggaggcacggcaggcacatcaactgccccagcggctacaagccctgcgagcacgaggagtacggcaagaccagccccaagaaaaagagaaaagtctaagctgccttctgcggggcttgccttctggccatgcccttcttctctcccttgcacctgtacctcttggtctttgaataaagcctgagtaggaaggctagcaaaaaaaaaaaaaaaaaaaaaaaaaaaaaaaaaaaaaaaaaaaaaaaaaaaaaaaaaaaaaaaaaaaaaaaaaaaaaaaa

SEQ ID NO: 2992 - RNA, 5419 nt, synthetic construct
  source 1..5419: mol_type = other RNA
aggaaataagagagaaaagaagagtaagaagaaatataagagccaccatggcccctaagaagaagcgtaaagtgagccgggtgaacggcagcggcagcggcggcggcatgaaccacgaccaggagttcgacccccctaaggtgtaccctcccgtccccgccgagaagagaaagcccatccgggtcctgagcctgttcgatggcatcgccaccggtctgctggtgctgaaggacctgggcatccaggtggataggtacattgcctccgaggtgtgcgaggactccatcaccgtgggaatggtgcgtcatcagggcaagatcatgtacgtgggcgacgtgcggagcgtgacacagaagcatatccaggagtggggccctttcgacctggtgatcggcggcagcccttgcaatgacctgagcatcgtgaacccagcccggaagggcctgtacgagggaaccggcagactgttcttcgagttttacagactgctgcacgacgcccggcctaaggaaggcgacgaccggcccttcttttggctgttcgagaatgtggtggccatgggagtcagcgacaagcgggatattagccggttcctggagagcaaccccgtgatgatcgatgccaaggaagtgagcgccgcccaccgggccagatacttctggggcaatctgcctggcatgaacagacccctggccagcaccgtgaacgacaagctggagctgcaggagtgcctggagcacggccggatcgccaagttcagcaaggtgagaaccatcaccacccgaagcaacagcatcaaacaaggcaaggaccagcactttcctgtgttcatgaacgagaaggaggacatcctgtggtgtaccgagatggagagagtgttcgggttcccagtccactacacagatgtcagcaacatgtctagactggccagacagagactgctgggaagaagctggtccgtccctgtgatcagacacctgttcgcccctctgaaggagtacttcgcctgcgtgagcagcggcaacagcaacgccaacagccggggccccagcttctctagcggcctggtgccactgtccctgagagggagccacatgggccccatggagatctacaaaaccgtgagcgcctggaagcggcagcctgtgcgcgtgctgagcctgtttcggaatatcgataaagtcctgaaaagcctgggattcctggagagcggctctggctccggcggtggcaccctgaagtacgtggaggatgtgacaaacgtggtcagacgggatgtggagaagtggggccccttcgatctggtgtacggcagcacccaacccctgggcagctcttgtgaccggtgccctggctggtacatgtttcagttccaccggatcctgcagtacgccctgccgagacaggagtcccagcggccattcttttggattttcatggacaacttgctgctgaccgaggatgaccaggaaactaccactcggttcctgcagaccgaagccgtgaccctgcaggacgtgagaggccgggactaccagaacgccatgcgggtgtggtccaacatccctggactgaaaagcaagcacgcacctctgacccctaaagaagaggagtacctgcaggcccaggtgcggagcagaagcaagctggacgcccctaaggtggatctgctggtgaagaattgcctcctgcccctgagagagtacttcaagtatttcagccagaatagtctgcccctgggcggcccaagcagcggcgcccctcctcccagcggcggcagcccagccggctccccaacctctaccgaggagggcacctctgagtccgccacccccgagagcggccctggcacctccaccgagcccagcgagggcagcgcacccggcagccctgccggcagccccacctccacagaggagggaaccagcaccgagcccagcgaaggcagcgccccaggcaccagcaccgagcctagtgagggcggctctggcggcggcagcgcccaggagattaaacggatcaacaagatcagaagaagacttgtgaaagacagcaacaccaagaaggccggcaagacaggccccatgaaaaccctgctggttagagtgatgacacccgatctgagagagcggctggaaaacctgagaaagaagcctgaaaatatcccccagcccatcagcaatacatctagagccaacctgaataagctgctgaccgattacaccgaaatgaagaaggcgatcctgcatgtgtactgggaagagttccagaaggaccctgtgggcctgatgagccgggtggcccagcctgccagcaagaagatcgatcagaacaagctgaaacctgagatggacgagaagggcaacctgaccaccgccggctttgcctgctctcagtgtggccagcccctgttcgtgtacaagctggagcaggtgtctgagaagggcaaggcttacaccaactacttcggacggtgcaatgtggccgagcacgaaaagctgatcctgctggcccagctgaagcccgagaaggatagcgacgaagccgtgacatatagcctgggaaagtttgggcagagggccctggatttctacagcattcatgtgaccaaggagtccacccaccccgtgaagcccctggcccagatcgccggaaacagatacgcctccggacctgtgggaaaggccctgagcgacgcatgtatgggcacaatcgcctccttcctgtctaagtaccaggacatcatcatcgaacaccagaaggtggtgaagggcaaccagaagagactggagagcctgcgggagctggccggcaaggaaaacctggaataccctagcgtgaccctgccacctcagcctcacaccaaggagggcgttgatgcctacaacgaagtgatcgcccgggtgcgaatgtgggtgaacctgaacctgtggcagaagctgaagctaagcagagatgatgccaagcctctgctgagactgaagggattcccttcctttcctctggtcgagagacaggccaacgaagtggactggtgggacatggtgtgtaacgtgaagaagctgatcaacgagaaaaaggaggatggcaaggtgttttggcagaatctggctggctacaagagacaggaagccctgagaccatacctgagcagcgaggaagatcggaagaagggaaagaaattcgctcggtaccagctgggcgacctgctgctgcacctggaaaagaagcacggcgaggactggggaaaggtgtacgacgaggcctgggagcggattgacaagaaagtggaaggcctgagcaagcacatcaagctggaagaggaacggagaagcgaggacgcccagagcaaggccgccctgaccgactggctgcgggctaaggccagcttcgtgatcgagggcctgaaggaggccgacaaggacgagttctgcagatgcgagctgaagctgcagaagtggtacggggacctgcggggaaagcccttcgccatcgaagccgagaacagcatcctggacatcagcggcttcagcaagcagtacaactgtgccttcatctggcagaaggacggcgtgaagaagctgaacctgtacctgatcatcaactacttcaagggcggcaagctgcggttcaagaagatcaaacctgaagccttcgaagccaacagattctacaccgtgatcaacaaaaagagcggcgagatcgtgcccatggaggtgaacttcaacttcgacgaccccaacctgatcatcctgcctctggcctttggcaagagacagggcagagaattcatctggaacgacctgctgtccctggaaaccggcagcctgaagctggccaacggaagagtgatcgagaagacactgtacaacagaagaacccggcaggatgagcctgccctgttcgtggccctgaccttcgagcggcgggaggtcctggactcctccaatatcaaaccaatgaacctgatcggcgtggcaagaggcgaaaacatccccgccgtgatcgccctgaccgaccccgagggctgcccactgagccggtttaaggatagcctgggaaacccaacccacatcctgagaatcggcgagagctataaggagaagcagcggaccatccaggccaagaaggaggtggagcagcggagagccggcggctacagccggaagtacgccagcaaagccaagaatctggcagacgatatggtgagaaacaccgctagagatctgctgtactacgccgtgacccaggatgccatgctgatcttcgccaacctgagccggggcttcggccggcagggcaagcggaccttcatggccgagagacagtacacacggatggaggactggctgaccgccaagctggcctacgagggcctgagcaagacctacctgtccaagacactggcccagtacacctccaagacatgcagcaactgtgggtttaccatcaccagcgccgactacgacagggtgctggagaagctgaagaagacagcaacaggctggatgaccacaattaacggcaaggagctgaaggtggagggccagattacctactacaacagatacaagagacagaacgtagtcaaggacctgtccgtcgagctggatagactgagcgaagaatctgtgaacaacgacatctcctcctggacaaagggcagaagcggagaagctctgagcctcctgaagaaaagattctcccatagacccgtgcaggagaagttcgtgtgcctgaactgcggcttcgagacacacgcagccgagcaagccgccctgaacatcgccagatcctggctgttcctgcggagccaggagtacaagaaataccagacaaacaagacaaccggcaacaccgataagagagccttcgtcgagacctggcagtccttttaccggaagaagcttaaggaggtgtggaaacctgccgtgcggtctggcggatctggcggaggctccacaagcttccaggaggccgtgaccttcaaggacgtggccgtgaccttcaccgaggaggagctgggcctgctggacagcacccagaggaagctgtacagggacgtgatgctggagaacttcaggaacctgctgctggtgggcaaccagcccttcaagcccgagctgatcttccagctggagagggaggagatgctgctgatgctggagaccgagatccagaggggcaccaagagccaccacagcctggagaccagccccaagaaaaagagaaaagtctaagctgccttctgcggggcttgccttctggccatgcccttcttctctcccttgcacctgtacctcttggtctttgaataaagcctgagtaggaaggctagcaaaaaaaaaaaaaaaaaaaaaaaaaaaaaaaaaaaaaaaaaaaaaaaaaaaaaaaaaaaaaaaaaaaaaaaaaaaaaaaa

SEQ ID NO: 2993 - RNA, 5419 nt, synthetic construct
  source 1..5419: mol_type = other RNA
aggaaataagagagaaaagaagagtaagaagaaatataagagccaccatggcccctaagaagaagcgtaaagtgagccgggtgaacggcagcggcagcggcggcggcatgaaccacgaccaggagttcgacccccctaaggtgtaccctcccgtccccgccgagaagagaaagcccatccgggtcctgagcctgttcgatggcatcgccaccggtctgctggtgctgaaggacctgggcatccaggtggataggtacattgcctccgaggtgtgcgaggactccatcaccgtgggaatggtgcgtcatcagggcaagatcatgtacgtgggcgacgtgcggagcgtgacacagaagcatatccaggagtggggccctttcgacctggtgatcggcggcagcccttgcaatgacctgagcatcgtgaacccagcccggaagggcctgtacgagggaaccggcagactgttcttcgagttttacagactgctgcacgacgcccggcctaaggaaggcgacgaccggcccttcttttggctgttcgagaatgtggtggccatgggagtcagcgacaagcgggatattagccggttcctggagagcaaccccgtgatgatcgatgccaaggaagtgagcgccgcccaccgggccagatacttctggggcaatctgcctggcatgaacagacccctggccagcaccgtgaacgacaagctggagctgcaggagtgcctggagcacggccggatcgccaagttcagcaaggtgagaaccatcaccacccgaagcaacagcatcaaacaaggcaaggaccagcactttcctgtgttcatgaacgagaaggaggacatcctgtggtgtaccgagatggagagagtgttcgggttcccagtccactacacagatgtcagcaacatgtctagactggccagacagagactgctgggaagaagctggtccgtccctgtgatcagacacctgttcgcccctctgaaggagtacttcgcctgcgtgagcagcggcaacagcaacgccaacagccggggccccagcttctctagcggcctggtgccactgtccctgagagggagccacatgggccccatggagatctacaaaaccgtgagcgcctggaagcggcagcctgtgcgcgtgctgagcctgtttcggaatatcgataaagtcctgaaaagcctgggattcctggagagcggctctggctccggcggtggcaccctgaagtacgtggaggatgtgacaaacgtggtcagacgggatgtggagaagtggggccccttcgatctggtgtacggcagcacccaacccctgggcagctcttgtgaccggtgccctggctggtacatgtttcagttccaccggatcctgcagtacgccctgccgagacaggagtcccagcggccattcttttggattttcatggacaacttgctgctgaccgaggatgaccaggaaactaccactcggttcctgcagaccgaagccgtgaccctgcaggacgtgagaggccgggactaccagaacgccatgcgggtgtggtccaacatccctggactgaaaagcaagcacgcacctctgacccctaaagaagaggagtacctgcaggcccaggtgcggagcagaagcaagctggacgcccctaaggtggatctgctggtgaagaattgcctcctgcccctgagagagtacttcaagtatttcagccagaatagtctgcccctgggcggcccaagcagcggcgcccctcctcccagcggcggcagcccagccggctccccaacctctaccgaggagggcacctctgagtccgccacccccgagagcggccctggcacctccaccgagcccagcgagggcagcgcacccggcagccctgccggcagccccacctccacagaggagggaaccagcaccgagcccagcgaaggcagcgccccaggcaccagcaccgagcctagtgagggcggctctggcggcggcagcgcccaggagattaaacggatcaacaagatcagaagaagacttgtgaaagacagcaacaccaagaaggccggcaagacaggccccatgaaaaccctgctggttagagtgatgacacccgatctgagagagcggctggaaaacctgagaaagaagcctgaaaatatcccccagcccatcagcaatacatctagagccaacctgaataagctgctgaccgattacaccgaaatgaagaaggcgatcctgcatgtgtactgggaagagttccagaaggaccctgtgggcctgatgagccgggtggcccagcctgccagcaagaagatcgatcagaacaagctgaaacctgagatggacgagaagggcaacctgaccaccgccggctttgcctgctctcagtgtggccagcccctgttcgtgtacaagctggagcaggtgtctgagaagggcaaggcttacaccaactacttcggacggtgcaatgtggccgagcacgaaaagctgatcctgctggcccagctgaagcccgagaaggatagcgacgaagccgtgacatatagcctgggaaagtttgggcagagggccctggatttctacagcattcatgtgaccaaggagtccacccaccccgtgaagcccctggcccagatcgccggaaacagatacgcctccggacctgtgggaaaggccctgagcgacgcatgtatgggcacaatcgcctccttcctgtctaagtaccaggacatcatcatcgaacaccagaaggtggtgaagggcaaccagaagagactggagagcctgcgggagctggccggcaaggaaaacctggaataccctagcgtgaccctgccacctcagcctcacaccaaggagggcgttgatgcctacaacgaagtgatcgcccgggtgcgaatgtgggtgaacctgaacctgtggcagaagctgaagctaagcagagatgatgccaagcctctgctgagactgaagggattcccttcctttcctctggtcgagagacaggccaacgaagtggactggtgggacatggtgtgtaacgtgaagaagctgatcaacgagaaaaaggaggatggcaaggtgttttggcagaatctggctggctacaagagacaggaagccctgagaccatacctgagcagcgaggaagatcggaagaagggaaagaaattcgctcggtaccagctgggcgacctgctgctgcacctggaaaagaagcacggcgaggactggggaaaggtgtacgacgaggcctgggagcggattgacaagaaagtggaaggcctgagcaagcacatcaagctggaagaggaacggagaagcgaggacgcccagagcaaggccgccctgaccgactggctgcgggctaaggccagcttcgtgatcgagggcctgaaggaggccgacaaggacgagttctgcagatgcgagctgaagctgcagaagtggtacggggacctgcggggaaagcccttcgccatcgaagccgagaacagcatcctggacatcagcggcttcagcaagcagtacaactgtgccttcatctggcagaaggacggcgtgaagaagctgaacctgtacctgatcatcaactacttcaagggcggcaagctgcggttcaagaagatcaaacctgaagccttcgaagccaacagattctacaccgtgatcaacaaaaagagcggcgagatcgtgcccatggaggtgaacttcaacttcgacgaccccaacctgatcatcctgcctctggcctttggcaagagacagggcagagaattcatctggaacgacctgctgtccctggaaaccggcagcctgaagctggccaacggaagagtgatcgagaagacactgtacaacagaagaacccggcaggatgagcctgccctgttcgtggccctgaccttcgagcggcgggaggtcctggactcctccaatatcaaaccaatgaacctgatcggcgtggcaagaggcgaaaacatccccgccgtgatcgccctgaccgaccccgagggctgcccactgagccggtttaaggatagcctgggaaacccaacccacatcctgagaatcggcgagagctataaggagaagcagcggaccatccaggccaagaaggaggtggagcagcggagagccggcggctacagccggaagtacgccagcaaagccaagaatctggcagacgatatggtgagaaacaccgctagagatctgctgtactacgccgtgacccaggatgccatgctgatcttcgccaacctgagccggggcttcggccggcagggcaagcggaccttcatggccgagagacagtacacacggatggaggactggctgaccgccaagctggcctacgagggcctgagcaagacctacctgtccaagacactggcccagtacacctccaagacatgcagcaactgtgggtttaccatcaccagcgccgactacgacagggtgctggagaagctgaagaagacagcaacaggctggatgaccacaattaacggcaaggagctgaaggtggagggccagattacctactacaacagatacaagagacagaacgtagtcaaggacctgtccgtcgagctggatagactgagcgaagaatctgtgaacaacgacatctcctcctggacaaagggcagaagcggagaagctctgagcctcctgaagaaaagattctcccatagacccgtgcaggagaagttcgtgtgcctgaactgcggcttcgagacacacgcagccgagcaagccgccctgaacatcgccagatcctggctgttcctgcggagccaggagtacaagaaataccagacaaacaagacaaccggcaacaccgataagagagccttcgtcgagacctggcagtccttttaccggaagaagcttaaggaggtgtggaaacctgccgtgcggtctggcggatctggcggaggctccacaagcatggagggcctggtgatgttccaggacctgagcatcgacttcagccaggaggagtgggagtgcctggacgccgcccagaaggacctgtacagggacgtgatgatggagaactacagcagcctggtgagcctgggcctgagcacccccaagcccgacgtgatcagcctgctggagcagggcaaggagccctggatggtgagcagggacgtgctgggcggctggtgccccgacaggctgaagaagaccagccccaagaaaaagagaaaagtctaagctgccttctgcggggcttgccttctggccatgcccttcttctctcccttgcacctgtacctcttggtctttgaataaagcctgagtaggaaggctagcaaaaaaaaaaaaaaaaaaaaaaaaaaaaaaaaaaaaaaaaaaaaaaaaaaaaaaaaaaaaaaaaaaaaaaaaaaaaaaaa

SEQ ID NO: 2994 - RNA, 5419 nt, synthetic construct
  source 1..5419: mol_type = other RNA
aggaaataagagagaaaagaagagtaagaagaaatataagagccaccatggcccctaagaagaagcgtaaagtgagccgggtgaacggcagcggcagcggcggcggcatgaaccacgaccaggagttcgacccccctaaggtgtaccctcccgtccccgccgagaagagaaagcccatccgggtcctgagcctgttcgatggcatcgccaccggtctgctggtgctgaaggacctgggcatccaggtggataggtacattgcctccgaggtgtgcgaggactccatcaccgtgggaatggtgcgtcatcagggcaagatcatgtacgtgggcgacgtgcggagcgtgacacagaagcatatccaggagtggggccctttcgacctggtgatcggcggcagcccttgcaatgacctgagcatcgtgaacccagcccggaagggcctgtacgagggaaccggcagactgttcttcgagttttacagactgctgcacgacgcccggcctaaggaaggcgacgaccggcccttcttttggctgttcgagaatgtggtggccatgggagtcagcgacaagcgggatattagccggttcctggagagcaaccccgtgatgatcgatgccaaggaagtgagcgccgcccaccgggccagatacttctggggcaatctgcctggcatgaacagacccctggccagcaccgtgaacgacaagctggagctgcaggagtgcctggagcacggccggatcgccaagttcagcaaggtgagaaccatcaccacccgaagcaacagcatcaaacaaggcaaggaccagcactttcctgtgttcatgaacgagaaggaggacatcctgtggtgtaccgagatggagagagtgttcgggttcccagtccactacacagatgtcagcaacatgtctagactggccagacagagactgctgggaagaagctggtccgtccctgtgatcagacacctgttcgcccctctgaaggagtacttcgcctgcgtgagcagcggcaacagcaacgccaacagccggggccccagcttctctagcggcctggtgccactgtccctgagagggagccacatgggccccatggagatctacaaaaccgtgagcgcctggaagcggcagcctgtgcgcgtgctgagcctgtttcggaatatcgataaagtcctgaaaagcctgggattcctggagagcggctctggctccggcggtggcaccctgaagtacgtggaggatgtgacaaacgtggtcagacgggatgtggagaagtggggccccttcgatctggtgtacggcagcacccaacccctgggcagctcttgtgaccggtgccctggctggtacatgtttcagttccaccggatcctgcagtacgccctgccgagacaggagtcccagcggccattcttttggattttcatggacaacttgctgctgaccgaggatgaccaggaaactaccactcggttcctgcagaccgaagccgtgaccctgcaggacgtgagaggccgggactaccagaacgccatgcgggtgtggtccaacatccctggactgaaaagcaagcacgcacctctgacccctaaagaagaggagtacctgcaggcccaggtgcggagcagaagcaagctggacgcccctaaggtggatctgctggtgaagaattgcctcctgcccctgagagagtacttcaagtatttcagccagaatagtctgcccctgggcggcccaagcagcggcgcccctcctcccagcggcggcagcccagccggctccccaacctctaccgaggagggcacctctgagtccgccacccccgagagcggccctggcacctccaccgagcccagcgagggcagcgcacccggcagccctgccggcagccccacctccacagaggagggaaccagcaccgagcccagcgaaggcagcgccccaggcaccagcaccgagcctagtgagggcggctctggcggcggcagcgcccaggagattaaacggatcaacaagatcagaagaagacttgtgaaagacagcaacaccaagaaggccggcaagacaggccccatgaaaaccctgctggttagagtgatgacacccgatctgagagagcggctggaaaacctgagaaagaagcctgaaaatatcccccagcccatcagcaatacatctagagccaacctgaataagctgctgaccgattacaccgaaatgaagaaggcgatcctgcatgtgtactgggaagagttccagaaggaccctgtgggcctgatgagccgggtggcccagcctgccagcaagaagatcgatcagaacaagctgaaacctgagatggacgagaagggcaacctgaccaccgccggctttgcctgctctcagtgtggccagcccctgttcgtgtacaagctggagcaggtgtctgagaagggcaaggcttacaccaactacttcggacggtgcaatgtggccgagcacgaaaagctgatcctgctggcccagctgaagcccgagaaggatagcgacgaagccgtgacatatagcctgggaaagtttgggcagagggccctggatttctacagcattcatgtgaccaaggagtccacccaccccgtgaagcccctggcccagatcgccggaaacagatacgcctccggacctgtgggaaaggccctgagcgacgcatgtatgggcacaatcgcctccttcctgtctaagtaccaggacatcatcatcgaacaccagaaggtggtgaagggcaaccagaagagactggagagcctgcgggagctggccggcaaggaaaacctggaataccctagcgtgaccctgccacctcagcctcacaccaaggagggcgttgatgcctacaacgaagtgatcgcccgggtgcgaatgtgggtgaacctgaacctgtggcagaagctgaagctaagcagagatgatgccaagcctctgctgagactgaagggattcccttcctttcctctggtcgagagacaggccaacgaagtggactggtgggacatggtgtgtaacgtgaagaagctgatcaacgagaaaaaggaggatggcaaggtgttttggcagaatctggctggctacaagagacaggaagccctgagaccatacctgagcagcgaggaagatcggaagaagggaaagaaattcgctcggtaccagctgggcgacctgctgctgcacctggaaaagaagcacggcgaggactggggaaaggtgtacgacgaggcctgggagcggattgacaagaaagtggaaggcctgagcaagcacatcaagctggaagaggaacggagaagcgaggacgcccagagcaaggccgccctgaccgactggctgcgggctaaggccagcttcgtgatcgagggcctgaaggaggccgacaaggacgagttctgcagatgcgagctgaagctgcagaagtggtacggggacctgcggggaaagcccttcgccatcgaagccgagaacagcatcctggacatcagcggcttcagcaagcagtacaactgtgccttcatctggcagaaggacggcgtgaagaagctgaacctgtacctgatcatcaactacttcaagggcggcaagctgcggttcaagaagatcaaacctgaagccttcgaagccaacagattctacaccgtgatcaacaaaaagagcggcgagatcgtgcccatggaggtgaacttcaacttcgacgaccccaacctgatcatcctgcctctggcctttggcaagagacagggcagagaattcatctggaacgacctgctgtccctggaaaccggcagcctgaagctggccaacggaagagtgatcgagaagacactgtacaacagaagaacccggcaggatgagcctgccctgttcgtggccctgaccttcgagcggcgggaggtcctggactcctccaatatcaaaccaatgaacctgatcggcgtggcaagaggcgaaaacatccccgccgtgatcgccctgaccgaccccgagggctgcccactgagccggtttaaggatagcctgggaaacccaacccacatcctgagaatcggcgagagctataaggagaagcagcggaccatccaggccaagaaggaggtggagcagcggagagccggcggctacagccggaagtacgccagcaaagccaagaatctggcagacgatatggtgagaaacaccgctagagatctgctgtactacgccgtgacccaggatgccatgctgatcttcgccaacctgagccggggcttcggccggcagggcaagcggaccttcatggccgagagacagtacacacggatggaggactggctgaccgccaagctggcctacgagggcctgagcaagacctacctgtccaagacactggcccagtacacctccaagacatgcagcaactgtgggtttaccatcaccagcgccgactacgacagggtgctggagaagctgaagaagacagcaacaggctggatgaccacaattaacggcaaggagctgaaggtggagggccagattacctactacaacagatacaagagacagaacgtagtcaaggacctgtccgtcgagctggatagactgagcgaagaatctgtgaacaacgacatctcctcctggacaaagggcagaagcggagaagctctgagcctcctgaagaaaagattctcccatagacccgtgcaggagaagttcgtgtgcctgaactgcggcttcgagacacacgcagccgagcaagccgccctgaacatcgccagatcctggctgttcctgcggagccaggagtacaagaaataccagacaaacaagacaaccggcaacaccgataagagagccttcgtcgagacctggcagtccttttaccggaagaagcttaaggaggtgtggaaacctgccgtgcggtctggcggatctggcggaggctccacaagcacccaggagcacgtgaccttcagggacgtggccgtgttcttcagccaggacgagtggctgcacctggacagcgcccagagggccctgtacagggaggtgatgctggagaactacagcagcctggtgagcctgggcatccccttcagcatgcccaagctgatccaccagctgcagcagggcgaggacccctgcatggtggagagggaggtgagcgccgacacctgcctgggcttcaagacctggaccagccccaagaaaaagagaaaagtctaagctgccttctgcggggcttgccttctggccatgcccttcttctctcccttgcacctgtacctcttggtctttgaataaagcctgagtaggaaggctagcaaaaaaaaaaaaaaaaaaaaaaaaaaaaaaaaaaaaaaaaaaaaaaaaaaaaaaaaaaaaaaaaaaaaaaaaaaaaaaaa

SEQ ID NO: 2995 - RNA, 5419 nt, synthetic construct
  source 1..5419: mol_type = other RNA
aggaaataagagagaaaagaagagtaagaagaaatataagagccaccatggcccctaagaagaagcgtaaagtgagccgggtgaacggcagcggcagcggcggcggcatgaaccacgaccaggagttcgacccccctaaggtgtaccctcccgtccccgccgagaagagaaagcccatccgggtcctgagcctgttcgatggcatcgccaccggtctgctggtgctgaaggacctgggcatccaggtggataggtacattgcctccgaggtgtgcgaggactccatcaccgtgggaatggtgcgtcatcagggcaagatcatgtacgtgggcgacgtgcggagcgtgacacagaagcatatccaggagtggggccctttcgacctggtgatcggcggcagcccttgcaatgacctgagcatcgtgaacccagcccggaagggcctgtacgagggaaccggcagactgttcttcgagttttacagactgctgcacgacgcccggcctaaggaaggcgacgaccggcccttcttttggctgttcgagaatgtggtggccatgggagtcagcgacaagcgggatattagccggttcctggagagcaaccccgtgatgatcgatgccaaggaagtgagcgccgcccaccgggccagatacttctggggcaatctgcctggcatgaacagacccctggccagcaccgtgaacgacaagctggagctgcaggagtgcctggagcacggccggatcgccaagttcagcaaggtgagaaccatcaccacccgaagcaacagcatcaaacaaggcaaggaccagcactttcctgtgttcatgaacgagaaggaggacatcctgtggtgtaccgagatggagagagtgttcgggttcccagtccactacacagatgtcagcaacatgtctagactggccagacagagactgctgggaagaagctggtccgtccctgtgatcagacacctgttcgcccctctgaaggagtacttcgcctgcgtgagcagcggcaacagcaacgccaacagccggggccccagcttctctagcggcctggtgccactgtccctgagagggagccacatgggccccatggagatctacaaaaccgtgagcgcctggaagcggcagcctgtgcgcgtgctgagcctgtttcggaatatcgataaagtcctgaaaagcctgggattcctggagagcggctctggctccggcggtggcaccctgaagtacgtggaggatgtgacaaacgtggtcagacgggatgtggagaagtggggccccttcgatctggtgtacggcagcacccaacccctgggcagctcttgtgaccggtgccctggctggtacatgtttcagttccaccggatcctgcagtacgccctgccgagacaggagtcccagcggccattcttttggattttcatggacaacttgctgctgaccgaggatgaccaggaaactaccactcggttcctgcagaccgaagccgtgaccctgcaggacgtgagaggccgggactaccagaacgccatgcgggtgtggtccaacatccctggactgaaaagcaagcacgcacctctgacccctaaagaagaggagtacctgcaggcccaggtgcggagcagaagcaagctggacgcccctaaggtggatctgctggtgaagaattgcctcctgcccctgagagagtacttcaagtatttcagccagaatagtctgcccctgggcggcccaagcagcggcgcccctcctcccagcggcggcagcccagccggctccccaacctctaccgaggagggcacctctgagtccgccacccccgagagcggccctggcacctccaccgagcccagcgagggcagcgcacccggcagccctgccggcagccccacctccacagaggagggaaccagcaccgagcccagcgaaggcagcgccccaggcaccagcaccgagcctagtgagggcggctctggcggcggcagcgcccaggagattaaacggatcaacaagatcagaagaagacttgtgaaagacagcaacaccaagaaggccggcaagacaggccccatgaaaaccctgctggttagagtgatgacacccgatctgagagagcggctggaaaacctgagaaagaagcctgaaaatatcccccagcccatcagcaatacatctagagccaacctgaataagctgctgaccgattacaccgaaatgaagaaggcgatcctgcatgtgtactgggaagagttccagaaggaccctgtgggcctgatgagccgggtggcccagcctgccagcaagaagatcgatcagaacaagctgaaacctgagatggacgagaagggcaacctgaccaccgccggctttgcctgctctcagtgtggccagcccctgttcgtgtacaagctggagcaggtgtctgagaagggcaaggcttacaccaactacttcggacggtgcaatgtggccgagcacgaaaagctgatcctgctggcccagctgaagcccgagaaggatagcgacgaagccgtgacatatagcctgggaaagtttgggcagagggccctggatttctacagcattcatgtgaccaaggagtccacccaccccgtgaagcccctggcccagatcgccggaaacagatacgcctccggacctgtgggaaaggccctgagcgacgcatgtatgggcacaatcgcctccttcctgtctaagtaccaggacatcatcatcgaacaccagaaggtggtgaagggcaaccagaagagactggagagcctgcgggagctggccggcaaggaaaacctggaataccctagcgtgaccctgccacctcagcctcacaccaaggagggcgttgatgcctacaacgaagtgatcgcccgggtgcgaatgtgggtgaacctgaacctgtggcagaagctgaagctaagcagagatgatgccaagcctctgctgagactgaagggattcccttcctttcctctggtcgagagacaggccaacgaagtggactggtgggacatggtgtgtaacgtgaagaagctgatcaacgagaaaaaggaggatggcaaggtgttttggcagaatctggctggctacaagagacaggaagccctgagaccatacctgagcagcgaggaagatcggaagaagggaaagaaattcgctcggtaccagctgggcgacctgctgctgcacctggaaaagaagcacggcgaggactggggaaaggtgtacgacgaggcctgggagcggattgacaagaaagtggaaggcctgagcaagcacatcaagctggaagaggaacggagaagcgaggacgcccagagcaaggccgccctgaccgactggctgcgggctaaggccagcttcgtgatcgagggcctgaaggaggccgacaaggacgagttctgcagatgcgagctgaagctgcagaagtggtacggggacctgcggggaaagcccttcgccatcgaagccgagaacagcatcctggacatcagcggcttcagcaagcagtacaactgtgccttcatctggcagaaggacggcgtgaagaagctgaacctgtacctgatcatcaactacttcaagggcggcaagctgcggttcaagaagatcaaacctgaagccttcgaagccaacagattctacaccgtgatcaacaaaaagagcggcgagatcgtgcccatggaggtgaacttcaacttcgacgaccccaacctgatcatcctgcctctggcctttggcaagagacagggcagagaattcatctggaacgacctgctgtccctggaaaccggcagcctgaagctggccaacggaagagtgatcgagaagacactgtacaacagaagaacccggcaggatgagcctgccctgttcgtggccctgaccttcgagcggcgggaggtcctggactcctccaatatcaaaccaatgaacctgatcggcgtggcaagaggcgaaaacatccccgccgtgatcgccctgaccgaccccgagggctgcccactgagccggtttaaggatagcctgggaaacccaacccacatcctgagaatcggcgagagctataaggagaagcagcggaccatccaggccaagaaggaggtggagcagcggagagccggcggctacagccggaagtacgccagcaaagccaagaatctggcagacgatatggtgagaaacaccgctagagatctgctgtactacgccgtgacccaggatgccatgctgatcttcgccaacctgagccggggcttcggccggcagggcaagcggaccttcatggccgagagacagtacacacggatggaggactggctgaccgccaagctggcctacgagggcctgagcaagacctacctgtccaagacactggcccagtacacctccaagacatgcagcaactgtgggtttaccatcaccagcgccgactacgacagggtgctggagaagctgaagaagacagcaacaggctggatgaccacaattaacggcaaggagctgaaggtggagggccagattacctactacaacagatacaagagacagaacgtagtcaaggacctgtccgtcgagctggatagactgagcgaagaatctgtgaacaacgacatctcctcctggacaaagggcagaagcggagaagctctgagcctcctgaagaaaagattctcccatagacccgtgcaggagaagttcgtgtgcctgaactgcggcttcgagacacacgcagccgagcaagccgccctgaacatcgccagatcctggctgttcctgcggagccaggagtacaagaaataccagacaaacaagacaaccggcaacaccgataagagagccttcgtcgagacctggcagtccttttaccggaagaagcttaaggaggtgtggaaacctgccgtgcggtctggcggatctggcggaggctccacaagccaggccgaggtgaccttcgaggacgtggccgtgctgttcagcagggaggagtggggcaggctgggccccgcccagaggggcctgtacagggacgtgatgctggagacctacaggaacctggtgagcctgggcgccggccccgccggccccaagcccggcgtgatcacccagctggagcagggcgacgagccctgggtgctggacgcccagggcgccaagggcaaggagaggctgagggtgagcaccagccccaagaaaaagagaaaagtctaagctgccttctgcggggcttgccttctggccatgcccttcttctctcccttgcacctgtacctcttggtctttgaataaagcctgagtaggaaggctagcaaaaaaaaaaaaaaaaaaaaaaaaaaaaaaaaaaaaaaaaaaaaaaaaaaaaaaaaaaaaaaaaaaaaaaaaaaaaaaaa

SEQ ID NO: 2996 - RNA, 5419 nt, synthetic construct
  source 1..5419: mol_type = other RNA
aggaaataagagagaaaagaagagtaagaagaaatataagagccaccatggcccctaagaagaagcgtaaagtgagccgggtgaacggcagcggcagcggcggcggcatgaaccacgaccaggagttcgacccccctaaggtgtaccctcccgtccccgccgagaagagaaagcccatccgggtcctgagcctgttcgatggcatcgccaccggtctgctggtgctgaaggacctgggcatccaggtggataggtacattgcctccgaggtgtgcgaggactccatcaccgtgggaatggtgcgtcatcagggcaagatcatgtacgtgggcgacgtgcggagcgtgacacagaagcatatccaggagtggggccctttcgacctggtgatcggcggcagcccttgcaatgacctgagcatcgtgaacccagcccggaagggcctgtacgagggaaccggcagactgttcttcgagttttacagactgctgcacgacgcccggcctaaggaaggcgacgaccggcccttcttttggctgttcgagaatgtggtggccatgggagtcagcgacaagcgggatattagccggttcctggagagcaaccccgtgatgatcgatgccaaggaagtgagcgccgcccaccgggccagatacttctggggcaatctgcctggcatgaacagacccctggccagcaccgtgaacgacaagctggagctgcaggagtgcctggagcacggccggatcgccaagttcagcaaggtgagaaccatcaccacccgaagcaacagcatcaaacaaggcaaggaccagcactttcctgtgttcatgaacgagaaggaggacatcctgtggtgtaccgagatggagagagtgttcgggttcccagtccactacacagatgtcagcaacatgtctagactggccagacagagactgctgggaagaagctggtccgtccctgtgatcagacacctgttcgcccctctgaaggagtacttcgcctgcgtgagcagcggcaacagcaacgccaacagccggggccccagcttctctagcggcctggtgccactgtccctgagagggagccacatgggccccatggagatctacaaaaccgtgagcgcctggaagcggcagcctgtgcgcgtgctgagcctgtttcggaatatcgataaagtcctgaaaagcctgggattcctggagagcggctctggctccggcggtggcaccctgaagtacgtggaggatgtgacaaacgtggtcagacgggatgtggagaagtggggccccttcgatctggtgtacggcagcacccaacccctgggcagctcttgtgaccggtgccctggctggtacatgtttcagttccaccggatcctgcagtacgccctgccgagacaggagtcccagcggccattcttttggattttcatggacaacttgctgctgaccgaggatgaccaggaaactaccactcggttcctgcagaccgaagccgtgaccctgcaggacgtgagaggccgggactaccagaacgccatgcgggtgtggtccaacatccctggactgaaaagcaagcacgcacctctgacccctaaagaagaggagtacctgcaggcccaggtgcggagcagaagcaagctggacgcccctaaggtggatctgctggtgaagaattgcctcctgcccctgagagagtacttcaagtatttcagccagaatagtctgcccctgggcggcccaagcagcggcgcccctcctcccagcggcggcagcccagccggctccccaacctctaccgaggagggcacctctgagtccgccacccccgagagcggccctggcacctccaccgagcccagcgagggcagcgcacccggcagccctgccggcagccccacctccacagaggagggaaccagcaccgagcccagcgaaggcagcgccccaggcaccagcaccgagcctagtgagggcggctctggcggcggcagcgcccaggagattaaacggatcaacaagatcagaagaagacttgtgaaagacagcaacaccaagaaggccggcaagacaggccccatgaaaaccctgctggttagagtgatgacacccgatctgagagagcggctggaaaacctgagaaagaagcctgaaaatatcccccagcccatcagcaatacatctagagccaacctgaataagctgctgaccgattacaccgaaatgaagaaggcgatcctgcatgtgtactgggaagagttccagaaggaccctgtgggcctgatgagccgggtggcccagcctgccagcaagaagatcgatcagaacaagctgaaacctgagatggacgagaagggcaacctgaccaccgccggctttgcctgctctcagtgtggccagcccctgttcgtgtacaagctggagcaggtgtctgagaagggcaaggcttacaccaactacttcggacggtgcaatgtggccgagcacgaaaagctgatcctgctggcccagctgaagcccgagaaggatagcgacgaagccgtgacatatagcctgggaaagtttgggcagagggccctggatttctacagcattcatgtgaccaaggagtccacccaccccgtgaagcccctggcccagatcgccggaaacagatacgcctccggacctgtgggaaaggccctgagcgacgcatgtatgggcacaatcgcctccttcctgtctaagtaccaggacatcatcatcgaacaccagaaggtggtgaagggcaaccagaagagactggagagcctgcgggagctggccggcaaggaaaacctggaataccctagcgtgaccctgccacctcagcctcacaccaaggagggcgttgatgcctacaacgaagtgatcgcccgggtgcgaatgtgggtgaacctgaacctgtggcagaagctgaagctaagcagagatgatgccaagcctctgctgagactgaagggattcccttcctttcctctggtcgagagacaggccaacgaagtggactggtgggacatggtgtgtaacgtgaagaagctgatcaacgagaaaaaggaggatggcaaggtgttttggcagaatctggctggctacaagagacaggaagccctgagaccatacctgagcagcgaggaagatcggaagaagggaaagaaattcgctcggtaccagctgggcgacctgctgctgcacctggaaaagaagcacggcgaggactggggaaaggtgtacgacgaggcctgggagcggattgacaagaaagtggaaggcctgagcaagcacatcaagctggaagaggaacggagaagcgaggacgcccagagcaaggccgccctgaccgactggctgcgggctaaggccagcttcgtgatcgagggcctgaaggaggccgacaaggacgagttctgcagatgcgagctgaagctgcagaagtggtacggggacctgcggggaaagcccttcgccatcgaagccgagaacagcatcctggacatcagcggcttcagcaagcagtacaactgtgccttcatctggcagaaggacggcgtgaagaagctgaacctgtacctgatcatcaactacttcaagggcggcaagctgcggttcaagaagatcaaacctgaagccttcgaagccaacagattctacaccgtgatcaacaaaaagagcggcgagatcgtgcccatggaggtgaacttcaacttcgacgaccccaacctgatcatcctgcctctggcctttggcaagagacagggcagagaattcatctggaacgacctgctgtccctggaaaccggcagcctgaagctggccaacggaagagtgatcgagaagacactgtacaacagaagaacccggcaggatgagcctgccctgttcgtggccctgaccttcgagcggcgggaggtcctggactcctccaatatcaaaccaatgaacctgatcggcgtggcaagaggcgaaaacatccccgccgtgatcgccctgaccgaccccgagggctgcccactgagccggtttaaggatagcctgggaaacccaacccacatcctgagaatcggcgagagctataaggagaagcagcggaccatccaggccaagaaggaggtggagcagcggagagccggcggctacagccggaagtacgccagcaaagccaagaatctggcagacgatatggtgagaaacaccgctagagatctgctgtactacgccgtgacccaggatgccatgctgatcttcgccaacctgagccggggcttcggccggcagggcaagcggaccttcatggccgagagacagtacacacggatggaggactggctgaccgccaagctggcctacgagggcctgagcaagacctacctgtccaagacactggcccagtacacctccaagacatgcagcaactgtgggtttaccatcaccagcgccgactacgacagggtgctggagaagctgaagaagacagcaacaggctggatgaccacaattaacggcaaggagctgaaggtggagggccagattacctactacaacagatacaagagacagaacgtagtcaaggacctgtccgtcgagctggatagactgagcgaagaatctgtgaacaacgacatctcctcctggacaaagggcagaagcggagaagctctgagcctcctgaagaaaagattctcccatagacccgtgcaggagaagttcgtgtgcctgaactgcggcttcgagacacacgcagccgagcaagccgccctgaacatcgccagatcctggctgttcctgcggagccaggagtacaagaaataccagacaaacaagacaaccggcaacaccgataagagagccttcgtcgagacctggcagtccttttaccggaagaagcttaaggaggtgtggaaacctgccgtgcggtctggcggatctggcggaggctccacaagcgagccctgggccatcaccttcgccgacgtggccgtgtacttcagccccgaggagtggggctgcctgcagcccacccagagggccctgtacagggacgtgatgagggacacctacgtgctgctgagcgccctgggcggcggcggcggcgccaagcccgccctgatcagctgggtggagagggagagcgagctgtgggacagcgacgcccaggaccccgaggtgcccaagtggcccaccgaggccaccagccccaagaaaaagagaaaagtctaagctgccttctgcggggcttgccttctggccatgcccttcttctctcccttgcacctgtacctcttggtctttgaataaagcctgagtaggaaggctagcaaaaaaaaaaaaaaaaaaaaaaaaaaaaaaaaaaaaaaaaaaaaaaaaaaaaaaaaaaaaaaaaaaaaaaaaaaaaaaaa

SEQ ID NO: 2997 - RNA, 5419 nt, synthetic construct
  source 1..5419: mol_type = other RNA
aggaaataagagagaaaagaagagtaagaagaaatataagagccaccatggcccctaagaagaagcgtaaagtgagccgggtgaacggcagcggcagcggcggcggcatgaaccacgaccaggagttcgacccccctaaggtgtaccctcccgtccccgccgagaagagaaagcccatccgggtcctgagcctgttcgatggcatcgccaccggtctgctggtgctgaaggacctgggcatccaggtggataggtacattgcctccgaggtgtgcgaggactccatcaccgtgggaatggtgcgtcatcagggcaagatcatgtacgtgggcgacgtgcggagcgtgacacagaagcatatccaggagtggggccctttcgacctggtgatcggcggcagcccttgcaatgacctgagcatcgtgaacccagcccggaagggcctgtacgagggaaccggcagactgttcttcgagttttacagactgctgcacgacgcccggcctaaggaaggcgacgaccggcccttcttttggctgttcgagaatgtggtggccatgggagtcagcgacaagcgggatattagccggttcctggagagcaaccccgtgatgatcgatgccaaggaagtgagcgccgcccaccgggccagatacttctggggcaatctgcctggcatgaacagacccctggccagcaccgtgaacgacaagctggagctgcaggagtgcctggagcacggccggatcgccaagttcagcaaggtgagaaccatcaccacccgaagcaacagcatcaaacaaggcaaggaccagcactttcctgtgttcatgaacgagaaggaggacatcctgtggtgtaccgagatggagagagtgttcgggttcccagtccactacacagatgtcagcaacatgtctagactggccagacagagactgctgggaagaagctggtccgtccctgtgatcagacacctgttcgcccctctgaaggagtacttcgcctgcgtgagcagcggcaacagcaacgccaacagccggggccccagcttctctagcggcctggtgccactgtccctgagagggagccacatgggccccatggagatctacaaaaccgtgagcgcctggaagcggcagcctgtgcgcgtgctgagcctgtttcggaatatcgataaagtcctgaaaagcctgggattcctggagagcggctctggctccggcggtggcaccctgaagtacgtggaggatgtgacaaacgtggtcagacgggatgtggagaagtggggccccttcgatctggtgtacggcagcacccaacccctgggcagctcttgtgaccggtgccctggctggtacatgtttcagttccaccggatcctgcagtacgccctgccgagacaggagtcccagcggccattcttttggattttcatggacaacttgctgctgaccgaggatgaccaggaaactaccactcggttcctgcagaccgaagccgtgaccctgcaggacgtgagaggccgggactaccagaacgccatgcgggtgtggtccaacatccctggactgaaaagcaagcacgcacctctgacccctaaagaagaggagtacctgcaggcccaggtgcggagcagaagcaagctggacgcccctaaggtggatctgctggtgaagaattgcctcctgcccctgagagagtacttcaagtatttcagccagaatagtctgcccctgggcggcccaagcagcggcgcccctcctcccagcggcggcagcccagccggctccccaacctctaccgaggagggcacctctgagtccgccacccccgagagcggccctggcacctccaccgagcccagcgagggcagcgcacccggcagccctgccggcagccccacctccacagaggagggaaccagcaccgagcccagcgaaggcagcgccccaggcaccagcaccgagcctagtgagggcggctctggcggcggcagcgcccaggagattaaacggatcaacaagatcagaagaagacttgtgaaagacagcaacaccaagaaggccggcaagacaggccccatgaaaaccctgctggttagagtgatgacacccgatctgagagagcggctggaaaacctgagaaagaagcctgaaaatatcccccagcccatcagcaatacatctagagccaacctgaataagctgctgaccgattacaccgaaatgaagaaggcgatcctgcatgtgtactgggaagagttccagaaggaccctgtgggcctgatgagccgggtggcccagcctgccagcaagaagatcgatcagaacaagctgaaacctgagatggacgagaagggcaacctgaccaccgccggctttgcctgctctcagtgtggccagcccctgttcgtgtacaagctggagcaggtgtctgagaagggcaaggcttacaccaactacttcggacggtgcaatgtggccgagcacgaaaagctgatcctgctggcccagctgaagcccgagaaggatagcgacgaagccgtgacatatagcctgggaaagtttgggcagagggccctggatttctacagcattcatgtgaccaaggagtccacccaccccgtgaagcccctggcccagatcgccggaaacagatacgcctccggacctgtgggaaaggccctgagcgacgcatgtatgggcacaatcgcctccttcctgtctaagtaccaggacatcatcatcgaacaccagaaggtggtgaagggcaaccagaagagactggagagcctgcgggagctggccggcaaggaaaacctggaataccctagcgtgaccctgccacctcagcctcacaccaaggagggcgttgatgcctacaacgaagtgatcgcccgggtgcgaatgtgggtgaacctgaacctgtggcagaagctgaagctaagcagagatgatgccaagcctctgctgagactgaagggattcccttcctttcctctggtcgagagacaggccaacgaagtggactggtgggacatggtgtgtaacgtgaagaagctgatcaacgagaaaaaggaggatggcaaggtgttttggcagaatctggctggctacaagagacaggaagccctgagaccatacctgagcagcgaggaagatcggaagaagggaaagaaattcgctcggtaccagctgggcgacctgctgctgcacctggaaaagaagcacggcgaggactggggaaaggtgtacgacgaggcctgggagcggattgacaagaaagtggaaggcctgagcaagcacatcaagctggaagaggaacggagaagcgaggacgcccagagcaaggccgccctgaccgactggctgcgggctaaggccagcttcgtgatcgagggcctgaaggaggccgacaaggacgagttctgcagatgcgagctgaagctgcagaagtggtacggggacctgcggggaaagcccttcgccatcgaagccgagaacagcatcctggacatcagcggcttcagcaagcagtacaactgtgccttcatctggcagaaggacggcgtgaagaagctgaacctgtacctgatcatcaactacttcaagggcggcaagctgcggttcaagaagatcaaacctgaagccttcgaagccaacagattctacaccgtgatcaacaaaaagagcggcgagatcgtgcccatggaggtgaacttcaacttcgacgaccccaacctgatcatcctgcctctggcctttggcaagagacagggcagagaattcatctggaacgacctgctgtccctggaaaccggcagcctgaagctggccaacggaagagtgatcgagaagacactgtacaacagaagaacccggcaggatgagcctgccctgttcgtggccctgaccttcgagcggcgggaggtcctggactcctccaatatcaaaccaatgaacctgatcggcgtggcaagaggcgaaaacatccccgccgtgatcgccctgaccgaccccgagggctgcccactgagccggtttaaggatagcctgggaaacccaacccacatcctgagaatcggcgagagctataaggagaagcagcggaccatccaggccaagaaggaggtggagcagcggagagccggcggctacagccggaagtacgccagcaaagccaagaatctggcagacgatatggtgagaaacaccgctagagatctgctgtactacgccgtgacccaggatgccatgctgatcttcgccaacctgagccggggcttcggccggcagggcaagcggaccttcatggccgagagacagtacacacggatggaggactggctgaccgccaagctggcctacgagggcctgagcaagacctacctgtccaagacactggcccagtacacctccaagacatgcagcaactgtgggtttaccatcaccagcgccgactacgacagggtgctggagaagctgaagaagacagcaacaggctggatgaccacaattaacggcaaggagctgaaggtggagggccagattacctactacaacagatacaagagacagaacgtagtcaaggacctgtccgtcgagctggatagactgagcgaagaatctgtgaacaacgacatctcctcctggacaaagggcagaagcggagaagctctgagcctcctgaagaaaagattctcccatagacccgtgcaggagaagttcgtgtgcctgaactgcggcttcgagacacacgcagccgagcaagccgccctgaacatcgccagatcctggctgttcctgcggagccaggagtacaagaaataccagacaaacaagacaaccggcaacaccgataagagagccttcgtcgagacctggcagtccttttaccggaagaagcttaaggaggtgtggaaacctgccgtgcggtctggcggatctggcggaggctccacaagctgccaggagcccgtgagcttcgcccaggtggccgtgtacttcagcagggaggagtgggccctgctggaccccgcccagagggccctgtacagggacgtgatgctggagacctaccagtgcgtggccagcctggcccccctgcccgcccacaagcccatggtgatcagcctgctggagggcggcgaggacccctggatccccgacgtgaggagccccgaggccgtgcccggcgacctgagccccaccagccccaagaaaaagagaaaagtctaagctgccttctgcggggcttgccttctggccatgcccttcttctctcccttgcacctgtacctcttggtctttgaataaagcctgagtaggaaggctagcaaaaaaaaaaaaaaaaaaaaaaaaaaaaaaaaaaaaaaaaaaaaaaaaaaaaaaaaaaaaaaaaaaaaaaaaaaaaaaaa

SEQ ID NO: 2998 - RNA, 5419 nt, synthetic construct
  source 1..5419: mol_type = other RNA
aggaaataagagagaaaagaagagtaagaagaaatataagagccaccatggcccctaagaagaagcgtaaagtgagccgggtgaacggcagcggcagcggcggcggcatgaaccacgaccaggagttcgacccccctaaggtgtaccctcccgtccccgccgagaagagaaagcccatccgggtcctgagcctgttcgatggcatcgccaccggtctgctggtgctgaaggacctgggcatccaggtggataggtacattgcctccgaggtgtgcgaggactccatcaccgtgggaatggtgcgtcatcagggcaagatcatgtacgtgggcgacgtgcggagcgtgacacagaagcatatccaggagtggggccctttcgacctggtgatcggcggcagcccttgcaatgacctgagcatcgtgaacccagcccggaagggcctgtacgagggaaccggcagactgttcttcgagttttacagactgctgcacgacgcccggcctaaggaaggcgacgaccggcccttcttttggctgttcgagaatgtggtggccatgggagtcagcgacaagcgggatattagccggttcctggagagcaaccccgtgatgatcgatgccaaggaagtgagcgccgcccaccgggccagatacttctggggcaatctgcctggcatgaacagacccctggccagcaccgtgaacgacaagctggagctgcaggagtgcctggagcacggccggatcgccaagttcagcaaggtgagaaccatcaccacccgaagcaacagcatcaaacaaggcaaggaccagcactttcctgtgttcatgaacgagaaggaggacatcctgtggtgtaccgagatggagagagtgttcgggttcccagtccactacacagatgtcagcaacatgtctagactggccagacagagactgctgggaagaagctggtccgtccctgtgatcagacacctgttcgcccctctgaaggagtacttcgcctgcgtgagcagcggcaacagcaacgccaacagccggggccccagcttctctagcggcctggtgccactgtccctgagagggagccacatgggccccatggagatctacaaaaccgtgagcgcctggaagcggcagcctgtgcgcgtgctgagcctgtttcggaatatcgataaagtcctgaaaagcctgggattcctggagagcggctctggctccggcggtggcaccctgaagtacgtggaggatgtgacaaacgtggtcagacgggatgtggagaagtggggccccttcgatctggtgtacggcagcacccaacccctgggcagctcttgtgaccggtgccctggctggtacatgtttcagttccaccggatcctgcagtacgccctgccgagacaggagtcccagcggccattcttttggattttcatggacaacttgctgctgaccgaggatgaccaggaaactaccactcggttcctgcagaccgaagccgtgaccctgcaggacgtgagaggccgggactaccagaacgccatgcgggtgtggtccaacatccctggactgaaaagcaagcacgcacctctgacccctaaagaagaggagtacctgcaggcccaggtgcggagcagaagcaagctggacgcccctaaggtggatctgctggtgaagaattgcctcctgcccctgagagagtacttcaagtatttcagccagaatagtctgcccctgggcggcccaagcagcggcgcccctcctcccagcggcggcagcccagccggctccccaacctctaccgaggagggcacctctgagtccgccacccccgagagcggccctggcacctccaccgagcccagcgagggcagcgcacccggcagccctgccggcagccccacctccacagaggagggaaccagcaccgagcccagcgaaggcagcgccccaggcaccagcaccgagcctagtgagggcggctctggcggcggcagcgcccaggagattaaacggatcaacaagatcagaagaagacttgtgaaagacagcaacaccaagaaggccggcaagacaggccccatgaaaaccctgctggttagagtgatgacacccgatctgagagagcggctggaaaacctgagaaagaagcctgaaaatatcccccagcccatcagcaatacatctagagccaacctgaataagctgctgaccgattacaccgaaatgaagaaggcgatcctgcatgtgtactgggaagagttccagaaggaccctgtgggcctgatgagccgggtggcccagcctgccagcaagaagatcgatcagaacaagctgaaacctgagatggacgagaagggcaacctgaccaccgccggctttgcctgctctcagtgtggccagcccctgttcgtgtacaagctggagcaggtgtctgagaagggcaaggcttacaccaactacttcggacggtgcaatgtggccgagcacgaaaagctgatcctgctggcccagctgaagcccgagaaggatagcgacgaagccgtgacatatagcctgggaaagtttgggcagagggccctggatttctacagcattcatgtgaccaaggagtccacccaccccgtgaagcccctggcccagatcgccggaaacagatacgcctccggacctgtgggaaaggccctgagcgacgcatgtatgggcacaatcgcctccttcctgtctaagtaccaggacatcatcatcgaacaccagaaggtggtgaagggcaaccagaagagactggagagcctgcgggagctggccggcaaggaaaacctggaataccctagcgtgaccctgccacctcagcctcacaccaaggagggcgttgatgcctacaacgaagtgatcgcccgggtgcgaatgtgggtgaacctgaacctgtggcagaagctgaagctaagcagagatgatgccaagcctctgctgagactgaagggattcccttcctttcctctggtcgagagacaggccaacgaagtggactggtgggacatggtgtgtaacgtgaagaagctgatcaacgagaaaaaggaggatggcaaggtgttttggcagaatctggctggctacaagagacaggaagccctgagaccatacctgagcagcgaggaagatcggaagaagggaaagaaattcgctcggtaccagctgggcgacctgctgctgcacctggaaaagaagcacggcgaggactggggaaaggtgtacgacgaggcctgggagcggattgacaagaaagtggaaggcctgagcaagcacatcaagctggaagaggaacggagaagcgaggacgcccagagcaaggccgccctgaccgactggctgcgggctaaggccagcttcgtgatcgagggcctgaaggaggccgacaaggacgagttctgcagatgcgagctgaagctgcagaagtggtacggggacctgcggggaaagcccttcgccatcgaagccgagaacagcatcctggacatcagcggcttcagcaagcagtacaactgtgccttcatctggcagaaggacggcgtgaagaagctgaacctgtacctgatcatcaactacttcaagggcggcaagctgcggttcaagaagatcaaacctgaagccttcgaagccaacagattctacaccgtgatcaacaaaaagagcggcgagatcgtgcccatggaggtgaacttcaacttcgacgaccccaacctgatcatcctgcctctggcctttggcaagagacagggcagagaattcatctggaacgacctgctgtccctggaaaccggcagcctgaagctggccaacggaagagtgatcgagaagacactgtacaacagaagaacccggcaggatgagcctgccctgttcgtggccctgaccttcgagcggcgggaggtcctggactcctccaatatcaaaccaatgaacctgatcggcgtggcaagaggcgaaaacatccccgccgtgatcgccctgaccgaccccgagggctgcccactgagccggtttaaggatagcctgggaaacccaacccacatcctgagaatcggcgagagctataaggagaagcagcggaccatccaggccaagaaggaggtggagcagcggagagccggcggctacagccggaagtacgccagcaaagccaagaatctggcagacgatatggtgagaaacaccgctagagatctgctgtactacgccgtgacccaggatgccatgctgatcttcgccaacctgagccggggcttcggccggcagggcaagcggaccttcatggccgagagacagtacacacggatggaggactggctgaccgccaagctggcctacgagggcctgagcaagacctacctgtccaagacactggcccagtacacctccaagacatgcagcaactgtgggtttaccatcaccagcgccgactacgacagggtgctggagaagctgaagaagacagcaacaggctggatgaccacaattaacggcaaggagctgaaggtggagggccagattacctactacaacagatacaagagacagaacgtagtcaaggacctgtccgtcgagctggatagactgagcgaagaatctgtgaacaacgacatctcctcctggacaaagggcagaagcggagaagctctgagcctcctgaagaaaagattctcccatagacccgtgcaggagaagttcgtgtgcctgaactgcggcttcgagacacacgcagccgagcaagccgccctgaacatcgccagatcctggctgttcctgcggagccaggagtacaagaaataccagacaaacaagacaaccggcaacaccgataagagagccttcgtcgagacctggcagtccttttaccggaagaagcttaaggaggtgtggaaacctgccgtgcggtctggcggatctggcggaggctccacaagcagccagagcctggtggagttcggcgacgtggccatcgacttcagccaggaggagtgggagtggctgaaccccgcccagaggaccctgtacaggaaggtgatgctggagaactacaggaacctggccagcctgggcctgtgcggcagcaagcccgccgtgatcagcagcctggagcagggcaaggagccctgggccgtgaagaggaaggtggccaggggctggagccccgacctgaagaccgtgaccagccccaagaaaaagagaaaagtctaagctgccttctgcggggcttgccttctggccatgcccttcttctctcccttgcacctgtacctcttggtctttgaataaagcctgagtaggaaggctagcaaaaaaaaaaaaaaaaaaaaaaaaaaaaaaaaaaaaaaaaaaaaaaaaaaaaaaaaaaaaaaaaaaaaaaaaaaaaaaaa

SEQ ID NO: 2999 - RNA, 5419 nt, synthetic construct
  source 1..5419: mol_type = other RNA
aggaaataagagagaaaagaagagtaagaagaaatataagagccaccatggcccctaagaagaagcgtaaagtgagccgggtgaacggcagcggcagcggcggcggcatgaaccacgaccaggagttcgacccccctaaggtgtaccctcccgtccccgccgagaagagaaagcccatccgggtcctgagcctgttcgatggcatcgccaccggtctgctggtgctgaaggacctgggcatccaggtggataggtacattgcctccgaggtgtgcgaggactccatcaccgtgggaatggtgcgtcatcagggcaagatcatgtacgtgggcgacgtgcggagcgtgacacagaagcatatccaggagtggggccctttcgacctggtgatcggcggcagcccttgcaatgacctgagcatcgtgaacccagcccggaagggcctgtacgagggaaccggcagactgttcttcgagttttacagactgctgcacgacgcccggcctaaggaaggcgacgaccggcccttcttttggctgttcgagaatgtggtggccatgggagtcagcgacaagcgggatattagccggttcctggagagcaaccccgtgatgatcgatgccaaggaagtgagcgccgcccaccgggccagatacttctggggcaatctgcctggcatgaacagacccctggccagcaccgtgaacgacaagctggagctgcaggagtgcctggagcacggccggatcgccaagttcagcaaggtgagaaccatcaccacccgaagcaacagcatcaaacaaggcaaggaccagcactttcctgtgttcatgaacgagaaggaggacatcctgtggtgtaccgagatggagagagtgttcgggttcccagtccactacacagatgtcagcaacatgtctagactggccagacagagactgctgggaagaagctggtccgtccctgtgatcagacacctgttcgcccctctgaaggagtacttcgcctgcgtgagcagcggcaacagcaacgccaacagccggggccccagcttctctagcggcctggtgccactgtccctgagagggagccacatgggccccatggagatctacaaaaccgtgagcgcctggaagcggcagcctgtgcgcgtgctgagcctgtttcggaatatcgataaagtcctgaaaagcctgggattcctggagagcggctctggctccggcggtggcaccctgaagtacgtggaggatgtgacaaacgtggtcagacgggatgtggagaagtggggccccttcgatctggtgtacggcagcacccaacccctgggcagctcttgtgaccggtgccctggctggtacatgtttcagttccaccggatcctgcagtacgccctgccgagacaggagtcccagcggccattcttttggattttcatggacaacttgctgctgaccgaggatgaccaggaaactaccactcggttcctgcagaccgaagccgtgaccctgcaggacgtgagaggccgggactaccagaacgccatgcgggtgtggtccaacatccctggactgaaaagcaagcacgcacctctgacccctaaagaagaggagtacctgcaggcccaggtgcggagcagaagcaagctggacgcccctaaggtggatctgctggtgaagaattgcctcctgcccctgagagagtacttcaagtatttcagccagaatagtctgcccctgggcggcccaagcagcggcgcccctcctcccagcggcggcagcccagccggctccccaacctctaccgaggagggcacctctgagtccgccacccccgagagcggccctggcacctccaccgagcccagcgagggcagcgcacccggcagccctgccggcagccccacctccacagaggagggaaccagcaccgagcccagcgaaggcagcgccccaggcaccagcaccgagcctagtgagggcggctctggcggcggcagcgcccaggagattaaacggatcaacaagatcagaagaagacttgtgaaagacagcaacaccaagaaggccggcaagacaggccccatgaaaaccctgctggttagagtgatgacacccgatctgagagagcggctggaaaacctgagaaagaagcctgaaaatatcccccagcccatcagcaatacatctagagccaacctgaataagctgctgaccgattacaccgaaatgaagaaggcgatcctgcatgtgtactgggaagagttccagaaggaccctgtgggcctgatgagccgggtggcccagcctgccagcaagaagatcgatcagaacaagctgaaacctgagatggacgagaagggcaacctgaccaccgccggctttgcctgctctcagtgtggccagcccctgttcgtgtacaagctggagcaggtgtctgagaagggcaaggcttacaccaactacttcggacggtgcaatgtggccgagcacgaaaagctgatcctgctggcccagctgaagcccgagaaggatagcgacgaagccgtgacatatagcctgggaaagtttgggcagagggccctggatttctacagcattcatgtgaccaaggagtccacccaccccgtgaagcccctggcccagatcgccggaaacagatacgcctccggacctgtgggaaaggccctgagcgacgcatgtatgggcacaatcgcctccttcctgtctaagtaccaggacatcatcatcgaacaccagaaggtggtgaagggcaaccagaagagactggagagcctgcgggagctggccggcaaggaaaacctggaataccctagcgtgaccctgccacctcagcctcacaccaaggagggcgttgatgcctacaacgaagtgatcgcccgggtgcgaatgtgggtgaacctgaacctgtggcagaagctgaagctaagcagagatgatgccaagcctctgctgagactgaagggattcccttcctttcctctggtcgagagacaggccaacgaagtggactggtgggacatggtgtgtaacgtgaagaagctgatcaacgagaaaaaggaggatggcaaggtgttttggcagaatctggctggctacaagagacaggaagccctgagaccatacctgagcagcgaggaagatcggaagaagggaaagaaattcgctcggtaccagctgggcgacctgctgctgcacctggaaaagaagcacggcgaggactggggaaaggtgtacgacgaggcctgggagcggattgacaagaaagtggaaggcctgagcaagcacatcaagctggaagaggaacggagaagcgaggacgcccagagcaaggccgccctgaccgactggctgcgggctaaggccagcttcgtgatcgagggcctgaaggaggccgacaaggacgagttctgcagatgcgagctgaagctgcagaagtggtacggggacctgcggggaaagcccttcgccatcgaagccgagaacagcatcctggacatcagcggcttcagcaagcagtacaactgtgccttcatctggcagaaggacggcgtgaagaagctgaacctgtacctgatcatcaactacttcaagggcggcaagctgcggttcaagaagatcaaacctgaagccttcgaagccaacagattctacaccgtgatcaacaaaaagagcggcgagatcgtgcccatggaggtgaacttcaacttcgacgaccccaacctgatcatcctgcctctggcctttggcaagagacagggcagagaattcatctggaacgacctgctgtccctggaaaccggcagcctgaagctggccaacggaagagtgatcgagaagacactgtacaacagaagaacccggcaggatgagcctgccctgttcgtggccctgaccttcgagcggcgggaggtcctggactcctccaatatcaaaccaatgaacctgatcggcgtggcaagaggcgaaaacatccccgccgtgatcgccctgaccgaccccgagggctgcccactgagccggtttaaggatagcctgggaaacccaacccacatcctgagaatcggcgagagctataaggagaagcagcggaccatccaggccaagaaggaggtggagcagcggagagccggcggctacagccggaagtacgccagcaaagccaagaatctggcagacgatatggtgagaaacaccgctagagatctgctgtactacgccgtgacccaggatgccatgctgatcttcgccaacctgagccggggcttcggccggcagggcaagcggaccttcatggccgagagacagtacacacggatggaggactggctgaccgccaagctggcctacgagggcctgagcaagacctacctgtccaagacactggcccagtacacctccaagacatgcagcaactgtgggtttaccatcaccagcgccgactacgacagggtgctggagaagctgaagaagacagcaacaggctggatgaccacaattaacggcaaggagctgaaggtggagggccagattacctactacaacagatacaagagacagaacgtagtcaaggacctgtccgtcgagctggatagactgagcgaagaatctgtgaacaacgacatctcctcctggacaaagggcagaagcggagaagctctgagcctcctgaagaaaagattctcccatagacccgtgcaggagaagttcgtgtgcctgaactgcggcttcgagacacacgcagccgagcaagccgccctgaacatcgccagatcctggctgttcctgcggagccaggagtacaagaaataccagacaaacaagacaaccggcaacaccgataagagagccttcgtcgagacctggcagtccttttaccggaagaagcttaaggaggtgtggaaacctgccgtgcggtctggcggatctggcggaggctccacaagcctggcccccgaggaccacggcagcagctacgagggcagcgtgagcttcagggacgtggccatcgacttcagcagggaggagtggaggcacctggaccccagccagaggaacctgtacagggacgtgatgctggagacctacagccacctgctgagcgtgggctaccaggtgcccgaggccgaggtggtgatgctggagcagggcaaggagccctgggccctgcagggcgagaggcccaggcagaccagccccaagaaaaagagaaaagtctaagctgccttctgcggggcttgccttctggccatgcccttcttctctcccttgcacctgtacctcttggtctttgaataaagcctgagtaggaaggctagcaaaaaaaaaaaaaaaaaaaaaaaaaaaaaaaaaaaaaaaaaaaaaaaaaaaaaaaaaaaaaaaaaaaaaaaaaaaaaaaa

SEQ ID NO: 3000 - RNA, 5419 nt, synthetic construct
  source 1..5419: mol_type = other RNA
aggaaataagagagaaaagaagagtaagaagaaatataagagccaccatggcccctaagaagaagcgtaaagtgagccgggtgaacggcagcggcagcggcggcggcatgaaccacgaccaggagttcgacccccctaaggtgtaccctcccgtccccgccgagaagagaaagcccatccgggtcctgagcctgttcgatggcatcgccaccggtctgctggtgctgaaggacctgggcatccaggtggataggtacattgcctccgaggtgtgcgaggactccatcaccgtgggaatggtgcgtcatcagggcaagatcatgtacgtgggcgacgtgcggagcgtgacacagaagcatatccaggagtggggccctttcgacctggtgatcggcggcagcccttgcaatgacctgagcatcgtgaacccagcccggaagggcctgtacgagggaaccggcagactgttcttcgagttttacagactgctgcacgacgcccggcctaaggaaggcgacgaccggcccttcttttggctgttcgagaatgtggtggccatgggagtcagcgacaagcgggatattagccggttcctggagagcaaccccgtgatgatcgatgccaaggaagtgagcgccgcccaccgggccagatacttctggggcaatctgcctggcatgaacagacccctggccagcaccgtgaacgacaagctggagctgcaggagtgcctggagcacggccggatcgccaagttcagcaaggtgagaaccatcaccacccgaagcaacagcatcaaacaaggcaaggaccagcactttcctgtgttcatgaacgagaaggaggacatcctgtggtgtaccgagatggagagagtgttcgggttcccagtccactacacagatgtcagcaacatgtctagactggccagacagagactgctgggaagaagctggtccgtccctgtgatcagacacctgttcgcccctctgaaggagtacttcgcctgcgtgagcagcggcaacagcaacgccaacagccggggccccagcttctctagcggcctggtgccactgtccctgagagggagccacatgggccccatggagatctacaaaaccgtgagcgcctggaagcggcagcctgtgcgcgtgctgagcctgtttcggaatatcgataaagtcctgaaaagcctgggattcctggagagcggctctggctccggcggtggcaccctgaagtacgtggaggatgtgacaaacgtggtcagacgggatgtggagaagtggggccccttcgatctggtgtacggcagcacccaacccctgggcagctcttgtgaccggtgccctggctggtacatgtttcagttccaccggatcctgcagtacgccctgccgagacaggagtcccagcggccattcttttggattttcatggacaacttgctgctgaccgaggatgaccaggaaactaccactcggttcctgcagaccgaagccgtgaccctgcaggacgtgagaggccgggactaccagaacgccatgcgggtgtggtccaacatccctggactgaaaagcaagcacgcacctctgacccctaaagaagaggagtacctgcaggcccaggtgcggagcagaagcaagctggacgcccctaaggtggatctgctggtgaagaattgcctcctgcccctgagagagtacttcaagtatttcagccagaatagtctgcccctgggcggcccaagcagcggcgcccctcctcccagcggcggcagcccagccggctccccaacctctaccgaggagggcacctctgagtccgccacccccgagagcggccctggcacctccaccgagcccagcgagggcagcgcacccggcagccctgccggcagccccacctccacagaggagggaaccagcaccgagcccagcgaaggcagcgccccaggcaccagcaccgagcctagtgagggcggctctggcggcggcagcgcccaggagattaaacggatcaacaagatcagaagaagacttgtgaaagacagcaacaccaagaaggccggcaagacaggccccatgaaaaccctgctggttagagtgatgacacccgatctgagagagcggctggaaaacctgagaaagaagcctgaaaatatcccccagcccatcagcaatacatctagagccaacctgaataagctgctgaccgattacaccgaaatgaagaaggcgatcctgcatgtgtactgggaagagttccagaaggaccctgtgggcctgatgagccgggtggcccagcctgccagcaagaagatcgatcagaacaagctgaaacctgagatggacgagaagggcaacctgaccaccgccggctttgcctgctctcagtgtggccagcccctgttcgtgtacaagctggagcaggtgtctgagaagggcaaggcttacaccaactacttcggacggtgcaatgtggccgagcacgaaaagctgatcctgctggcccagctgaagcccgagaaggatagcgacgaagccgtgacatatagcctgggaaagtttgggcagagggccctggatttctacagcattcatgtgaccaaggagtccacccaccccgtgaagcccctggcccagatcgccggaaacagatacgcctccggacctgtgggaaaggccctgagcgacgcatgtatgggcacaatcgcctccttcctgtctaagtaccaggacatcatcatcgaacaccagaaggtggtgaagggcaaccagaagagactggagagcctgcgggagctggccggcaaggaaaacctggaataccctagcgtgaccctgccacctcagcctcacaccaaggagggcgttgatgcctacaacgaagtgatcgcccgggtgcgaatgtgggtgaacctgaacctgtggcagaagctgaagctaagcagagatgatgccaagcctctgctgagactgaagggattcccttcctttcctctggtcgagagacaggccaacgaagtggactggtgggacatggtgtgtaacgtgaagaagctgatcaacgagaaaaaggaggatggcaaggtgttttggcagaatctggctggctacaagagacaggaagccctgagaccatacctgagcagcgaggaagatcggaagaagggaaagaaattcgctcggtaccagctgggcgacctgctgctgcacctggaaaagaagcacggcgaggactggggaaaggtgtacgacgaggcctgggagcggattgacaagaaagtggaaggcctgagcaagcacatcaagctggaagaggaacggagaagcgaggacgcccagagcaaggccgccctgaccgactggctgcgggctaaggccagcttcgtgatcgagggcctgaaggaggccgacaaggacgagttctgcagatgcgagctgaagctgcagaagtggtacggggacctgcggggaaagcccttcgccatcgaagccgagaacagcatcctggacatcagcggcttcagcaagcagtacaactgtgccttcatctggcagaaggacggcgtgaagaagctgaacctgtacctgatcatcaactacttcaagggcggcaagctgcggttcaagaagatcaaacctgaagccttcgaagccaacagattctacaccgtgatcaacaaaaagagcggcgagatcgtgcccatggaggtgaacttcaacttcgacgaccccaacctgatcatcctgcctctggcctttggcaagagacagggcagagaattcatctggaacgacctgctgtccctggaaaccggcagcctgaagctggccaacggaagagtgatcgagaagacactgtacaacagaagaacccggcaggatgagcctgccctgttcgtggccctgaccttcgagcggcgggaggtcctggactcctccaatatcaaaccaatgaacctgatcggcgtggcaagaggcgaaaacatccccgccgtgatcgccctgaccgaccccgagggctgcccactgagccggtttaaggatagcctgggaaacccaacccacatcctgagaatcggcgagagctataaggagaagcagcggaccatccaggccaagaaggaggtggagcagcggagagccggcggctacagccggaagtacgccagcaaagccaagaatctggcagacgatatggtgagaaacaccgctagagatctgctgtactacgccgtgacccaggatgccatgctgatcttcgccaacctgagccggggcttcggccggcagggcaagcggaccttcatggccgagagacagtacacacggatggaggactggctgaccgccaagctggcctacgagggcctgagcaagacctacctgtccaagacactggcccagtacacctccaagacatgcagcaactgtgggtttaccatcaccagcgccgactacgacagggtgctggagaagctgaagaagacagcaacaggctggatgaccacaattaacggcaaggagctgaaggtggagggccagattacctactacaacagatacaagagacagaacgtagtcaaggacctgtccgtcgagctggatagactgagcgaagaatctgtgaacaacgacatctcctcctggacaaagggcagaagcggagaagctctgagcctcctgaagaaaagattctcccatagacccgtgcaggagaagttcgtgtgcctgaactgcggcttcgagacacacgcagccgagcaagccgccctgaacatcgccagatcctggctgttcctgcggagccaggagtacaagaaataccagacaaacaagacaaccggcaacaccgataagagagccttcgtcgagacctggcagtccttttaccggaagaagcttaaggaggtgtggaaacctgccgtgcggtctggcggatctggcggaggctccacaagcatggagggcctggtgatgttccaggacctgttcatcgacttcagccaggaggagtgggagtgcctggacgccgcccagaaggacctgtacagggacgtgatgatggagaactacagcagcctggtgagcctgggcctgtgcatccccaagcccgacgtgatcagcctgctggagcagggcaaggagccctggatggtgagcagggacgtgctgggcggctggtgccccgacaggctgaagaagaccagccccaagaaaaagagaaaagtctaagctgccttctgcggggcttgccttctggccatgcccttcttctctcccttgcacctgtacctcttggtctttgaataaagcctgagtaggaaggctagcaaaaaaaaaaaaaaaaaaaaaaaaaaaaaaaaaaaaaaaaaaaaaaaaaaaaaaaaaaaaaaaaaaaaaaaaaaaaaaaa

SEQ ID NO: 3001 - RNA, 5419 nt, synthetic construct
  source 1..5419: mol_type = other RNA
aggaaataagagagaaaagaagagtaagaagaaatataagagccaccatggcccctaagaagaagcgtaaagtgagccgggtgaacggcagcggcagcggcggcggcatgaaccacgaccaggagttcgacccccctaaggtgtaccctcccgtccccgccgagaagagaaagcccatccgggtcctgagcctgttcgatggcatcgccaccggtctgctggtgctgaaggacctgggcatccaggtggataggtacattgcctccgaggtgtgcgaggactccatcaccgtgggaatggtgcgtcatcagggcaagatcatgtacgtgggcgacgtgcggagcgtgacacagaagcatatccaggagtggggccctttcgacctggtgatcggcggcagcccttgcaatgacctgagcatcgtgaacccagcccggaagggcctgtacgagggaaccggcagactgttcttcgagttttacagactgctgcacgacgcccggcctaaggaaggcgacgaccggcccttcttttggctgttcgagaatgtggtggccatgggagtcagcgacaagcgggatattagccggttcctggagagcaaccccgtgatgatcgatgccaaggaagtgagcgccgcccaccgggccagatacttctggggcaatctgcctggcatgaacagacccctggccagcaccgtgaacgacaagctggagctgcaggagtgcctggagcacggccggatcgccaagttcagcaaggtgagaaccatcaccacccgaagcaacagcatcaaacaaggcaaggaccagcactttcctgtgttcatgaacgagaaggaggacatcctgtggtgtaccgagatggagagagtgttcgggttcccagtccactacacagatgtcagcaacatgtctagactggccagacagagactgctgggaagaagctggtccgtccctgtgatcagacacctgttcgcccctctgaaggagtacttcgcctgcgtgagcagcggcaacagcaacgccaacagccggggccccagcttctctagcggcctggtgccactgtccctgagagggagccacatgggccccatggagatctacaaaaccgtgagcgcctggaagcggcagcctgtgcgcgtgctgagcctgtttcggaatatcgataaagtcctgaaaagcctgggattcctggagagcggctctggctccggcggtggcaccctgaagtacgtggaggatgtgacaaacgtggtcagacgggatgtggagaagtggggccccttcgatctggtgtacggcagcacccaacccctgggcagctcttgtgaccggtgccctggctggtacatgtttcagttccaccggatcctgcagtacgccctgccgagacaggagtcccagcggccattcttttggattttcatggacaacttgctgctgaccgaggatgaccaggaaactaccactcggttcctgcagaccgaagccgtgaccctgcaggacgtgagaggccgggactaccagaacgccatgcgggtgtggtccaacatccctggactgaaaagcaagcacgcacctctgacccctaaagaagaggagtacctgcaggcccaggtgcggagcagaagcaagctggacgcccctaaggtggatctgctggtgaagaattgcctcctgcccctgagagagtacttcaagtatttcagccagaatagtctgcccctgggcggcccaagcagcggcgcccctcctcccagcggcggcagcccagccggctccccaacctctaccgaggagggcacctctgagtccgccacccccgagagcggccctggcacctccaccgagcccagcgagggcagcgcacccggcagccctgccggcagccccacctccacagaggagggaaccagcaccgagcccagcgaaggcagcgccccaggcaccagcaccgagcctagtgagggcggctctggcggcggcagcgcccaggagattaaacggatcaacaagatcagaagaagacttgtgaaagacagcaacaccaagaaggccggcaagacaggccccatgaaaaccctgctggttagagtgatgacacccgatctgagagagcggctggaaaacctgagaaagaagcctgaaaatatcccccagcccatcagcaatacatctagagccaacctgaataagctgctgaccgattacaccgaaatgaagaaggcgatcctgcatgtgtactgggaagagttccagaaggaccctgtgggcctgatgagccgggtggcccagcctgccagcaagaagatcgatcagaacaagctgaaacctgagatggacgagaagggcaacctgaccaccgccggctttgcctgctctcagtgtggccagcccctgttcgtgtacaagctggagcaggtgtctgagaagggcaaggcttacaccaactacttcggacggtgcaatgtggccgagcacgaaaagctgatcctgctggcccagctgaagcccgagaaggatagcgacgaagccgtgacatatagcctgggaaagtttgggcagagggccctggatttctacagcattcatgtgaccaaggagtccacccaccccgtgaagcccctggcccagatcgccggaaacagatacgcctccggacctgtgggaaaggccctgagcgacgcatgtatgggcacaatcgcctccttcctgtctaagtaccaggacatcatcatcgaacaccagaaggtggtgaagggcaaccagaagagactggagagcctgcgggagctggccggcaaggaaaacctggaataccctagcgtgaccctgccacctcagcctcacaccaaggagggcgttgatgcctacaacgaagtgatcgcccgggtgcgaatgtgggtgaacctgaacctgtggcagaagctgaagctaagcagagatgatgccaagcctctgctgagactgaagggattcccttcctttcctctggtcgagagacaggccaacgaagtggactggtgggacatggtgtgtaacgtgaagaagctgatcaacgagaaaaaggaggatggcaaggtgttttggcagaatctggctggctacaagagacaggaagccctgagaccatacctgagcagcgaggaagatcggaagaagggaaagaaattcgctcggtaccagctgggcgacctgctgctgcacctggaaaagaagcacggcgaggactggggaaaggtgtacgacgaggcctgggagcggattgacaagaaagtggaaggcctgagcaagcacatcaagctggaagaggaacggagaagcgaggacgcccagagcaaggccgccctgaccgactggctgcgggctaaggccagcttcgtgatcgagggcctgaaggaggccgacaaggacgagttctgcagatgcgagctgaagctgcagaagtggtacggggacctgcggggaaagcccttcgccatcgaagccgagaacagcatcctggacatcagcggcttcagcaagcagtacaactgtgccttcatctggcagaaggacggcgtgaagaagctgaacctgtacctgatcatcaactacttcaagggcggcaagctgcggttcaagaagatcaaacctgaagccttcgaagccaacagattctacaccgtgatcaacaaaaagagcggcgagatcgtgcccatggaggtgaacttcaacttcgacgaccccaacctgatcatcctgcctctggcctttggcaagagacagggcagagaattcatctggaacgacctgctgtccctggaaaccggcagcctgaagctggccaacggaagagtgatcgagaagacactgtacaacagaagaacccggcaggatgagcctgccctgttcgtggccctgaccttcgagcggcgggaggtcctggactcctccaatatcaaaccaatgaacctgatcggcgtggcaagaggcgaaaacatccccgccgtgatcgccctgaccgaccccgagggctgcccactgagccggtttaaggatagcctgggaaacccaacccacatcctgagaatcggcgagagctataaggagaagcagcggaccatccaggccaagaaggaggtggagcagcggagagccggcggctacagccggaagtacgccagcaaagccaagaatctggcagacgatatggtgagaaacaccgctagagatctgctgtactacgccgtgacccaggatgccatgctgatcttcgccaacctgagccggggcttcggccggcagggcaagcggaccttcatggccgagagacagtacacacggatggaggactggctgaccgccaagctggcctacgagggcctgagcaagacctacctgtccaagacactggcccagtacacctccaagacatgcagcaactgtgggtttaccatcaccagcgccgactacgacagggtgctggagaagctgaagaagacagcaacaggctggatgaccacaattaacggcaaggagctgaaggtggagggccagattacctactacaacagatacaagagacagaacgtagtcaaggacctgtccgtcgagctggatagactgagcgaagaatctgtgaacaacgacatctcctcctggacaaagggcagaagcggagaagctctgagcctcctgaagaaaagattctcccatagacccgtgcaggagaagttcgtgtgcctgaactgcggcttcgagacacacgcagccgagcaagccgccctgaacatcgccagatcctggctgttcctgcggagccaggagtacaagaaataccagacaaacaagacaaccggcaacaccgataagagagccttcgtcgagacctggcagtccttttaccggaagaagcttaaggaggtgtggaaacctgccgtgcggtctggcggatctggcggaggctccacaagcccccaggccagcgtgagcttcaaggacgtgaccgtggagttcacccaggaggagtggtggcagatggacagcgcccagaggaccctgtacagggacgtgatgctggagaactacagccacctggtgagcgtgggctactgcttcaccaagcccgagctgatcttcatgctggagcagggcgaggacccctggctgctggagaaggagttcgtgaacaggagcagccccgaggagagccagcccaccagccccaagaaaaagagaaaagtctaagctgccttctgcggggcttgccttctggccatgcccttcttctctcccttgcacctgtacctcttggtctttgaataaagcctgagtaggaaggctagcaaaaaaaaaaaaaaaaaaaaaaaaaaaaaaaaaaaaaaaaaaaaaaaaaaaaaaaaaaaaaaaaaaaaaaaaaaaaaaaa

SEQ ID NO: 3002 - RNA, 5419 nt, synthetic construct
  source 1..5419: mol_type = other RNA
aggaaataagagagaaaagaagagtaagaagaaatataagagccaccatggcccctaagaagaagcgtaaagtgagccgggtgaacggcagcggcagcggcggcggcatgaaccacgaccaggagttcgacccccctaaggtgtaccctcccgtccccgccgagaagagaaagcccatccgggtcctgagcctgttcgatggcatcgccaccggtctgctggtgctgaaggacctgggcatccaggtggataggtacattgcctccgaggtgtgcgaggactccatcaccgtgggaatggtgcgtcatcagggcaagatcatgtacgtgggcgacgtgcggagcgtgacacagaagcatatccaggagtggggccctttcgacctggtgatcggcggcagcccttgcaatgacctgagcatcgtgaacccagcccggaagggcctgtacgagggaaccggcagactgttcttcgagttttacagactgctgcacgacgcccggcctaaggaaggcgacgaccggcccttcttttggctgttcgagaatgtggtggccatgggagtcagcgacaagcgggatattagccggttcctggagagcaaccccgtgatgatcgatgccaaggaagtgagcgccgcccaccgggccagatacttctggggcaatctgcctggcatgaacagacccctggccagcaccgtgaacgacaagctggagctgcaggagtgcctggagcacggccggatcgccaagttcagcaaggtgagaaccatcaccacccgaagcaacagcatcaaacaaggcaaggaccagcactttcctgtgttcatgaacgagaaggaggacatcctgtggtgtaccgagatggagagagtgttcgggttcccagtccactacacagatgtcagcaacatgtctagactggccagacagagactgctgggaagaagctggtccgtccctgtgatcagacacctgttcgcccctctgaaggagtacttcgcctgcgtgagcagcggcaacagcaacgccaacagccggggccccagcttctctagcggcctggtgccactgtccctgagagggagccacatgggccccatggagatctacaaaaccgtgagcgcctggaagcggcagcctgtgcgcgtgctgagcctgtttcggaatatcgataaagtcctgaaaagcctgggattcctggagagcggctctggctccggcggtggcaccctgaagtacgtggaggatgtgacaaacgtggtcagacgggatgtggagaagtggggccccttcgatctggtgtacggcagcacccaacccctgggcagctcttgtgaccggtgccctggctggtacatgtttcagttccaccggatcctgcagtacgccctgccgagacaggagtcccagcggccattcttttggattttcatggacaacttgctgctgaccgaggatgaccaggaaactaccactcggttcctgcagaccgaagccgtgaccctgcaggacgtgagaggccgggactaccagaacgccatgcgggtgtggtccaacatccctggactgaaaagcaagcacgcacctctgacccctaaagaagaggagtacctgcaggcccaggtgcggagcagaagcaagctggacgcccctaaggtggatctgctggtgaagaattgcctcctgcccctgagagagtacttcaagtatttcagccagaatagtctgcccctgggcggcccaagcagcggcgcccctcctcccagcggcggcagcccagccggctccccaacctctaccgaggagggcacctctgagtccgccacccccgagagcggccctggcacctccaccgagcccagcgagggcagcgcacccggcagccctgccggcagccccacctccacagaggagggaaccagcaccgagcccagcgaaggcagcgccccaggcaccagcaccgagcctagtgagggcggctctggcggcggcagcgcccaggagattaaacggatcaacaagatcagaagaagacttgtgaaagacagcaacaccaagaaggccggcaagacaggccccatgaaaaccctgctggttagagtgatgacacccgatctgagagagcggctggaaaacctgagaaagaagcctgaaaatatcccccagcccatcagcaatacatctagagccaacctgaataagctgctgaccgattacaccgaaatgaagaaggcgatcctgcatgtgtactgggaagagttccagaaggaccctgtgggcctgatgagccgggtggcccagcctgccagcaagaagatcgatcagaacaagctgaaacctgagatggacgagaagggcaacctgaccaccgccggctttgcctgctctcagtgtggccagcccctgttcgtgtacaagctggagcaggtgtctgagaagggcaaggcttacaccaactacttcggacggtgcaatgtggccgagcacgaaaagctgatcctgctggcccagctgaagcccgagaaggatagcgacgaagccgtgacatatagcctgggaaagtttgggcagagggccctggatttctacagcattcatgtgaccaaggagtccacccaccccgtgaagcccctggcccagatcgccggaaacagatacgcctccggacctgtgggaaaggccctgagcgacgcatgtatgggcacaatcgcctccttcctgtctaagtaccaggacatcatcatcgaacaccagaaggtggtgaagggcaaccagaagagactggagagcctgcgggagctggccggcaaggaaaacctggaataccctagcgtgaccctgccacctcagcctcacaccaaggagggcgttgatgcctacaacgaagtgatcgcccgggtgcgaatgtgggtgaacctgaacctgtggcagaagctgaagctaagcagagatgatgccaagcctctgctgagactgaagggattcccttcctttcctctggtcgagagacaggccaacgaagtggactggtgggacatggtgtgtaacgtgaagaagctgatcaacgagaaaaaggaggatggcaaggtgttttggcagaatctggctggctacaagagacaggaagccctgagaccatacctgagcagcgaggaagatcggaagaagggaaagaaattcgctcggtaccagctgggcgacctgctgctgcacctggaaaagaagcacggcgaggactggggaaaggtgtacgacgaggcctgggagcggattgacaagaaagtggaaggcctgagcaagcacatcaagctggaagaggaacggagaagcgaggacgcccagagcaaggccgccctgaccgactggctgcgggctaaggccagcttcgtgatcgagggcctgaaggaggccgacaaggacgagttctgcagatgcgagctgaagctgcagaagtggtacggggacctgcggggaaagcccttcgccatcgaagccgagaacagcatcctggacatcagcggcttcagcaagcagtacaactgtgccttcatctggcagaaggacggcgtgaagaagctgaacctgtacctgatcatcaactacttcaagggcggcaagctgcggttcaagaagatcaaacctgaagccttcgaagccaacagattctacaccgtgatcaacaaaaagagcggcgagatcgtgcccatggaggtgaacttcaacttcgacgaccccaacctgatcatcctgcctctggcctttggcaagagacagggcagagaattcatctggaacgacctgctgtccctggaaaccggcagcctgaagctggccaacggaagagtgatcgagaagacactgtacaacagaagaacccggcaggatgagcctgccctgttcgtggccctgaccttcgagcggcgggaggtcctggactcctccaatatcaaaccaatgaacctgatcggcgtggcaagaggcgaaaacatccccgccgtgatcgccctgaccgaccccgagggctgcccactgagccggtttaaggatagcctgggaaacccaacccacatcctgagaatcggcgagagctataaggagaagcagcggaccatccaggccaagaaggaggtggagcagcggagagccggcggctacagccggaagtacgccagcaaagccaagaatctggcagacgatatggtgagaaacaccgctagagatctgctgtactacgccgtgacccaggatgccatgctgatcttcgccaacctgagccggggcttcggccggcagggcaagcggaccttcatggccgagagacagtacacacggatggaggactggctgaccgccaagctggcctacgagggcctgagcaagacctacctgtccaagacactggcccagtacacctccaagacatgcagcaactgtgggtttaccatcaccagcgccgactacgacagggtgctggagaagctgaagaagacagcaacaggctggatgaccacaattaacggcaaggagctgaaggtggagggccagattacctactacaacagatacaagagacagaacgtagtcaaggacctgtccgtcgagctggatagactgagcgaagaatctgtgaacaacgacatctcctcctggacaaagggcagaagcggagaagctctgagcctcctgaagaaaagattctcccatagacccgtgcaggagaagttcgtgtgcctgaactgcggcttcgagacacacgcagccgagcaagccgccctgaacatcgccagatcctggctgttcctgcggagccaggagtacaagaaataccagacaaacaagacaaccggcaacaccgataagagagccttcgtcgagacctggcagtccttttaccggaagaagcttaaggaggtgtggaaacctgccgtgcggtctggcggatctggcggaggctccacaagcttccaggagctggtgaccttcagggacgtggccatcgacttcagcaggcaggagtgggagtacctggacagcgtgcagagggacctgtacagggacgtgatgctggagaactacaggaacctggtgagcctgggccacagcatcagcaagcccgacgtggtggacctgctggagcagggcaaggagccctggatgatcctgagggaggagacccagaggcagtacaccgacctggacctgcacaccagccccaagaaaaagagaaaagtctaagctgccttctgcggggcttgccttctggccatgcccttcttctctcccttgcacctgtacctcttggtctttgaataaagcctgagtaggaaggctagcaaaaaaaaaaaaaaaaaaaaaaaaaaaaaaaaaaaaaaaaaaaaaaaaaaaaaaaaaaaaaaaaaaaaaaaaaaaaaaaa

SEQ ID NO: 3003 - RNA, 5419 nt, synthetic construct
  source 1..5419: mol_type = other RNA
aggaaataagagagaaaagaagagtaagaagaaatataagagccaccatggcccctaagaagaagcgtaaagtgagccgggtgaacggcagcggcagcggcggcggcatgaaccacgaccaggagttcgacccccctaaggtgtaccctcccgtccccgccgagaagagaaagcccatccgggtcctgagcctgttcgatggcatcgccaccggtctgctggtgctgaaggacctgggcatccaggtggataggtacattgcctccgaggtgtgcgaggactccatcaccgtgggaatggtgcgtcatcagggcaagatcatgtacgtgggcgacgtgcggagcgtgacacagaagcatatccaggagtggggccctttcgacctggtgatcggcggcagcccttgcaatgacctgagcatcgtgaacccagcccggaagggcctgtacgagggaaccggcagactgttcttcgagttttacagactgctgcacgacgcccggcctaaggaaggcgacgaccggcccttcttttggctgttcgagaatgtggtggccatgggagtcagcgacaagcgggatattagccggttcctggagagcaaccccgtgatgatcgatgccaaggaagtgagcgccgcccaccgggccagatacttctggggcaatctgcctggcatgaacagacccctggccagcaccgtgaacgacaagctggagctgcaggagtgcctggagcacggccggatcgccaagttcagcaaggtgagaaccatcaccacccgaagcaacagcatcaaacaaggcaaggaccagcactttcctgtgttcatgaacgagaaggaggacatcctgtggtgtaccgagatggagagagtgttcgggttcccagtccactacacagatgtcagcaacatgtctagactggccagacagagactgctgggaagaagctggtccgtccctgtgatcagacacctgttcgcccctctgaaggagtacttcgcctgcgtgagcagcggcaacagcaacgccaacagccggggccccagcttctctagcggcctggtgccactgtccctgagagggagccacatgggccccatggagatctacaaaaccgtgagcgcctggaagcggcagcctgtgcgcgtgctgagcctgtttcggaatatcgataaagtcctgaaaagcctgggattcctggagagcggctctggctccggcggtggcaccctgaagtacgtggaggatgtgacaaacgtggtcagacgggatgtggagaagtggggccccttcgatctggtgtacggcagcacccaacccctgggcagctcttgtgaccggtgccctggctggtacatgtttcagttccaccggatcctgcagtacgccctgccgagacaggagtcccagcggccattcttttggattttcatggacaacttgctgctgaccgaggatgaccaggaaactaccactcggttcctgcagaccgaagccgtgaccctgcaggacgtgagaggccgggactaccagaacgccatgcgggtgtggtccaacatccctggactgaaaagcaagcacgcacctctgacccctaaagaagaggagtacctgcaggcccaggtgcggagcagaagcaagctggacgcccctaaggtggatctgctggtgaagaattgcctcctgcccctgagagagtacttcaagtatttcagccagaatagtctgcccctgggcggcccaagcagcggcgcccctcctcccagcggcggcagcccagccggctccccaacctctaccgaggagggcacctctgagtccgccacccccgagagcggccctggcacctccaccgagcccagcgagggcagcgcacccggcagccctgccggcagccccacctccacagaggagggaaccagcaccgagcccagcgaaggcagcgccccaggcaccagcaccgagcctagtgagggcggctctggcggcggcagcgcccaggagattaaacggatcaacaagatcagaagaagacttgtgaaagacagcaacaccaagaaggccggcaagacaggccccatgaaaaccctgctggttagagtgatgacacccgatctgagagagcggctggaaaacctgagaaagaagcctgaaaatatcccccagcccatcagcaatacatctagagccaacctgaataagctgctgaccgattacaccgaaatgaagaaggcgatcctgcatgtgtactgggaagagttccagaaggaccctgtgggcctgatgagccgggtggcccagcctgccagcaagaagatcgatcagaacaagctgaaacctgagatggacgagaagggcaacctgaccaccgccggctttgcctgctctcagtgtggccagcccctgttcgtgtacaagctggagcaggtgtctgagaagggcaaggcttacaccaactacttcggacggtgcaatgtggccgagcacgaaaagctgatcctgctggcccagctgaagcccgagaaggatagcgacgaagccgtgacatatagcctgggaaagtttgggcagagggccctggatttctacagcattcatgtgaccaaggagtccacccaccccgtgaagcccctggcccagatcgccggaaacagatacgcctccggacctgtgggaaaggccctgagcgacgcatgtatgggcacaatcgcctccttcctgtctaagtaccaggacatcatcatcgaacaccagaaggtggtgaagggcaaccagaagagactggagagcctgcgggagctggccggcaaggaaaacctggaataccctagcgtgaccctgccacctcagcctcacaccaaggagggcgttgatgcctacaacgaagtgatcgcccgggtgcgaatgtgggtgaacctgaacctgtggcagaagctgaagctaagcagagatgatgccaagcctctgctgagactgaagggattcccttcctttcctctggtcgagagacaggccaacgaagtggactggtgggacatggtgtgtaacgtgaagaagctgatcaacgagaaaaaggaggatggcaaggtgttttggcagaatctggctggctacaagagacaggaagccctgagaccatacctgagcagcgaggaagatcggaagaagggaaagaaattcgctcggtaccagctgggcgacctgctgctgcacctggaaaagaagcacggcgaggactggggaaaggtgtacgacgaggcctgggagcggattgacaagaaagtggaaggcctgagcaagcacatcaagctggaagaggaacggagaagcgaggacgcccagagcaaggccgccctgaccgactggctgcgggctaaggccagcttcgtgatcgagggcctgaaggaggccgacaaggacgagttctgcagatgcgagctgaagctgcagaagtggtacggggacctgcggggaaagcccttcgccatcgaagccgagaacagcatcctggacatcagcggcttcagcaagcagtacaactgtgccttcatctggcagaaggacggcgtgaagaagctgaacctgtacctgatcatcaactacttcaagggcggcaagctgcggttcaagaagatcaaacctgaagccttcgaagccaacagattctacaccgtgatcaacaaaaagagcggcgagatcgtgcccatggaggtgaacttcaacttcgacgaccccaacctgatcatcctgcctctggcctttggcaagagacagggcagagaattcatctggaacgacctgctgtccctggaaaccggcagcctgaagctggccaacggaagagtgatcgagaagacactgtacaacagaagaacccggcaggatgagcctgccctgttcgtggccctgaccttcgagcggcgggaggtcctggactcctccaatatcaaaccaatgaacctgatcggcgtggcaagaggcgaaaacatccccgccgtgatcgccctgaccgaccccgagggctgcccactgagccggtttaaggatagcctgggaaacccaacccacatcctgagaatcggcgagagctataaggagaagcagcggaccatccaggccaagaaggaggtggagcagcggagagccggcggctacagccggaagtacgccagcaaagccaagaatctggcagacgatatggtgagaaacaccgctagagatctgctgtactacgccgtgacccaggatgccatgctgatcttcgccaacctgagccggggcttcggccggcagggcaagcggaccttcatggccgagagacagtacacacggatggaggactggctgaccgccaagctggcctacgagggcctgagcaagacctacctgtccaagacactggcccagtacacctccaagacatgcagcaactgtgggtttaccatcaccagcgccgactacgacagggtgctggagaagctgaagaagacagcaacaggctggatgaccacaattaacggcaaggagctgaaggtggagggccagattacctactacaacagatacaagagacagaacgtagtcaaggacctgtccgtcgagctggatagactgagcgaagaatctgtgaacaacgacatctcctcctggacaaagggcagaagcggagaagctctgagcctcctgaagaaaagattctcccatagacccgtgcaggagaagttcgtgtgcctgaactgcggcttcgagacacacgcagccgagcaagccgccctgaacatcgccagatcctggctgttcctgcggagccaggagtacaagaaataccagacaaacaagacaaccggcaacaccgataagagagccttcgtcgagacctggcagtccttttaccggaagaagcttaaggaggtgtggaaacctgccgtgcggtctggcggatctggcggaggctccacaagcacccagaggagcatcagcttcaaggacctggccgtggacttcaccagggaggagtggcagaggctgggccccgcccagaggctgctgtacagggacgtgatgctggagaactacagcaacctgatcgccgtgggcctgcacgtgagcaagcccgacgtgatcctgaagctggagcagggcaaggagccctgggtggtggagaacagcagcaggcagaaccacgccgaggacgacgagcccctgaccagccccaagaaaaagagaaaagtctaagctgccttctgcggggcttgccttctggccatgcccttcttctctcccttgcacctgtacctcttggtctttgaataaagcctgagtaggaaggctagcaaaaaaaaaaaaaaaaaaaaaaaaaaaaaaaaaaaaaaaaaaaaaaaaaaaaaaaaaaaaaaaaaaaaaaaaaaaaaaaa

SEQ ID NO: 3004 - RNA, 5419 nt, synthetic construct
  source 1..5419: mol_type = other RNA
aggaaataagagagaaaagaagagtaagaagaaatataagagccaccatggcccctaagaagaagcgtaaagtgagccgggtgaacggcagcggcagcggcggcggcatgaaccacgaccaggagttcgacccccctaaggtgtaccctcccgtccccgccgagaagagaaagcccatccgggtcctgagcctgttcgatggcatcgccaccggtctgctggtgctgaaggacctgggcatccaggtggataggtacattgcctccgaggtgtgcgaggactccatcaccgtgggaatggtgcgtcatcagggcaagatcatgtacgtgggcgacgtgcggagcgtgacacagaagcatatccaggagtggggccctttcgacctggtgatcggcggcagcccttgcaatgacctgagcatcgtgaacccagcccggaagggcctgtacgagggaaccggcagactgttcttcgagttttacagactgctgcacgacgcccggcctaaggaaggcgacgaccggcccttcttttggctgttcgagaatgtggtggccatgggagtcagcgacaagcgggatattagccggttcctggagagcaaccccgtgatgatcgatgccaaggaagtgagcgccgcccaccgggccagatacttctggggcaatctgcctggcatgaacagacccctggccagcaccgtgaacgacaagctggagctgcaggagtgcctggagcacggccggatcgccaagttcagcaaggtgagaaccatcaccacccgaagcaacagcatcaaacaaggcaaggaccagcactttcctgtgttcatgaacgagaaggaggacatcctgtggtgtaccgagatggagagagtgttcgggttcccagtccactacacagatgtcagcaacatgtctagactggccagacagagactgctgggaagaagctggtccgtccctgtgatcagacacctgttcgcccctctgaaggagtacttcgcctgcgtgagcagcggcaacagcaacgccaacagccggggccccagcttctctagcggcctggtgccactgtccctgagagggagccacatgggccccatggagatctacaaaaccgtgagcgcctggaagcggcagcctgtgcgcgtgctgagcctgtttcggaatatcgataaagtcctgaaaagcctgggattcctggagagcggctctggctccggcggtggcaccctgaagtacgtggaggatgtgacaaacgtggtcagacgggatgtggagaagtggggccccttcgatctggtgtacggcagcacccaacccctgggcagctcttgtgaccggtgccctggctggtacatgtttcagttccaccggatcctgcagtacgccctgccgagacaggagtcccagcggccattcttttggattttcatggacaacttgctgctgaccgaggatgaccaggaaactaccactcggttcctgcagaccgaagccgtgaccctgcaggacgtgagaggccgggactaccagaacgccatgcgggtgtggtccaacatccctggactgaaaagcaagcacgcacctctgacccctaaagaagaggagtacctgcaggcccaggtgcggagcagaagcaagctggacgcccctaaggtggatctgctggtgaagaattgcctcctgcccctgagagagtacttcaagtatttcagccagaatagtctgcccctgggcggcccaagcagcggcgcccctcctcccagcggcggcagcccagccggctccccaacctctaccgaggagggcacctctgagtccgccacccccgagagcggccctggcacctccaccgagcccagcgagggcagcgcacccggcagccctgccggcagccccacctccacagaggagggaaccagcaccgagcccagcgaaggcagcgccccaggcaccagcaccgagcctagtgagggcggctctggcggcggcagcgcccaggagattaaacggatcaacaagatcagaagaagacttgtgaaagacagcaacaccaagaaggccggcaagacaggccccatgaaaaccctgctggttagagtgatgacacccgatctgagagagcggctggaaaacctgagaaagaagcctgaaaatatcccccagcccatcagcaatacatctagagccaacctgaataagctgctgaccgattacaccgaaatgaagaaggcgatcctgcatgtgtactgggaagagttccagaaggaccctgtgggcctgatgagccgggtggcccagcctgccagcaagaagatcgatcagaacaagctgaaacctgagatggacgagaagggcaacctgaccaccgccggctttgcctgctctcagtgtggccagcccctgttcgtgtacaagctggagcaggtgtctgagaagggcaaggcttacaccaactacttcggacggtgcaatgtggccgagcacgaaaagctgatcctgctggcccagctgaagcccgagaaggatagcgacgaagccgtgacatatagcctgggaaagtttgggcagagggccctggatttctacagcattcatgtgaccaaggagtccacccaccccgtgaagcccctggcccagatcgccggaaacagatacgcctccggacctgtgggaaaggccctgagcgacgcatgtatgggcacaatcgcctccttcctgtctaagtaccaggacatcatcatcgaacaccagaaggtggtgaagggcaaccagaagagactggagagcctgcgggagctggccggcaaggaaaacctggaataccctagcgtgaccctgccacctcagcctcacaccaaggagggcgttgatgcctacaacgaagtgatcgcccgggtgcgaatgtgggtgaacctgaacctgtggcagaagctgaagctaagcagagatgatgccaagcctctgctgagactgaagggattcccttcctttcctctggtcgagagacaggccaacgaagtggactggtgggacatggtgtgtaacgtgaagaagctgatcaacgagaaaaaggaggatggcaaggtgttttggcagaatctggctggctacaagagacaggaagccctgagaccatacctgagcagcgaggaagatcggaagaagggaaagaaattcgctcggtaccagctgggcgacctgctgctgcacctggaaaagaagcacggcgaggactggggaaaggtgtacgacgaggcctgggagcggattgacaagaaagtggaaggcctgagcaagcacatcaagctggaagaggaacggagaagcgaggacgcccagagcaaggccgccctgaccgactggctgcgggctaaggccagcttcgtgatcgagggcctgaaggaggccgacaaggacgagttctgcagatgcgagctgaagctgcagaagtggtacggggacctgcggggaaagcccttcgccatcgaagccgagaacagcatcctggacatcagcggcttcagcaagcagtacaactgtgccttcatctggcagaaggacggcgtgaagaagctgaacctgtacctgatcatcaactacttcaagggcggcaagctgcggttcaagaagatcaaacctgaagccttcgaagccaacagattctacaccgtgatcaacaaaaagagcggcgagatcgtgcccatggaggtgaacttcaacttcgacgaccccaacctgatcatcctgcctctggcctttggcaagagacagggcagagaattcatctggaacgacctgctgtccctggaaaccggcagcctgaagctggccaacggaagagtgatcgagaagacactgtacaacagaagaacccggcaggatgagcctgccctgttcgtggccctgaccttcgagcggcgggaggtcctggactcctccaatatcaaaccaatgaacctgatcggcgtggcaagaggcgaaaacatccccgccgtgatcgccctgaccgaccccgagggctgcccactgagccggtttaaggatagcctgggaaacccaacccacatcctgagaatcggcgagagctataaggagaagcagcggaccatccaggccaagaaggaggtggagcagcggagagccggcggctacagccggaagtacgccagcaaagccaagaatctggcagacgatatggtgagaaacaccgctagagatctgctgtactacgccgtgacccaggatgccatgctgatcttcgccaacctgagccggggcttcggccggcagggcaagcggaccttcatggccgagagacagtacacacggatggaggactggctgaccgccaagctggcctacgagggcctgagcaagacctacctgtccaagacactggcccagtacacctccaagacatgcagcaactgtgggtttaccatcaccagcgccgactacgacagggtgctggagaagctgaagaagacagcaacaggctggatgaccacaattaacggcaaggagctgaaggtggagggccagattacctactacaacagatacaagagacagaacgtagtcaaggacctgtccgtcgagctggatagactgagcgaagaatctgtgaacaacgacatctcctcctggacaaagggcagaagcggagaagctctgagcctcctgaagaaaagattctcccatagacccgtgcaggagaagttcgtgtgcctgaactgcggcttcgagacacacgcagccgagcaagccgccctgaacatcgccagatcctggctgttcctgcggagccaggagtacaagaaataccagacaaacaagacaaccggcaacaccgataagagagccttcgtcgagacctggcagtccttttaccggaagaagcttaaggaggtgtggaaacctgccgtgcggtctggcggatctggcggaggctccacaagcatggacagcgtgaccatcgaggacgtggccgtggacttcaccctggaggagtgggccctgctgggccccagccagaggaagctgtacagggacgtgatgcaggagaccctgaggaacctggccgccgtgggcgccaagagggagtaccacgacatcgaggaccagtacaagaaccagggcaggaagctgaggaccttcatggtggagaggctgtgcaagagcaaggacatcagcctgtgcggcaccagccccaagaaaaagagaaaagtctaagctgccttctgcggggcttgccttctggccatgcccttcttctctcccttgcacctgtacctcttggtctttgaataaagcctgagtaggaaggctagcaaaaaaaaaaaaaaaaaaaaaaaaaaaaaaaaaaaaaaaaaaaaaaaaaaaaaaaaaaaaaaaaaaaaaaaaaaaaaaaa

SEQ ID NO: 3005 - RNA, 5419 nt, synthetic construct
  source 1..5419: mol_type = other RNA
aggaaataagagagaaaagaagagtaagaagaaatataagagccaccatggcccctaagaagaagcgtaaagtgagccgggtgaacggcagcggcagcggcggcggcatgaaccacgaccaggagttcgacccccctaaggtgtaccctcccgtccccgccgagaagagaaagcccatccgggtcctgagcctgttcgatggcatcgccaccggtctgctggtgctgaaggacctgggcatccaggtggataggtacattgcctccgaggtgtgcgaggactccatcaccgtgggaatggtgcgtcatcagggcaagatcatgtacgtgggcgacgtgcggagcgtgacacagaagcatatccaggagtggggccctttcgacctggtgatcggcggcagcccttgcaatgacctgagcatcgtgaacccagcccggaagggcctgtacgagggaaccggcagactgttcttcgagttttacagactgctgcacgacgcccggcctaaggaaggcgacgaccggcccttcttttggctgttcgagaatgtggtggccatgggagtcagcgacaagcgggatattagccggttcctggagagcaaccccgtgatgatcgatgccaaggaagtgagcgccgcccaccgggccagatacttctggggcaatctgcctggcatgaacagacccctggccagcaccgtgaacgacaagctggagctgcaggagtgcctggagcacggccggatcgccaagttcagcaaggtgagaaccatcaccacccgaagcaacagcatcaaacaaggcaaggaccagcactttcctgtgttcatgaacgagaaggaggacatcctgtggtgtaccgagatggagagagtgttcgggttcccagtccactacacagatgtcagcaacatgtctagactggccagacagagactgctgggaagaagctggtccgtccctgtgatcagacacctgttcgcccctctgaaggagtacttcgcctgcgtgagcagcggcaacagcaacgccaacagccggggccccagcttctctagcggcctggtgccactgtccctgagagggagccacatgggccccatggagatctacaaaaccgtgagcgcctggaagcggcagcctgtgcgcgtgctgagcctgtttcggaatatcgataaagtcctgaaaagcctgggattcctggagagcggctctggctccggcggtggcaccctgaagtacgtggaggatgtgacaaacgtggtcagacgggatgtggagaagtggggccccttcgatctggtgtacggcagcacccaacccctgggcagctcttgtgaccggtgccctggctggtacatgtttcagttccaccggatcctgcagtacgccctgccgagacaggagtcccagcggccattcttttggattttcatggacaacttgctgctgaccgaggatgaccaggaaactaccactcggttcctgcagaccgaagccgtgaccctgcaggacgtgagaggccgggactaccagaacgccatgcgggtgtggtccaacatccctggactgaaaagcaagcacgcacctctgacccctaaagaagaggagtacctgcaggcccaggtgcggagcagaagcaagctggacgcccctaaggtggatctgctggtgaagaattgcctcctgcccctgagagagtacttcaagtatttcagccagaatagtctgcccctgggcggcccaagcagcggcgcccctcctcccagcggcggcagcccagccggctccccaacctctaccgaggagggcacctctgagtccgccacccccgagagcggccctggcacctccaccgagcccagcgagggcagcgcacccggcagccctgccggcagccccacctccacagaggagggaaccagcaccgagcccagcgaaggcagcgccccaggcaccagcaccgagcctagtgagggcggctctggcggcggcagcgcccaggagattaaacggatcaacaagatcagaagaagacttgtgaaagacagcaacaccaagaaggccggcaagacaggccccatgaaaaccctgctggttagagtgatgacacccgatctgagagagcggctggaaaacctgagaaagaagcctgaaaatatcccccagcccatcagcaatacatctagagccaacctgaataagctgctgaccgattacaccgaaatgaagaaggcgatcctgcatgtgtactgggaagagttccagaaggaccctgtgggcctgatgagccgggtggcccagcctgccagcaagaagatcgatcagaacaagctgaaacctgagatggacgagaagggcaacctgaccaccgccggctttgcctgctctcagtgtggccagcccctgttcgtgtacaagctggagcaggtgtctgagaagggcaaggcttacaccaactacttcggacggtgcaatgtggccgagcacgaaaagctgatcctgctggcccagctgaagcccgagaaggatagcgacgaagccgtgacatatagcctgggaaagtttgggcagagggccctggatttctacagcattcatgtgaccaaggagtccacccaccccgtgaagcccctggcccagatcgccggaaacagatacgcctccggacctgtgggaaaggccctgagcgacgcatgtatgggcacaatcgcctccttcctgtctaagtaccaggacatcatcatcgaacaccagaaggtggtgaagggcaaccagaagagactggagagcctgcgggagctggccggcaaggaaaacctggaataccctagcgtgaccctgccacctcagcctcacaccaaggagggcgttgatgcctacaacgaagtgatcgcccgggtgcgaatgtgggtgaacctgaacctgtggcagaagctgaagctaagcagagatgatgccaagcctctgctgagactgaagggattcccttcctttcctctggtcgagagacaggccaacgaagtggactggtgggacatggtgtgtaacgtgaagaagctgatcaacgagaaaaaggaggatggcaaggtgttttggcagaatctggctggctacaagagacaggaagccctgagaccatacctgagcagcgaggaagatcggaagaagggaaagaaattcgctcggtaccagctgggcgacctgctgctgcacctggaaaagaagcacggcgaggactggggaaaggtgtacgacgaggcctgggagcggattgacaagaaagtggaaggcctgagcaagcacatcaagctggaagaggaacggagaagcgaggacgcccagagcaaggccgccctgaccgactggctgcgggctaaggccagcttcgtgatcgagggcctgaaggaggccgacaaggacgagttctgcagatgcgagctgaagctgcagaagtggtacggggacctgcggggaaagcccttcgccatcgaagccgagaacagcatcctggacatcagcggcttcagcaagcagtacaactgtgccttcatctggcagaaggacggcgtgaagaagctgaacctgtacctgatcatcaactacttcaagggcggcaagctgcggttcaagaagatcaaacctgaagccttcgaagccaacagattctacaccgtgatcaacaaaaagagcggcgagatcgtgcccatggaggtgaacttcaacttcgacgaccccaacctgatcatcctgcctctggcctttggcaagagacagggcagagaattcatctggaacgacctgctgtccctggaaaccggcagcctgaagctggccaacggaagagtgatcgagaagacactgtacaacagaagaacccggcaggatgagcctgccctgttcgtggccctgaccttcgagcggcgggaggtcctggactcctccaatatcaaaccaatgaacctgatcggcgtggcaagaggcgaaaacatccccgccgtgatcgccctgaccgaccccgagggctgcccactgagccggtttaaggatagcctgggaaacccaacccacatcctgagaatcggcgagagctataaggagaagcagcggaccatccaggccaagaaggaggtggagcagcggagagccggcggctacagccggaagtacgccagcaaagccaagaatctggcagacgatatggtgagaaacaccgctagagatctgctgtactacgccgtgacccaggatgccatgctgatcttcgccaacctgagccggggcttcggccggcagggcaagcggaccttcatggccgagagacagtacacacggatggaggactggctgaccgccaagctggcctacgagggcctgagcaagacctacctgtccaagacactggcccagtacacctccaagacatgcagcaactgtgggtttaccatcaccagcgccgactacgacagggtgctggagaagctgaagaagacagcaacaggctggatgaccacaattaacggcaaggagctgaaggtggagggccagattacctactacaacagatacaagagacagaacgtagtcaaggacctgtccgtcgagctggatagactgagcgaagaatctgtgaacaacgacatctcctcctggacaaagggcagaagcggagaagctctgagcctcctgaagaaaagattctcccatagacccgtgcaggagaagttcgtgtgcctgaactgcggcttcgagacacacgcagccgagcaagccgccctgaacatcgccagatcctggctgttcctgcggagccaggagtacaagaaataccagacaaacaagacaaccggcaacaccgataagagagccttcgtcgagacctggcagtccttttaccggaagaagcttaaggaggtgtggaaacctgccgtgcggtctggcggatctggcggaggctccacaagcctgcagggcagcgtgagcttcaaggacgtgaccgtggacttcacccaggaggagtggcagcagctggaccccgcccagaaggccctgtacagggacgtgatgctggagaactactgccacttcgtgagcgtgggcttccacatgaccaagcccgacatgatcaggaggctggagcagggcgaggagctgtggaccgagaggatcttccccggccagagctacctggaggaggacggcaaggccaccagccccaagaaaaagagaaaagtctaagctgccttctgcggggcttgccttctggccatgcccttcttctctcccttgcacctgtacctcttggtctttgaataaagcctgagtaggaaggctagcaaaaaaaaaaaaaaaaaaaaaaaaaaaaaaaaaaaaaaaaaaaaaaaaaaaaaaaaaaaaaaaaaaaaaaaaaaaaaaaa

SEQ ID NO: 3006 - RNA, 5419 nt, synthetic construct
  source 1..5419: mol_type = other RNA
aggaaataagagagaaaagaagagtaagaagaaatataagagccaccatggcccctaagaagaagcgtaaagtgagccgggtgaacggcagcggcagcggcggcggcatgaaccacgaccaggagttcgacccccctaaggtgtaccctcccgtccccgccgagaagagaaagcccatccgggtcctgagcctgttcgatggcatcgccaccggtctgctggtgctgaaggacctgggcatccaggtggataggtacattgcctccgaggtgtgcgaggactccatcaccgtgggaatggtgcgtcatcagggcaagatcatgtacgtgggcgacgtgcggagcgtgacacagaagcatatccaggagtggggccctttcgacctggtgatcggcggcagcccttgcaatgacctgagcatcgtgaacccagcccggaagggcctgtacgagggaaccggcagactgttcttcgagttttacagactgctgcacgacgcccggcctaaggaaggcgacgaccggcccttcttttggctgttcgagaatgtggtggccatgggagtcagcgacaagcgggatattagccggttcctggagagcaaccccgtgatgatcgatgccaaggaagtgagcgccgcccaccgggccagatacttctggggcaatctgcctggcatgaacagacccctggccagcaccgtgaacgacaagctggagctgcaggagtgcctggagcacggccggatcgccaagttcagcaaggtgagaaccatcaccacccgaagcaacagcatcaaacaaggcaaggaccagcactttcctgtgttcatgaacgagaaggaggacatcctgtggtgtaccgagatggagagagtgttcgggttcccagtccactacacagatgtcagcaacatgtctagactggccagacagagactgctgggaagaagctggtccgtccctgtgatcagacacctgttcgcccctctgaaggagtacttcgcctgcgtgagcagcggcaacagcaacgccaacagccggggccccagcttctctagcggcctggtgccactgtccctgagagggagccacatgggccccatggagatctacaaaaccgtgagcgcctggaagcggcagcctgtgcgcgtgctgagcctgtttcggaatatcgataaagtcctgaaaagcctgggattcctggagagcggctctggctccggcggtggcaccctgaagtacgtggaggatgtgacaaacgtggtcagacgggatgtggagaagtggggccccttcgatctggtgtacggcagcacccaacccctgggcagctcttgtgaccggtgccctggctggtacatgtttcagttccaccggatcctgcagtacgccctgccgagacaggagtcccagcggccattcttttggattttcatggacaacttgctgctgaccgaggatgaccaggaaactaccactcggttcctgcagaccgaagccgtgaccctgcaggacgtgagaggccgggactaccagaacgccatgcgggtgtggtccaacatccctggactgaaaagcaagcacgcacctctgacccctaaagaagaggagtacctgcaggcccaggtgcggagcagaagcaagctggacgcccctaaggtggatctgctggtgaagaattgcctcctgcccctgagagagtacttcaagtatttcagccagaatagtctgcccctgggcggcccaagcagcggcgcccctcctcccagcggcggcagcccagccggctccccaacctctaccgaggagggcacctctgagtccgccacccccgagagcggccctggcacctccaccgagcccagcgagggcagcgcacccggcagccctgccggcagccccacctccacagaggagggaaccagcaccgagcccagcgaaggcagcgccccaggcaccagcaccgagcctagtgagggcggctctggcggcggcagcgcccaggagattaaacggatcaacaagatcagaagaagacttgtgaaagacagcaacaccaagaaggccggcaagacaggccccatgaaaaccctgctggttagagtgatgacacccgatctgagagagcggctggaaaacctgagaaagaagcctgaaaatatcccccagcccatcagcaatacatctagagccaacctgaataagctgctgaccgattacaccgaaatgaagaaggcgatcctgcatgtgtactgggaagagttccagaaggaccctgtgggcctgatgagccgggtggcccagcctgccagcaagaagatcgatcagaacaagctgaaacctgagatggacgagaagggcaacctgaccaccgccggctttgcctgctctcagtgtggccagcccctgttcgtgtacaagctggagcaggtgtctgagaagggcaaggcttacaccaactacttcggacggtgcaatgtggccgagcacgaaaagctgatcctgctggcccagctgaagcccgagaaggatagcgacgaagccgtgacatatagcctgggaaagtttgggcagagggccctggatttctacagcattcatgtgaccaaggagtccacccaccccgtgaagcccctggcccagatcgccggaaacagatacgcctccggacctgtgggaaaggccctgagcgacgcatgtatgggcacaatcgcctccttcctgtctaagtaccaggacatcatcatcgaacaccagaaggtggtgaagggcaaccagaagagactggagagcctgcgggagctggccggcaaggaaaacctggaataccctagcgtgaccctgccacctcagcctcacaccaaggagggcgttgatgcctacaacgaagtgatcgcccgggtgcgaatgtgggtgaacctgaacctgtggcagaagctgaagctaagcagagatgatgccaagcctctgctgagactgaagggattcccttcctttcctctggtcgagagacaggccaacgaagtggactggtgggacatggtgtgtaacgtgaagaagctgatcaacgagaaaaaggaggatggcaaggtgttttggcagaatctggctggctacaagagacaggaagccctgagaccatacctgagcagcgaggaagatcggaagaagggaaagaaattcgctcggtaccagctgggcgacctgctgctgcacctggaaaagaagcacggcgaggactggggaaaggtgtacgacgaggcctgggagcggattgacaagaaagtggaaggcctgagcaagcacatcaagctggaagaggaacggagaagcgaggacgcccagagcaaggccgccctgaccgactggctgcgggctaaggccagcttcgtgatcgagggcctgaaggaggccgacaaggacgagttctgcagatgcgagctgaagctgcagaagtggtacggggacctgcggggaaagcccttcgccatcgaagccgagaacagcatcctggacatcagcggcttcagcaagcagtacaactgtgccttcatctggcagaaggacggcgtgaagaagctgaacctgtacctgatcatcaactacttcaagggcggcaagctgcggttcaagaagatcaaacctgaagccttcgaagccaacagattctacaccgtgatcaacaaaaagagcggcgagatcgtgcccatggaggtgaacttcaacttcgacgaccccaacctgatcatcctgcctctggcctttggcaagagacagggcagagaattcatctggaacgacctgctgtccctggaaaccggcagcctgaagctggccaacggaagagtgatcgagaagacactgtacaacagaagaacccggcaggatgagcctgccctgttcgtggccctgaccttcgagcggcgggaggtcctggactcctccaatatcaaaccaatgaacctgatcggcgtggcaagaggcgaaaacatccccgccgtgatcgccctgaccgaccccgagggctgcccactgagccggtttaaggatagcctgggaaacccaacccacatcctgagaatcggcgagagctataaggagaagcagcggaccatccaggccaagaaggaggtggagcagcggagagccggcggctacagccggaagtacgccagcaaagccaagaatctggcagacgatatggtgagaaacaccgctagagatctgctgtactacgccgtgacccaggatgccatgctgatcttcgccaacctgagccggggcttcggccggcagggcaagcggaccttcatggccgagagacagtacacacggatggaggactggctgaccgccaagctggcctacgagggcctgagcaagacctacctgtccaagacactggcccagtacacctccaagacatgcagcaactgtgggtttaccatcaccagcgccgactacgacagggtgctggagaagctgaagaagacagcaacaggctggatgaccacaattaacggcaaggagctgaaggtggagggccagattacctactacaacagatacaagagacagaacgtagtcaaggacctgtccgtcgagctggatagactgagcgaagaatctgtgaacaacgacatctcctcctggacaaagggcagaagcggagaagctctgagcctcctgaagaaaagattctcccatagacccgtgcaggagaagttcgtgtgcctgaactgcggcttcgagacacacgcagccgagcaagccgccctgaacatcgccagatcctggctgttcctgcggagccaggagtacaagaaataccagacaaacaagacaaccggcaacaccgataagagagccttcgtcgagacctggcagtccttttaccggaagaagcttaaggaggtgtggaaacctgccgtgcggtctggcggatctggcggaggctccacaagctgcaaggagagcgtgatcttcaaggacgtgtgcgtgaacttcagcctggaggagtgggagtgcctggacctgacccagaggaacctgtacaggtgcgtgatgctggagaactacagcaacctggtgagcgtgggcctgagcatccccaagcccgacgtgatcagcctgctggagcagggcaaggagccctggggcgtgttcgacagcgagatgaccaggggcctgaaccaggactgcggcagcaccagccccaagaaaaagagaaaagtctaagctgccttctgcggggcttgccttctggccatgcccttcttctctcccttgcacctgtacctcttggtctttgaataaagcctgagtaggaaggctagcaaaaaaaaaaaaaaaaaaaaaaaaaaaaaaaaaaaaaaaaaaaaaaaaaaaaaaaaaaaaaaaaaaaaaaaaaaaaaaaa

SEQ ID NO: 3007 - RNA, 5419 nt, synthetic construct
  source 1..5419: mol_type = other RNA
aggaaataagagagaaaagaagagtaagaagaaatataagagccaccatggcccctaagaagaagcgtaaagtgagccgggtgaacggcagcggcagcggcggcggcatgaaccacgaccaggagttcgacccccctaaggtgtaccctcccgtccccgccgagaagagaaagcccatccgggtcctgagcctgttcgatggcatcgccaccggtctgctggtgctgaaggacctgggcatccaggtggataggtacattgcctccgaggtgtgcgaggactccatcaccgtgggaatggtgcgtcatcagggcaagatcatgtacgtgggcgacgtgcggagcgtgacacagaagcatatccaggagtggggccctttcgacctggtgatcggcggcagcccttgcaatgacctgagcatcgtgaacccagcccggaagggcctgtacgagggaaccggcagactgttcttcgagttttacagactgctgcacgacgcccggcctaaggaaggcgacgaccggcccttcttttggctgttcgagaatgtggtggccatgggagtcagcgacaagcgggatattagccggttcctggagagcaaccccgtgatgatcgatgccaaggaagtgagcgccgcccaccgggccagatacttctggggcaatctgcctggcatgaacagacccctggccagcaccgtgaacgacaagctggagctgcaggagtgcctggagcacggccggatcgccaagttcagcaaggtgagaaccatcaccacccgaagcaacagcatcaaacaaggcaaggaccagcactttcctgtgttcatgaacgagaaggaggacatcctgtggtgtaccgagatggagagagtgttcgggttcccagtccactacacagatgtcagcaacatgtctagactggccagacagagactgctgggaagaagctggtccgtccctgtgatcagacacctgttcgcccctctgaaggagtacttcgcctgcgtgagcagcggcaacagcaacgccaacagccggggccccagcttctctagcggcctggtgccactgtccctgagagggagccacatgggccccatggagatctacaaaaccgtgagcgcctggaagcggcagcctgtgcgcgtgctgagcctgtttcggaatatcgataaagtcctgaaaagcctgggattcctggagagcggctctggctccggcggtggcaccctgaagtacgtggaggatgtgacaaacgtggtcagacgggatgtggagaagtggggccccttcgatctggtgtacggcagcacccaacccctgggcagctcttgtgaccggtgccctggctggtacatgtttcagttccaccggatcctgcagtacgccctgccgagacaggagtcccagcggccattcttttggattttcatggacaacttgctgctgaccgaggatgaccaggaaactaccactcggttcctgcagaccgaagccgtgaccctgcaggacgtgagaggccgggactaccagaacgccatgcgggtgtggtccaacatccctggactgaaaagcaagcacgcacctctgacccctaaagaagaggagtacctgcaggcccaggtgcggagcagaagcaagctggacgcccctaaggtggatctgctggtgaagaattgcctcctgcccctgagagagtacttcaagtatttcagccagaatagtctgcccctgggcggcccaagcagcggcgcccctcctcccagcggcggcagcccagccggctccccaacctctaccgaggagggcacctctgagtccgccacccccgagagcggccctggcacctccaccgagcccagcgagggcagcgcacccggcagccctgccggcagccccacctccacagaggagggaaccagcaccgagcccagcgaaggcagcgccccaggcaccagcaccgagcctagtgagggcggctctggcggcggcagcgcccaggagattaaacggatcaacaagatcagaagaagacttgtgaaagacagcaacaccaagaaggccggcaagacaggccccatgaaaaccctgctggttagagtgatgacacccgatctgagagagcggctggaaaacctgagaaagaagcctgaaaatatcccccagcccatcagcaatacatctagagccaacctgaataagctgctgaccgattacaccgaaatgaagaaggcgatcctgcatgtgtactgggaagagttccagaaggaccctgtgggcctgatgagccgggtggcccagcctgccagcaagaagatcgatcagaacaagctgaaacctgagatggacgagaagggcaacctgaccaccgccggctttgcctgctctcagtgtggccagcccctgttcgtgtacaagctggagcaggtgtctgagaagggcaaggcttacaccaactacttcggacggtgcaatgtggccgagcacgaaaagctgatcctgctggcccagctgaagcccgagaaggatagcgacgaagccgtgacatatagcctgggaaagtttgggcagagggccctggatttctacagcattcatgtgaccaaggagtccacccaccccgtgaagcccctggcccagatcgccggaaacagatacgcctccggacctgtgggaaaggccctgagcgacgcatgtatgggcacaatcgcctccttcctgtctaagtaccaggacatcatcatcgaacaccagaaggtggtgaagggcaaccagaagagactggagagcctgcgggagctggccggcaaggaaaacctggaataccctagcgtgaccctgccacctcagcctcacaccaaggagggcgttgatgcctacaacgaagtgatcgcccgggtgcgaatgtgggtgaacctgaacctgtggcagaagctgaagctaagcagagatgatgccaagcctctgctgagactgaagggattcccttcctttcctctggtcgagagacaggccaacgaagtggactggtgggacatggtgtgtaacgtgaagaagctgatcaacgagaaaaaggaggatggcaaggtgttttggcagaatctggctggctacaagagacaggaagccctgagaccatacctgagcagcgaggaagatcggaagaagggaaagaaattcgctcggtaccagctgggcgacctgctgctgcacctggaaaagaagcacggcgaggactggggaaaggtgtacgacgaggcctgggagcggattgacaagaaagtggaaggcctgagcaagcacatcaagctggaagaggaacggagaagcgaggacgcccagagcaaggccgccctgaccgactggctgcgggctaaggccagcttcgtgatcgagggcctgaaggaggccgacaaggacgagttctgcagatgcgagctgaagctgcagaagtggtacggggacctgcggggaaagcccttcgccatcgaagccgagaacagcatcctggacatcagcggcttcagcaagcagtacaactgtgccttcatctggcagaaggacggcgtgaagaagctgaacctgtacctgatcatcaactacttcaagggcggcaagctgcggttcaagaagatcaaacctgaagccttcgaagccaacagattctacaccgtgatcaacaaaaagagcggcgagatcgtgcccatggaggtgaacttcaacttcgacgaccccaacctgatcatcctgcctctggcctttggcaagagacagggcagagaattcatctggaacgacctgctgtccctggaaaccggcagcctgaagctggccaacggaagagtgatcgagaagacactgtacaacagaagaacccggcaggatgagcctgccctgttcgtggccctgaccttcgagcggcgggaggtcctggactcctccaatatcaaaccaatgaacctgatcggcgtggcaagaggcgaaaacatccccgccgtgatcgccctgaccgaccccgagggctgcccactgagccggtttaaggatagcctgggaaacccaacccacatcctgagaatcggcgagagctataaggagaagcagcggaccatccaggccaagaaggaggtggagcagcggagagccggcggctacagccggaagtacgccagcaaagccaagaatctggcagacgatatggtgagaaacaccgctagagatctgctgtactacgccgtgacccaggatgccatgctgatcttcgccaacctgagccggggcttcggccggcagggcaagcggaccttcatggccgagagacagtacacacggatggaggactggctgaccgccaagctggcctacgagggcctgagcaagacctacctgtccaagacactggcccagtacacctccaagacatgcagcaactgtgggtttaccatcaccagcgccgactacgacagggtgctggagaagctgaagaagacagcaacaggctggatgaccacaattaacggcaaggagctgaaggtggagggccagattacctactacaacagatacaagagacagaacgtagtcaaggacctgtccgtcgagctggatagactgagcgaagaatctgtgaacaacgacatctcctcctggacaaagggcagaagcggagaagctctgagcctcctgaagaaaagattctcccatagacccgtgcaggagaagttcgtgtgcctgaactgcggcttcgagacacacgcagccgagcaagccgccctgaacatcgccagatcctggctgttcctgcggagccaggagtacaagaaataccagacaaacaagacaaccggcaacaccgataagagagccttcgtcgagacctggcagtccttttaccggaagaagcttaaggaggtgtggaaacctgccgtgcggtctggcggatctggcggaggctccacaagcgtgggccaccccgtgaccttcagggacgtggccgtggacttcagcctggaggagtggaggtgcctgagccccgcccagagggccctgtacagggacgtgatgctggagaactacgagaacctggtgagcgtgggcctgcccgtgagcaagcccaccgtgatcagcctgctggagaagggcgaggccccctggatgccccaggccggcgcccccaggggcccctgccccgactacctgagctggaccagccccaagaaaaagagaaaagtctaagctgccttctgcggggcttgccttctggccatgcccttcttctctcccttgcacctgtacctcttggtctttgaataaagcctgagtaggaaggctagcaaaaaaaaaaaaaaaaaaaaaaaaaaaaaaaaaaaaaaaaaaaaaaaaaaaaaaaaaaaaaaaaaaaaaaaaaaaaaaaa

SEQ ID NO: 3008 - RNA, 5419 nt, synthetic construct
  source 1..5419: mol_type = other RNA
aggaaataagagagaaaagaagagtaagaagaaatataagagccaccatggcccctaagaagaagcgtaaagtgagccgggtgaacggcagcggcagcggcggcggcatgaaccacgaccaggagttcgacccccctaaggtgtaccctcccgtccccgccgagaagagaaagcccatccgggtcctgagcctgttcgatggcatcgccaccggtctgctggtgctgaaggacctgggcatccaggtggataggtacattgcctccgaggtgtgcgaggactccatcaccgtgggaatggtgcgtcatcagggcaagatcatgtacgtgggcgacgtgcggagcgtgacacagaagcatatccaggagtggggccctttcgacctggtgatcggcggcagcccttgcaatgacctgagcatcgtgaacccagcccggaagggcctgtacgagggaaccggcagactgttcttcgagttttacagactgctgcacgacgcccggcctaaggaaggcgacgaccggcccttcttttggctgttcgagaatgtggtggccatgggagtcagcgacaagcgggatattagccggttcctggagagcaaccccgtgatgatcgatgccaaggaagtgagcgccgcccaccgggccagatacttctggggcaatctgcctggcatgaacagacccctggccagcaccgtgaacgacaagctggagctgcaggagtgcctggagcacggccggatcgccaagttcagcaaggtgagaaccatcaccacccgaagcaacagcatcaaacaaggcaaggaccagcactttcctgtgttcatgaacgagaaggaggacatcctgtggtgtaccgagatggagagagtgttcgggttcccagtccactacacagatgtcagcaacatgtctagactggccagacagagactgctgggaagaagctggtccgtccctgtgatcagacacctgttcgcccctctgaaggagtacttcgcctgcgtgagcagcggcaacagcaacgccaacagccggggccccagcttctctagcggcctggtgccactgtccctgagagggagccacatgggccccatggagatctacaaaaccgtgagcgcctggaagcggcagcctgtgcgcgtgctgagcctgtttcggaatatcgataaagtcctgaaaagcctgggattcctggagagcggctctggctccggcggtggcaccctgaagtacgtggaggatgtgacaaacgtggtcagacgggatgtggagaagtggggccccttcgatctggtgtacggcagcacccaacccctgggcagctcttgtgaccggtgccctggctggtacatgtttcagttccaccggatcctgcagtacgccctgccgagacaggagtcccagcggccattcttttggattttcatggacaacttgctgctgaccgaggatgaccaggaaactaccactcggttcctgcagaccgaagccgtgaccctgcaggacgtgagaggccgggactaccagaacgccatgcgggtgtggtccaacatccctggactgaaaagcaagcacgcacctctgacccctaaagaagaggagtacctgcaggcccaggtgcggagcagaagcaagctggacgcccctaaggtggatctgctggtgaagaattgcctcctgcccctgagagagtacttcaagtatttcagccagaatagtctgcccctgggcggcccaagcagcggcgcccctcctcccagcggcggcagcccagccggctccccaacctctaccgaggagggcacctctgagtccgccacccccgagagcggccctggcacctccaccgagcccagcgagggcagcgcacccggcagccctgccggcagccccacctccacagaggagggaaccagcaccgagcccagcgaaggcagcgccccaggcaccagcaccgagcctagtgagggcggctctggcggcggcagcgcccaggagattaaacggatcaacaagatcagaagaagacttgtgaaagacagcaacaccaagaaggccggcaagacaggccccatgaaaaccctgctggttagagtgatgacacccgatctgagagagcggctggaaaacctgagaaagaagcctgaaaatatcccccagcccatcagcaatacatctagagccaacctgaataagctgctgaccgattacaccgaaatgaagaaggcgatcctgcatgtgtactgggaagagttccagaaggaccctgtgggcctgatgagccgggtggcccagcctgccagcaagaagatcgatcagaacaagctgaaacctgagatggacgagaagggcaacctgaccaccgccggctttgcctgctctcagtgtggccagcccctgttcgtgtacaagctggagcaggtgtctgagaagggcaaggcttacaccaactacttcggacggtgcaatgtggccgagcacgaaaagctgatcctgctggcccagctgaagcccgagaaggatagcgacgaagccgtgacatatagcctgggaaagtttgggcagagggccctggatttctacagcattcatgtgaccaaggagtccacccaccccgtgaagcccctggcccagatcgccggaaacagatacgcctccggacctgtgggaaaggccctgagcgacgcatgtatgggcacaatcgcctccttcctgtctaagtaccaggacatcatcatcgaacaccagaaggtggtgaagggcaaccagaagagactggagagcctgcgggagctggccggcaaggaaaacctggaataccctagcgtgaccctgccacctcagcctcacaccaaggagggcgttgatgcctacaacgaagtgatcgcccgggtgcgaatgtgggtgaacctgaacctgtggcagaagctgaagctaagcagagatgatgccaagcctctgctgagactgaagggattcccttcctttcctctggtcgagagacaggccaacgaagtggactggtgggacatggtgtgtaacgtgaagaagctgatcaacgagaaaaaggaggatggcaaggtgttttggcagaatctggctggctacaagagacaggaagccctgagaccatacctgagcagcgaggaagatcggaagaagggaaagaaattcgctcggtaccagctgggcgacctgctgctgcacctggaaaagaagcacggcgaggactggggaaaggtgtacgacgaggcctgggagcggattgacaagaaagtggaaggcctgagcaagcacatcaagctggaagaggaacggagaagcgaggacgcccagagcaaggccgccctgaccgactggctgcgggctaaggccagcttcgtgatcgagggcctgaaggaggccgacaaggacgagttctgcagatgcgagctgaagctgcagaagtggtacggggacctgcggggaaagcccttcgccatcgaagccgagaacagcatcctggacatcagcggcttcagcaagcagtacaactgtgccttcatctggcagaaggacggcgtgaagaagctgaacctgtacctgatcatcaactacttcaagggcggcaagctgcggttcaagaagatcaaacctgaagccttcgaagccaacagattctacaccgtgatcaacaaaaagagcggcgagatcgtgcccatggaggtgaacttcaacttcgacgaccccaacctgatcatcctgcctctggcctttggcaagagacagggcagagaattcatctggaacgacctgctgtccctggaaaccggcagcctgaagctggccaacggaagagtgatcgagaagacactgtacaacagaagaacccggcaggatgagcctgccctgttcgtggccctgaccttcgagcggcgggaggtcctggactcctccaatatcaaaccaatgaacctgatcggcgtggcaagaggcgaaaacatccccgccgtgatcgccctgaccgaccccgagggctgcccactgagccggtttaaggatagcctgggaaacccaacccacatcctgagaatcggcgagagctataaggagaagcagcggaccatccaggccaagaaggaggtggagcagcggagagccggcggctacagccggaagtacgccagcaaagccaagaatctggcagacgatatggtgagaaacaccgctagagatctgctgtactacgccgtgacccaggatgccatgctgatcttcgccaacctgagccggggcttcggccggcagggcaagcggaccttcatggccgagagacagtacacacggatggaggactggctgaccgccaagctggcctacgagggcctgagcaagacctacctgtccaagacactggcccagtacacctccaagacatgcagcaactgtgggtttaccatcaccagcgccgactacgacagggtgctggagaagctgaagaagacagcaacaggctggatgaccacaattaacggcaaggagctgaaggtggagggccagattacctactacaacagatacaagagacagaacgtagtcaaggacctgtccgtcgagctggatagactgagcgaagaatctgtgaacaacgacatctcctcctggacaaagggcagaagcggagaagctctgagcctcctgaagaaaagattctcccatagacccgtgcaggagaagttcgtgtgcctgaactgcggcttcgagacacacgcagccgagcaagccgccctgaacatcgccagatcctggctgttcctgcggagccaggagtacaagaaataccagacaaacaagacaaccggcaacaccgataagagagccttcgtcgagacctggcagtccttttaccggaagaagcttaaggaggtgtggaaacctgccgtgcggtctggcggatctggcggaggctccacaagcttccaggacttcgtgagcttcaacgacgtgagcgtgaacttcaccgaggaggagtggagggagctggaccccgtgcagagggtgctgtacagggacgtgatgctggagaactacaggaacctggtgagcctgggcttccccttcagcaagcccgacatcatcagccagctggagcaggccgtgaacccctggatgcaggagggcgaggtgctgaggggcagctgcacccacctggagaccaggaccagccccaagaaaaagagaaaagtctaagctgccttctgcggggcttgccttctggccatgcccttcttctctcccttgcacctgtacctcttggtctttgaataaagcctgagtaggaaggctagcaaaaaaaaaaaaaaaaaaaaaaaaaaaaaaaaaaaaaaaaaaaaaaaaaaaaaaaaaaaaaaaaaaaaaaaaaaaaaaaa

SEQ ID NO: 3009 - RNA, 5419 nt, synthetic construct
  source 1..5419: mol_type = other RNA
aggaaataagagagaaaagaagagtaagaagaaatataagagccaccatggcccctaagaagaagcgtaaagtgagccgggtgaacggcagcggcagcggcggcggcatgaaccacgaccaggagttcgacccccctaaggtgtaccctcccgtccccgccgagaagagaaagcccatccgggtcctgagcctgttcgatggcatcgccaccggtctgctggtgctgaaggacctgggcatccaggtggataggtacattgcctccgaggtgtgcgaggactccatcaccgtgggaatggtgcgtcatcagggcaagatcatgtacgtgggcgacgtgcggagcgtgacacagaagcatatccaggagtggggccctttcgacctggtgatcggcggcagcccttgcaatgacctgagcatcgtgaacccagcccggaagggcctgtacgagggaaccggcagactgttcttcgagttttacagactgctgcacgacgcccggcctaaggaaggcgacgaccggcccttcttttggctgttcgagaatgtggtggccatgggagtcagcgacaagcgggatattagccggttcctggagagcaaccccgtgatgatcgatgccaaggaagtgagcgccgcccaccgggccagatacttctggggcaatctgcctggcatgaacagacccctggccagcaccgtgaacgacaagctggagctgcaggagtgcctggagcacggccggatcgccaagttcagcaaggtgagaaccatcaccacccgaagcaacagcatcaaacaaggcaaggaccagcactttcctgtgttcatgaacgagaaggaggacatcctgtggtgtaccgagatggagagagtgttcgggttcccagtccactacacagatgtcagcaacatgtctagactggccagacagagactgctgggaagaagctggtccgtccctgtgatcagacacctgttcgcccctctgaaggagtacttcgcctgcgtgagcagcggcaacagcaacgccaacagccggggccccagcttctctagcggcctggtgccactgtccctgagagggagccacatgggccccatggagatctacaaaaccgtgagcgcctggaagcggcagcctgtgcgcgtgctgagcctgtttcggaatatcgataaagtcctgaaaagcctgggattcctggagagcggctctggctccggcggtggcaccctgaagtacgtggaggatgtgacaaacgtggtcagacgggatgtggagaagtggggccccttcgatctggtgtacggcagcacccaacccctgggcagctcttgtgaccggtgccctggctggtacatgtttcagttccaccggatcctgcagtacgccctgccgagacaggagtcccagcggccattcttttggattttcatggacaacttgctgctgaccgaggatgaccaggaaactaccactcggttcctgcagaccgaagccgtgaccctgcaggacgtgagaggccgggactaccagaacgccatgcgggtgtggtccaacatccctggactgaaaagcaagcacgcacctctgacccctaaagaagaggagtacctgcaggcccaggtgcggagcagaagcaagctggacgcccctaaggtggatctgctggtgaagaattgcctcctgcccctgagagagtacttcaagtatttcagccagaatagtctgcccctgggcggcccaagcagcggcgcccctcctcccagcggcggcagcccagccggctccccaacctctaccgaggagggcacctctgagtccgccacccccgagagcggccctggcacctccaccgagcccagcgagggcagcgcacccggcagccctgccggcagccccacctccacagaggagggaaccagcaccgagcccagcgaaggcagcgccccaggcaccagcaccgagcctagtgagggcggctctggcggcggcagcgcccaggagattaaacggatcaacaagatcagaagaagacttgtgaaagacagcaacaccaagaaggccggcaagacaggccccatgaaaaccctgctggttagagtgatgacacccgatctgagagagcggctggaaaacctgagaaagaagcctgaaaatatcccccagcccatcagcaatacatctagagccaacctgaataagctgctgaccgattacaccgaaatgaagaaggcgatcctgcatgtgtactgggaagagttccagaaggaccctgtgggcctgatgagccgggtggcccagcctgccagcaagaagatcgatcagaacaagctgaaacctgagatggacgagaagggcaacctgaccaccgccggctttgcctgctctcagtgtggccagcccctgttcgtgtacaagctggagcaggtgtctgagaagggcaaggcttacaccaactacttcggacggtgcaatgtggccgagcacgaaaagctgatcctgctggcccagctgaagcccgagaaggatagcgacgaagccgtgacatatagcctgggaaagtttgggcagagggccctggatttctacagcattcatgtgaccaaggagtccacccaccccgtgaagcccctggcccagatcgccggaaacagatacgcctccggacctgtgggaaaggccctgagcgacgcatgtatgggcacaatcgcctccttcctgtctaagtaccaggacatcatcatcgaacaccagaaggtggtgaagggcaaccagaagagactggagagcctgcgggagctggccggcaaggaaaacctggaataccctagcgtgaccctgccacctcagcctcacaccaaggagggcgttgatgcctacaacgaagtgatcgcccgggtgcgaatgtgggtgaacctgaacctgtggcagaagctgaagctaagcagagatgatgccaagcctctgctgagactgaagggattcccttcctttcctctggtcgagagacaggccaacgaagtggactggtgggacatggtgtgtaacgtgaagaagctgatcaacgagaaaaaggaggatggcaaggtgttttggcagaatctggctggctacaagagacaggaagccctgagaccatacctgagcagcgaggaagatcggaagaagggaaagaaattcgctcggtaccagctgggcgacctgctgctgcacctggaaaagaagcacggcgaggactggggaaaggtgtacgacgaggcctgggagcggattgacaagaaagtggaaggcctgagcaagcacatcaagctggaagaggaacggagaagcgaggacgcccagagcaaggccgccctgaccgactggctgcgggctaaggccagcttcgtgatcgagggcctgaaggaggccgacaaggacgagttctgcagatgcgagctgaagctgcagaagtggtacggggacctgcggggaaagcccttcgccatcgaagccgagaacagcatcctggacatcagcggcttcagcaagcagtacaactgtgccttcatctggcagaaggacggcgtgaagaagctgaacctgtacctgatcatcaactacttcaagggcggcaagctgcggttcaagaagatcaaacctgaagccttcgaagccaacagattctacaccgtgatcaacaaaaagagcggcgagatcgtgcccatggaggtgaacttcaacttcgacgaccccaacctgatcatcctgcctctggcctttggcaagagacagggcagagaattcatctggaacgacctgctgtccctggaaaccggcagcctgaagctggccaacggaagagtgatcgagaagacactgtacaacagaagaacccggcaggatgagcctgccctgttcgtggccctgaccttcgagcggcgggaggtcctggactcctccaatatcaaaccaatgaacctgatcggcgtggcaagaggcgaaaacatccccgccgtgatcgccctgaccgaccccgagggctgcccactgagccggtttaaggatagcctgggaaacccaacccacatcctgagaatcggcgagagctataaggagaagcagcggaccatccaggccaagaaggaggtggagcagcggagagccggcggctacagccggaagtacgccagcaaagccaagaatctggcagacgatatggtgagaaacaccgctagagatctgctgtactacgccgtgacccaggatgccatgctgatcttcgccaacctgagccggggcttcggccggcagggcaagcggaccttcatggccgagagacagtacacacggatggaggactggctgaccgccaagctggcctacgagggcctgagcaagacctacctgtccaagacactggcccagtacacctccaagacatgcagcaactgtgggtttaccatcaccagcgccgactacgacagggtgctggagaagctgaagaagacagcaacaggctggatgaccacaattaacggcaaggagctgaaggtggagggccagattacctactacaacagatacaagagacagaacgtagtcaaggacctgtccgtcgagctggatagactgagcgaagaatctgtgaacaacgacatctcctcctggacaaagggcagaagcggagaagctctgagcctcctgaagaaaagattctcccatagacccgtgcaggagaagttcgtgtgcctgaactgcggcttcgagacacacgcagccgagcaagccgccctgaacatcgccagatcctggctgttcctgcggagccaggagtacaagaaataccagacaaacaagacaaccggcaacaccgataagagagccttcgtcgagacctggcagtccttttaccggaagaagcttaaggaggtgtggaaacctgccgtgcggtctggcggatctggcggaggctccacaagcccccacaggctggtgctgttcagggacgtggccgtggacttcagccaggaggagtgggcctgcctggacagcgagcagaaggacctgtacagggacgtgatgctggagaactacagcaacctggtgagcctgggcttcagcagcagcaaggccgacatgctgagcctgctggagcagggcaaggagccctggaaggtggtgcaggacgtggccaggagccagagcagcgacctgggcagcaggaccagccccaagaaaaagagaaaagtctaagctgccttctgcggggcttgccttctggccatgcccttcttctctcccttgcacctgtacctcttggtctttgaataaagcctgagtaggaaggctagcaaaaaaaaaaaaaaaaaaaaaaaaaaaaaaaaaaaaaaaaaaaaaaaaaaaaaaaaaaaaaaaaaaaaaaaaaaaaaaaa

SEQ ID NO: 3010 - RNA, 5419 nt, synthetic construct
  source 1..5419: mol_type = other RNA
aggaaataagagagaaaagaagagtaagaagaaatataagagccaccatggcccctaagaagaagcgtaaagtgagccgggtgaacggcagcggcagcggcggcggcatgaaccacgaccaggagttcgacccccctaaggtgtaccctcccgtccccgccgagaagagaaagcccatccgggtcctgagcctgttcgatggcatcgccaccggtctgctggtgctgaaggacctgggcatccaggtggataggtacattgcctccgaggtgtgcgaggactccatcaccgtgggaatggtgcgtcatcagggcaagatcatgtacgtgggcgacgtgcggagcgtgacacagaagcatatccaggagtggggccctttcgacctggtgatcggcggcagcccttgcaatgacctgagcatcgtgaacccagcccggaagggcctgtacgagggaaccggcagactgttcttcgagttttacagactgctgcacgacgcccggcctaaggaaggcgacgaccggcccttcttttggctgttcgagaatgtggtggccatgggagtcagcgacaagcgggatattagccggttcctggagagcaaccccgtgatgatcgatgccaaggaagtgagcgccgcccaccgggccagatacttctggggcaatctgcctggcatgaacagacccctggccagcaccgtgaacgacaagctggagctgcaggagtgcctggagcacggccggatcgccaagttcagcaaggtgagaaccatcaccacccgaagcaacagcatcaaacaaggcaaggaccagcactttcctgtgttcatgaacgagaaggaggacatcctgtggtgtaccgagatggagagagtgttcgggttcccagtccactacacagatgtcagcaacatgtctagactggccagacagagactgctgggaagaagctggtccgtccctgtgatcagacacctgttcgcccctctgaaggagtacttcgcctgcgtgagcagcggcaacagcaacgccaacagccggggccccagcttctctagcggcctggtgccactgtccctgagagggagccacatgggccccatggagatctacaaaaccgtgagcgcctggaagcggcagcctgtgcgcgtgctgagcctgtttcggaatatcgataaagtcctgaaaagcctgggattcctggagagcggctctggctccggcggtggcaccctgaagtacgtggaggatgtgacaaacgtggtcagacgggatgtggagaagtggggccccttcgatctggtgtacggcagcacccaacccctgggcagctcttgtgaccggtgccctggctggtacatgtttcagttccaccggatcctgcagtacgccctgccgagacaggagtcccagcggccattcttttggattttcatggacaacttgctgctgaccgaggatgaccaggaaactaccactcggttcctgcagaccgaagccgtgaccctgcaggacgtgagaggccgggactaccagaacgccatgcgggtgtggtccaacatccctggactgaaaagcaagcacgcacctctgacccctaaagaagaggagtacctgcaggcccaggtgcggagcagaagcaagctggacgcccctaaggtggatctgctggtgaagaattgcctcctgcccctgagagagtacttcaagtatttcagccagaatagtctgcccctgggcggcccaagcagcggcgcccctcctcccagcggcggcagcccagccggctccccaacctctaccgaggagggcacctctgagtccgccacccccgagagcggccctggcacctccaccgagcccagcgagggcagcgcacccggcagccctgccggcagccccacctccacagaggagggaaccagcaccgagcccagcgaaggcagcgccccaggcaccagcaccgagcctagtgagggcggctctggcggcggcagcgcccaggagattaaacggatcaacaagatcagaagaagacttgtgaaagacagcaacaccaagaaggccggcaagacaggccccatgaaaaccctgctggttagagtgatgacacccgatctgagagagcggctggaaaacctgagaaagaagcctgaaaatatcccccagcccatcagcaatacatctagagccaacctgaataagctgctgaccgattacaccgaaatgaagaaggcgatcctgcatgtgtactgggaagagttccagaaggaccctgtgggcctgatgagccgggtggcccagcctgccagcaagaagatcgatcagaacaagctgaaacctgagatggacgagaagggcaacctgaccaccgccggctttgcctgctctcagtgtggccagcccctgttcgtgtacaagctggagcaggtgtctgagaagggcaaggcttacaccaactacttcggacggtgcaatgtggccgagcacgaaaagctgatcctgctggcccagctgaagcccgagaaggatagcgacgaagccgtgacatatagcctgggaaagtttgggcagagggccctggatttctacagcattcatgtgaccaaggagtccacccaccccgtgaagcccctggcccagatcgccggaaacagatacgcctccggacctgtgggaaaggccctgagcgacgcatgtatgggcacaatcgcctccttcctgtctaagtaccaggacatcatcatcgaacaccagaaggtggtgaagggcaaccagaagagactggagagcctgcgggagctggccggcaaggaaaacctggaataccctagcgtgaccctgccacctcagcctcacaccaaggagggcgttgatgcctacaacgaagtgatcgcccgggtgcgaatgtgggtgaacctgaacctgtggcagaagctgaagctaagcagagatgatgccaagcctctgctgagactgaagggattcccttcctttcctctggtcgagagacaggccaacgaagtggactggtgggacatggtgtgtaacgtgaagaagctgatcaacgagaaaaaggaggatggcaaggtgttttggcagaatctggctggctacaagagacaggaagccctgagaccatacctgagcagcgaggaagatcggaagaagggaaagaaattcgctcggtaccagctgggcgacctgctgctgcacctggaaaagaagcacggcgaggactggggaaaggtgtacgacgaggcctgggagcggattgacaagaaagtggaaggcctgagcaagcacatcaagctggaagaggaacggagaagcgaggacgcccagagcaaggccgccctgaccgactggctgcgggctaaggccagcttcgtgatcgagggcctgaaggaggccgacaaggacgagttctgcagatgcgagctgaagctgcagaagtggtacggggacctgcggggaaagcccttcgccatcgaagccgagaacagcatcctggacatcagcggcttcagcaagcagtacaactgtgccttcatctggcagaaggacggcgtgaagaagctgaacctgtacctgatcatcaactacttcaagggcggcaagctgcggttcaagaagatcaaacctgaagccttcgaagccaacagattctacaccgtgatcaacaaaaagagcggcgagatcgtgcccatggaggtgaacttcaacttcgacgaccccaacctgatcatcctgcctctggcctttggcaagagacagggcagagaattcatctggaacgacctgctgtccctggaaaccggcagcctgaagctggccaacggaagagtgatcgagaagacactgtacaacagaagaacccggcaggatgagcctgccctgttcgtggccctgaccttcgagcggcgggaggtcctggactcctccaatatcaaaccaatgaacctgatcggcgtggcaagaggcgaaaacatccccgccgtgatcgccctgaccgaccccgagggctgcccactgagccggtttaaggatagcctgggaaacccaacccacatcctgagaatcggcgagagctataaggagaagcagcggaccatccaggccaagaaggaggtggagcagcggagagccggcggctacagccggaagtacgccagcaaagccaagaatctggcagacgatatggtgagaaacaccgctagagatctgctgtactacgccgtgacccaggatgccatgctgatcttcgccaacctgagccggggcttcggccggcagggcaagcggaccttcatggccgagagacagtacacacggatggaggactggctgaccgccaagctggcctacgagggcctgagcaagacctacctgtccaagacactggcccagtacacctccaagacatgcagcaactgtgggtttaccatcaccagcgccgactacgacagggtgctggagaagctgaagaagacagcaacaggctggatgaccacaattaacggcaaggagctgaaggtggagggccagattacctactacaacagatacaagagacagaacgtagtcaaggacctgtccgtcgagctggatagactgagcgaagaatctgtgaacaacgacatctcctcctggacaaagggcagaagcggagaagctctgagcctcctgaagaaaagattctcccatagacccgtgcaggagaagttcgtgtgcctgaactgcggcttcgagacacacgcagccgagcaagccgccctgaacatcgccagatcctggctgttcctgcggagccaggagtacaagaaataccagacaaacaagacaaccggcaacaccgataagagagccttcgtcgagacctggcagtccttttaccggaagaagcttaaggaggtgtggaaacctgccgtgcggtctggcggatctggcggaggctccacaagctaccaggagatggtgaccttcgaggacgtggccgtgcacttcaccaagaccgagtggaccggcctgagccccgcccagagggccctgtacaggagcgtgatgctggagaacttcggcaacctgaccgccctgggctaccccgtgcccaagcccgccctgatcagcctgctggagggcggcgacatggactggggcctggaggcccaggacgacccccccgccgagaggaccaagaacgtgtgcaccagccccaagaaaaagagaaaagtctaagctgccttctgcggggcttgccttctggccatgcccttcttctctcccttgcacctgtacctcttggtctttgaataaagcctgagtaggaaggctagcaaaaaaaaaaaaaaaaaaaaaaaaaaaaaaaaaaaaaaaaaaaaaaaaaaaaaaaaaaaaaaaaaaaaaaaaaaaaaaaa

SEQ ID NO: 3011 - RNA, 5419 nt, synthetic construct
  source 1..5419: mol_type = other RNA
aggaaataagagagaaaagaagagtaagaagaaatataagagccaccatggcccctaagaagaagcgtaaagtgagccgggtgaacggcagcggcagcggcggcggcatgaaccacgaccaggagttcgacccccctaaggtgtaccctcccgtccccgccgagaagagaaagcccatccgggtcctgagcctgttcgatggcatcgccaccggtctgctggtgctgaaggacctgggcatccaggtggataggtacattgcctccgaggtgtgcgaggactccatcaccgtgggaatggtgcgtcatcagggcaagatcatgtacgtgggcgacgtgcggagcgtgacacagaagcatatccaggagtggggccctttcgacctggtgatcggcggcagcccttgcaatgacctgagcatcgtgaacccagcccggaagggcctgtacgagggaaccggcagactgttcttcgagttttacagactgctgcacgacgcccggcctaaggaaggcgacgaccggcccttcttttggctgttcgagaatgtggtggccatgggagtcagcgacaagcgggatattagccggttcctggagagcaaccccgtgatgatcgatgccaaggaagtgagcgccgcccaccgggccagatacttctggggcaatctgcctggcatgaacagacccctggccagcaccgtgaacgacaagctggagctgcaggagtgcctggagcacggccggatcgccaagttcagcaaggtgagaaccatcaccacccgaagcaacagcatcaaacaaggcaaggaccagcactttcctgtgttcatgaacgagaaggaggacatcctgtggtgtaccgagatggagagagtgttcgggttcccagtccactacacagatgtcagcaacatgtctagactggccagacagagactgctgggaagaagctggtccgtccctgtgatcagacacctgttcgcccctctgaaggagtacttcgcctgcgtgagcagcggcaacagcaacgccaacagccggggccccagcttctctagcggcctggtgccactgtccctgagagggagccacatgggccccatggagatctacaaaaccgtgagcgcctggaagcggcagcctgtgcgcgtgctgagcctgtttcggaatatcgataaagtcctgaaaagcctgggattcctggagagcggctctggctccggcggtggcaccctgaagtacgtggaggatgtgacaaacgtggtcagacgggatgtggagaagtggggccccttcgatctggtgtacggcagcacccaacccctgggcagctcttgtgaccggtgccctggctggtacatgtttcagttccaccggatcctgcagtacgccctgccgagacaggagtcccagcggccattcttttggattttcatggacaacttgctgctgaccgaggatgaccaggaaactaccactcggttcctgcagaccgaagccgtgaccctgcaggacgtgagaggccgggactaccagaacgccatgcgggtgtggtccaacatccctggactgaaaagcaagcacgcacctctgacccctaaagaagaggagtacctgcaggcccaggtgcggagcagaagcaagctggacgcccctaaggtggatctgctggtgaagaattgcctcctgcccctgagagagtacttcaagtatttcagccagaatagtctgcccctgggcggcccaagcagcggcgcccctcctcccagcggcggcagcccagccggctccccaacctctaccgaggagggcacctctgagtccgccacccccgagagcggccctggcacctccaccgagcccagcgagggcagcgcacccggcagccctgccggcagccccacctccacagaggagggaaccagcaccgagcccagcgaaggcagcgccccaggcaccagcaccgagcctagtgagggcggctctggcggcggcagcgcccaggagattaaacggatcaacaagatcagaagaagacttgtgaaagacagcaacaccaagaaggccggcaagacaggccccatgaaaaccctgctggttagagtgatgacacccgatctgagagagcggctggaaaacctgagaaagaagcctgaaaatatcccccagcccatcagcaatacatctagagccaacctgaataagctgctgaccgattacaccgaaatgaagaaggcgatcctgcatgtgtactgggaagagttccagaaggaccctgtgggcctgatgagccgggtggcccagcctgccagcaagaagatcgatcagaacaagctgaaacctgagatggacgagaagggcaacctgaccaccgccggctttgcctgctctcagtgtggccagcccctgttcgtgtacaagctggagcaggtgtctgagaagggcaaggcttacaccaactacttcggacggtgcaatgtggccgagcacgaaaagctgatcctgctggcccagctgaagcccgagaaggatagcgacgaagccgtgacatatagcctgggaaagtttgggcagagggccctggatttctacagcattcatgtgaccaaggagtccacccaccccgtgaagcccctggcccagatcgccggaaacagatacgcctccggacctgtgggaaaggccctgagcgacgcatgtatgggcacaatcgcctccttcctgtctaagtaccaggacatcatcatcgaacaccagaaggtggtgaagggcaaccagaagagactggagagcctgcgggagctggccggcaaggaaaacctggaataccctagcgtgaccctgccacctcagcctcacaccaaggagggcgttgatgcctacaacgaagtgatcgcccgggtgcgaatgtgggtgaacctgaacctgtggcagaagctgaagctaagcagagatgatgccaagcctctgctgagactgaagggattcccttcctttcctctggtcgagagacaggccaacgaagtggactggtgggacatggtgtgtaacgtgaagaagctgatcaacgagaaaaaggaggatggcaaggtgttttggcagaatctggctggctacaagagacaggaagccctgagaccatacctgagcagcgaggaagatcggaagaagggaaagaaattcgctcggtaccagctgggcgacctgctgctgcacctggaaaagaagcacggcgaggactggggaaaggtgtacgacgaggcctgggagcggattgacaagaaagtggaaggcctgagcaagcacatcaagctggaagaggaacggagaagcgaggacgcccagagcaaggccgccctgaccgactggctgcgggctaaggccagcttcgtgatcgagggcctgaaggaggccgacaaggacgagttctgcagatgcgagctgaagctgcagaagtggtacggggacctgcggggaaagcccttcgccatcgaagccgagaacagcatcctggacatcagcggcttcagcaagcagtacaactgtgccttcatctggcagaaggacggcgtgaagaagctgaacctgtacctgatcatcaactacttcaagggcggcaagctgcggttcaagaagatcaaacctgaagccttcgaagccaacagattctacaccgtgatcaacaaaaagagcggcgagatcgtgcccatggaggtgaacttcaacttcgacgaccccaacctgatcatcctgcctctggcctttggcaagagacagggcagagaattcatctggaacgacctgctgtccctggaaaccggcagcctgaagctggccaacggaagagtgatcgagaagacactgtacaacagaagaacccggcaggatgagcctgccctgttcgtggccctgaccttcgagcggcgggaggtcctggactcctccaatatcaaaccaatgaacctgatcggcgtggcaagaggcgaaaacatccccgccgtgatcgccctgaccgaccccgagggctgcccactgagccggtttaaggatagcctgggaaacccaacccacatcctgagaatcggcgagagctataaggagaagcagcggaccatccaggccaagaaggaggtggagcagcggagagccggcggctacagccggaagtacgccagcaaagccaagaatctggcagacgatatggtgagaaacaccgctagagatctgctgtactacgccgtgacccaggatgccatgctgatcttcgccaacctgagccggggcttcggccggcagggcaagcggaccttcatggccgagagacagtacacacggatggaggactggctgaccgccaagctggcctacgagggcctgagcaagacctacctgtccaagacactggcccagtacacctccaagacatgcagcaactgtgggtttaccatcaccagcgccgactacgacagggtgctggagaagctgaagaagacagcaacaggctggatgaccacaattaacggcaaggagctgaaggtggagggccagattacctactacaacagatacaagagacagaacgtagtcaaggacctgtccgtcgagctggatagactgagcgaagaatctgtgaacaacgacatctcctcctggacaaagggcagaagcggagaagctctgagcctcctgaagaaaagattctcccatagacccgtgcaggagaagttcgtgtgcctgaactgcggcttcgagacacacgcagccgagcaagccgccctgaacatcgccagatcctggctgttcctgcggagccaggagtacaagaaataccagacaaacaagacaaccggcaacaccgataagagagccttcgtcgagacctggcagtccttttaccggaagaagcttaaggaggtgtggaaacctgccgtgcggtctggcggatctggcggaggctccacaagcgccgaggtgcccgtggccttcgaggacgtggccgtgtacttcacccaggaggagtggggcagcctggacaagaggcagaaggagctgtacagggacgtgatgtggatgaactacgagctgctggccagcctgggccccgccgccgccaagcccgacctgatcagcaagctggagaggagggccgccccctggatcaaggacaccaggggccccaagtggggcaagggcaagaggaagaccgtgaccagccccaagaaaaagagaaaagtctaagctgccttctgcggggcttgccttctggccatgcccttcttctctcccttgcacctgtacctcttggtctttgaataaagcctgagtaggaaggctagcaaaaaaaaaaaaaaaaaaaaaaaaaaaaaaaaaaaaaaaaaaaaaaaaaaaaaaaaaaaaaaaaaaaaaaaaaaaaaaaa

SEQ ID NO: 3012 - RNA, 5419 nt, synthetic construct
  source 1..5419: mol_type = other RNA
aggaaataagagagaaaagaagagtaagaagaaatataagagccaccatggcccctaagaagaagcgtaaagtgagccgggtgaacggcagcggcagcggcggcggcatgaaccacgaccaggagttcgacccccctaaggtgtaccctcccgtccccgccgagaagagaaagcccatccgggtcctgagcctgttcgatggcatcgccaccggtctgctggtgctgaaggacctgggcatccaggtggataggtacattgcctccgaggtgtgcgaggactccatcaccgtgggaatggtgcgtcatcagggcaagatcatgtacgtgggcgacgtgcggagcgtgacacagaagcatatccaggagtggggccctttcgacctggtgatcggcggcagcccttgcaatgacctgagcatcgtgaacccagcccggaagggcctgtacgagggaaccggcagactgttcttcgagttttacagactgctgcacgacgcccggcctaaggaaggcgacgaccggcccttcttttggctgttcgagaatgtggtggccatgggagtcagcgacaagcgggatattagccggttcctggagagcaaccccgtgatgatcgatgccaaggaagtgagcgccgcccaccgggccagatacttctggggcaatctgcctggcatgaacagacccctggccagcaccgtgaacgacaagctggagctgcaggagtgcctggagcacggccggatcgccaagttcagcaaggtgagaaccatcaccacccgaagcaacagcatcaaacaaggcaaggaccagcactttcctgtgttcatgaacgagaaggaggacatcctgtggtgtaccgagatggagagagtgttcgggttcccagtccactacacagatgtcagcaacatgtctagactggccagacagagactgctgggaagaagctggtccgtccctgtgatcagacacctgttcgcccctctgaaggagtacttcgcctgcgtgagcagcggcaacagcaacgccaacagccggggccccagcttctctagcggcctggtgccactgtccctgagagggagccacatgggccccatggagatctacaaaaccgtgagcgcctggaagcggcagcctgtgcgcgtgctgagcctgtttcggaatatcgataaagtcctgaaaagcctgggattcctggagagcggctctggctccggcggtggcaccctgaagtacgtggaggatgtgacaaacgtggtcagacgggatgtggagaagtggggccccttcgatctggtgtacggcagcacccaacccctgggcagctcttgtgaccggtgccctggctggtacatgtttcagttccaccggatcctgcagtacgccctgccgagacaggagtcccagcggccattcttttggattttcatggacaacttgctgctgaccgaggatgaccaggaaactaccactcggttcctgcagaccgaagccgtgaccctgcaggacgtgagaggccgggactaccagaacgccatgcgggtgtggtccaacatccctggactgaaaagcaagcacgcacctctgacccctaaagaagaggagtacctgcaggcccaggtgcggagcagaagcaagctggacgcccctaaggtggatctgctggtgaagaattgcctcctgcccctgagagagtacttcaagtatttcagccagaatagtctgcccctgggcggcccaagcagcggcgcccctcctcccagcggcggcagcccagccggctccccaacctctaccgaggagggcacctctgagtccgccacccccgagagcggccctggcacctccaccgagcccagcgagggcagcgcacccggcagccctgccggcagccccacctccacagaggagggaaccagcaccgagcccagcgaaggcagcgccccaggcaccagcaccgagcctagtgagggcggctctggcggcggcagcgcccaggagattaaacggatcaacaagatcagaagaagacttgtgaaagacagcaacaccaagaaggccggcaagacaggccccatgaaaaccctgctggttagagtgatgacacccgatctgagagagcggctggaaaacctgagaaagaagcctgaaaatatcccccagcccatcagcaatacatctagagccaacctgaataagctgctgaccgattacaccgaaatgaagaaggcgatcctgcatgtgtactgggaagagttccagaaggaccctgtgggcctgatgagccgggtggcccagcctgccagcaagaagatcgatcagaacaagctgaaacctgagatggacgagaagggcaacctgaccaccgccggctttgcctgctctcagtgtggccagcccctgttcgtgtacaagctggagcaggtgtctgagaagggcaaggcttacaccaactacttcggacggtgcaatgtggccgagcacgaaaagctgatcctgctggcccagctgaagcccgagaaggatagcgacgaagccgtgacatatagcctgggaaagtttgggcagagggccctggatttctacagcattcatgtgaccaaggagtccacccaccccgtgaagcccctggcccagatcgccggaaacagatacgcctccggacctgtgggaaaggccctgagcgacgcatgtatgggcacaatcgcctccttcctgtctaagtaccaggacatcatcatcgaacaccagaaggtggtgaagggcaaccagaagagactggagagcctgcgggagctggccggcaaggaaaacctggaataccctagcgtgaccctgccacctcagcctcacaccaaggagggcgttgatgcctacaacgaagtgatcgcccgggtgcgaatgtgggtgaacctgaacctgtggcagaagctgaagctaagcagagatgatgccaagcctctgctgagactgaagggattcccttcctttcctctggtcgagagacaggccaacgaagtggactggtgggacatggtgtgtaacgtgaagaagctgatcaacgagaaaaaggaggatggcaaggtgttttggcagaatctggctggctacaagagacaggaagccctgagaccatacctgagcagcgaggaagatcggaagaagggaaagaaattcgctcggtaccagctgggcgacctgctgctgcacctggaaaagaagcacggcgaggactggggaaaggtgtacgacgaggcctgggagcggattgacaagaaagtggaaggcctgagcaagcacatcaagctggaagaggaacggagaagcgaggacgcccagagcaaggccgccctgaccgactggctgcgggctaaggccagcttcgtgatcgagggcctgaaggaggccgacaaggacgagttctgcagatgcgagctgaagctgcagaagtggtacggggacctgcggggaaagcccttcgccatcgaagccgagaacagcatcctggacatcagcggcttcagcaagcagtacaactgtgccttcatctggcagaaggacggcgtgaagaagctgaacctgtacctgatcatcaactacttcaagggcggcaagctgcggttcaagaagatcaaacctgaagccttcgaagccaacagattctacaccgtgatcaacaaaaagagcggcgagatcgtgcccatggaggtgaacttcaacttcgacgaccccaacctgatcatcctgcctctggcctttggcaagagacagggcagagaattcatctggaacgacctgctgtccctggaaaccggcagcctgaagctggccaacggaagagtgatcgagaagacactgtacaacagaagaacccggcaggatgagcctgccctgttcgtggccctgaccttcgagcggcgggaggtcctggactcctccaatatcaaaccaatgaacctgatcggcgtggcaagaggcgaaaacatccccgccgtgatcgccctgaccgaccccgagggctgcccactgagccggtttaaggatagcctgggaaacccaacccacatcctgagaatcggcgagagctataaggagaagcagcggaccatccaggccaagaaggaggtggagcagcggagagccggcggctacagccggaagtacgccagcaaagccaagaatctggcagacgatatggtgagaaacaccgctagagatctgctgtactacgccgtgacccaggatgccatgctgatcttcgccaacctgagccggggcttcggccggcagggcaagcggaccttcatggccgagagacagtacacacggatggaggactggctgaccgccaagctggcctacgagggcctgagcaagacctacctgtccaagacactggcccagtacacctccaagacatgcagcaactgtgggtttaccatcaccagcgccgactacgacagggtgctggagaagctgaagaagacagcaacaggctggatgaccacaattaacggcaaggagctgaaggtggagggccagattacctactacaacagatacaagagacagaacgtagtcaaggacctgtccgtcgagctggatagactgagcgaagaatctgtgaacaacgacatctcctcctggacaaagggcagaagcggagaagctctgagcctcctgaagaaaagattctcccatagacccgtgcaggagaagttcgtgtgcctgaactgcggcttcgagacacacgcagccgagcaagccgccctgaacatcgccagatcctggctgttcctgcggagccaggagtacaagaaataccagacaaacaagacaaccggcaacaccgataagagagccttcgtcgagacctggcagtccttttaccggaagaagcttaaggaggtgtggaaacctgccgtgcggtctggcggatctggcggaggctccacaagccaccaggagatggtgaccttcgaggacgtggccgtgcacttcaccaagaccgagtggaccggcctgagccccgcccagagggccctgtacaggagcgtgatgctggagaacttcggcaacctgaccgccctgggctaccccgtgcccaagcccgccctgatcagcctgctggagggcggcgacatggcctggggcctggaggcccaggacgacgcccccgccgagaggaccaagaacatctgcaccagccccaagaaaaagagaaaagtctaagctgccttctgcggggcttgccttctggccatgcccttcttctctcccttgcacctgtacctcttggtctttgaataaagcctgagtaggaaggctagcaaaaaaaaaaaaaaaaaaaaaaaaaaaaaaaaaaaaaaaaaaaaaaaaaaaaaaaaaaaaaaaaaaaaaaaaaaaaaaaa

SEQ ID NO: 3013 - RNA, 5419 nt, synthetic construct
  source 1..5419: mol_type = other RNA
aggaaataagagagaaaagaagagtaagaagaaatataagagccaccatggcccctaagaagaagcgtaaagtgagccgggtgaacggcagcggcagcggcggcggcatgaaccacgaccaggagttcgacccccctaaggtgtaccctcccgtccccgccgagaagagaaagcccatccgggtcctgagcctgttcgatggcatcgccaccggtctgctggtgctgaaggacctgggcatccaggtggataggtacattgcctccgaggtgtgcgaggactccatcaccgtgggaatggtgcgtcatcagggcaagatcatgtacgtgggcgacgtgcggagcgtgacacagaagcatatccaggagtggggccctttcgacctggtgatcggcggcagcccttgcaatgacctgagcatcgtgaacccagcccggaagggcctgtacgagggaaccggcagactgttcttcgagttttacagactgctgcacgacgcccggcctaaggaaggcgacgaccggcccttcttttggctgttcgagaatgtggtggccatgggagtcagcgacaagcgggatattagccggttcctggagagcaaccccgtgatgatcgatgccaaggaagtgagcgccgcccaccgggccagatacttctggggcaatctgcctggcatgaacagacccctggccagcaccgtgaacgacaagctggagctgcaggagtgcctggagcacggccggatcgccaagttcagcaaggtgagaaccatcaccacccgaagcaacagcatcaaacaaggcaaggaccagcactttcctgtgttcatgaacgagaaggaggacatcctgtggtgtaccgagatggagagagtgttcgggttcccagtccactacacagatgtcagcaacatgtctagactggccagacagagactgctgggaagaagctggtccgtccctgtgatcagacacctgttcgcccctctgaaggagtacttcgcctgcgtgagcagcggcaacagcaacgccaacagccggggccccagcttctctagcggcctggtgccactgtccctgagagggagccacatgggccccatggagatctacaaaaccgtgagcgcctggaagcggcagcctgtgcgcgtgctgagcctgtttcggaatatcgataaagtcctgaaaagcctgggattcctggagagcggctctggctccggcggtggcaccctgaagtacgtggaggatgtgacaaacgtggtcagacgggatgtggagaagtggggccccttcgatctggtgtacggcagcacccaacccctgggcagctcttgtgaccggtgccctggctggtacatgtttcagttccaccggatcctgcagtacgccctgccgagacaggagtcccagcggccattcttttggattttcatggacaacttgctgctgaccgaggatgaccaggaaactaccactcggttcctgcagaccgaagccgtgaccctgcaggacgtgagaggccgggactaccagaacgccatgcgggtgtggtccaacatccctggactgaaaagcaagcacgcacctctgacccctaaagaagaggagtacctgcaggcccaggtgcggagcagaagcaagctggacgcccctaaggtggatctgctggtgaagaattgcctcctgcccctgagagagtacttcaagtatttcagccagaatagtctgcccctgggcggcccaagcagcggcgcccctcctcccagcggcggcagcccagccggctccccaacctctaccgaggagggcacctctgagtccgccacccccgagagcggccctggcacctccaccgagcccagcgagggcagcgcacccggcagccctgccggcagccccacctccacagaggagggaaccagcaccgagcccagcgaaggcagcgccccaggcaccagcaccgagcctagtgagggcggctctggcggcggcagcgcccaggagattaaacggatcaacaagatcagaagaagacttgtgaaagacagcaacaccaagaaggccggcaagacaggccccatgaaaaccctgctggttagagtgatgacacccgatctgagagagcggctggaaaacctgagaaagaagcctgaaaatatcccccagcccatcagcaatacatctagagccaacctgaataagctgctgaccgattacaccgaaatgaagaaggcgatcctgcatgtgtactgggaagagttccagaaggaccctgtgggcctgatgagccgggtggcccagcctgccagcaagaagatcgatcagaacaagctgaaacctgagatggacgagaagggcaacctgaccaccgccggctttgcctgctctcagtgtggccagcccctgttcgtgtacaagctggagcaggtgtctgagaagggcaaggcttacaccaactacttcggacggtgcaatgtggccgagcacgaaaagctgatcctgctggcccagctgaagcccgagaaggatagcgacgaagccgtgacatatagcctgggaaagtttgggcagagggccctggatttctacagcattcatgtgaccaaggagtccacccaccccgtgaagcccctggcccagatcgccggaaacagatacgcctccggacctgtgggaaaggccctgagcgacgcatgtatgggcacaatcgcctccttcctgtctaagtaccaggacatcatcatcgaacaccagaaggtggtgaagggcaaccagaagagactggagagcctgcgggagctggccggcaaggaaaacctggaataccctagcgtgaccctgccacctcagcctcacaccaaggagggcgttgatgcctacaacgaagtgatcgcccgggtgcgaatgtgggtgaacctgaacctgtggcagaagctgaagctaagcagagatgatgccaagcctctgctgagactgaagggattcccttcctttcctctggtcgagagacaggccaacgaagtggactggtgggacatggtgtgtaacgtgaagaagctgatcaacgagaaaaaggaggatggcaaggtgttttggcagaatctggctggctacaagagacaggaagccctgagaccatacctgagcagcgaggaagatcggaagaagggaaagaaattcgctcggtaccagctgggcgacctgctgctgcacctggaaaagaagcacggcgaggactggggaaaggtgtacgacgaggcctgggagcggattgacaagaaagtggaaggcctgagcaagcacatcaagctggaagaggaacggagaagcgaggacgcccagagcaaggccgccctgaccgactggctgcgggctaaggccagcttcgtgatcgagggcctgaaggaggccgacaaggacgagttctgcagatgcgagctgaagctgcagaagtggtacggggacctgcggggaaagcccttcgccatcgaagccgagaacagcatcctggacatcagcggcttcagcaagcagtacaactgtgccttcatctggcagaaggacggcgtgaagaagctgaacctgtacctgatcatcaactacttcaagggcggcaagctgcggttcaagaagatcaaacctgaagccttcgaagccaacagattctacaccgtgatcaacaaaaagagcggcgagatcgtgcccatggaggtgaacttcaacttcgacgaccccaacctgatcatcctgcctctggcctttggcaagagacagggcagagaattcatctggaacgacctgctgtccctggaaaccggcagcctgaagctggccaacggaagagtgatcgagaagacactgtacaacagaagaacccggcaggatgagcctgccctgttcgtggccctgaccttcgagcggcgggaggtcctggactcctccaatatcaaaccaatgaacctgatcggcgtggcaagaggcgaaaacatccccgccgtgatcgccctgaccgaccccgagggctgcccactgagccggtttaaggatagcctgggaaacccaacccacatcctgagaatcggcgagagctataaggagaagcagcggaccatccaggccaagaaggaggtggagcagcggagagccggcggctacagccggaagtacgccagcaaagccaagaatctggcagacgatatggtgagaaacaccgctagagatctgctgtactacgccgtgacccaggatgccatgctgatcttcgccaacctgagccggggcttcggccggcagggcaagcggaccttcatggccgagagacagtacacacggatggaggactggctgaccgccaagctggcctacgagggcctgagcaagacctacctgtccaagacactggcccagtacacctccaagacatgcagcaactgtgggtttaccatcaccagcgccgactacgacagggtgctggagaagctgaagaagacagcaacaggctggatgaccacaattaacggcaaggagctgaaggtggagggccagattacctactacaacagatacaagagacagaacgtagtcaaggacctgtccgtcgagctggatagactgagcgaagaatctgtgaacaacgacatctcctcctggacaaagggcagaagcggagaagctctgagcctcctgaagaaaagattctcccatagacccgtgcaggagaagttcgtgtgcctgaactgcggcttcgagacacacgcagccgagcaagccgccctgaacatcgccagatcctggctgttcctgcggagccaggagtacaagaaataccagacaaacaagacaaccggcaacaccgataagagagccttcgtcgagacctggcagtccttttaccggaagaagcttaaggaggtgtggaaacctgccgtgcggtctggcggatctggcggaggctccacaagcaagctgaagcccgtgaagttccaggacgtggccgtgtacttcagcgaggaggagtggcagctgctggagaaccagcagaaggagctgtacaggagcgtgatgaaggagaactacgagaacctgaccagcctgggcttcaccaccaccaagcccaacatcctgaagaggatggagcagggcaggcccctgtgggtgagcaccaggaggaaggtgatcaagcacagcttcagggagggcgagcccaccagccccaagaaaaagagaaaagtctaagctgccttctgcggggcttgccttctggccatgcccttcttctctcccttgcacctgtacctcttggtctttgaataaagcctgagtaggaaggctagcaaaaaaaaaaaaaaaaaaaaaaaaaaaaaaaaaaaaaaaaaaaaaaaaaaaaaaaaaaaaaaaaaaaaaaaaaaaaaaaa

SEQ ID NO: 3014 - RNA, 5419 nt, synthetic construct
  source 1..5419: mol_type = other RNA
aggaaataagagagaaaagaagagtaagaagaaatataagagccaccatggcccctaagaagaagcgtaaagtgagccgggtgaacggcagcggcagcggcggcggcatgaaccacgaccaggagttcgacccccctaaggtgtaccctcccgtccccgccgagaagagaaagcccatccgggtcctgagcctgttcgatggcatcgccaccggtctgctggtgctgaaggacctgggcatccaggtggataggtacattgcctccgaggtgtgcgaggactccatcaccgtgggaatggtgcgtcatcagggcaagatcatgtacgtgggcgacgtgcggagcgtgacacagaagcatatccaggagtggggccctttcgacctggtgatcggcggcagcccttgcaatgacctgagcatcgtgaacccagcccggaagggcctgtacgagggaaccggcagactgttcttcgagttttacagactgctgcacgacgcccggcctaaggaaggcgacgaccggcccttcttttggctgttcgagaatgtggtggccatgggagtcagcgacaagcgggatattagccggttcctggagagcaaccccgtgatgatcgatgccaaggaagtgagcgccgcccaccgggccagatacttctggggcaatctgcctggcatgaacagacccctggccagcaccgtgaacgacaagctggagctgcaggagtgcctggagcacggccggatcgccaagttcagcaaggtgagaaccatcaccacccgaagcaacagcatcaaacaaggcaaggaccagcactttcctgtgttcatgaacgagaaggaggacatcctgtggtgtaccgagatggagagagtgttcgggttcccagtccactacacagatgtcagcaacatgtctagactggccagacagagactgctgggaagaagctggtccgtccctgtgatcagacacctgttcgcccctctgaaggagtacttcgcctgcgtgagcagcggcaacagcaacgccaacagccggggccccagcttctctagcggcctggtgccactgtccctgagagggagccacatgggccccatggagatctacaaaaccgtgagcgcctggaagcggcagcctgtgcgcgtgctgagcctgtttcggaatatcgataaagtcctgaaaagcctgggattcctggagagcggctctggctccggcggtggcaccctgaagtacgtggaggatgtgacaaacgtggtcagacgggatgtggagaagtggggccccttcgatctggtgtacggcagcacccaacccctgggcagctcttgtgaccggtgccctggctggtacatgtttcagttccaccggatcctgcagtacgccctgccgagacaggagtcccagcggccattcttttggattttcatggacaacttgctgctgaccgaggatgaccaggaaactaccactcggttcctgcagaccgaagccgtgaccctgcaggacgtgagaggccgggactaccagaacgccatgcgggtgtggtccaacatccctggactgaaaagcaagcacgcacctctgacccctaaagaagaggagtacctgcaggcccaggtgcggagcagaagcaagctggacgcccctaaggtggatctgctggtgaagaattgcctcctgcccctgagagagtacttcaagtatttcagccagaatagtctgcccctgggcggcccaagcagcggcgcccctcctcccagcggcggcagcccagccggctccccaacctctaccgaggagggcacctctgagtccgccacccccgagagcggccctggcacctccaccgagcccagcgagggcagcgcacccggcagccctgccggcagccccacctccacagaggagggaaccagcaccgagcccagcgaaggcagcgccccaggcaccagcaccgagcctagtgagggcggctctggcggcggcagcgcccaggagattaaacggatcaacaagatcagaagaagacttgtgaaagacagcaacaccaagaaggccggcaagacaggccccatgaaaaccctgctggttagagtgatgacacccgatctgagagagcggctggaaaacctgagaaagaagcctgaaaatatcccccagcccatcagcaatacatctagagccaacctgaataagctgctgaccgattacaccgaaatgaagaaggcgatcctgcatgtgtactgggaagagttccagaaggaccctgtgggcctgatgagccgggtggcccagcctgccagcaagaagatcgatcagaacaagctgaaacctgagatggacgagaagggcaacctgaccaccgccggctttgcctgctctcagtgtggccagcccctgttcgtgtacaagctggagcaggtgtctgagaagggcaaggcttacaccaactacttcggacggtgcaatgtggccgagcacgaaaagctgatcctgctggcccagctgaagcccgagaaggatagcgacgaagccgtgacatatagcctgggaaagtttgggcagagggccctggatttctacagcattcatgtgaccaaggagtccacccaccccgtgaagcccctggcccagatcgccggaaacagatacgcctccggacctgtgggaaaggccctgagcgacgcatgtatgggcacaatcgcctccttcctgtctaagtaccaggacatcatcatcgaacaccagaaggtggtgaagggcaaccagaagagactggagagcctgcgggagctggccggcaaggaaaacctggaataccctagcgtgaccctgccacctcagcctcacaccaaggagggcgttgatgcctacaacgaagtgatcgcccgggtgcgaatgtgggtgaacctgaacctgtggcagaagctgaagctaagcagagatgatgccaagcctctgctgagactgaagggattcccttcctttcctctggtcgagagacaggccaacgaagtggactggtgggacatggtgtgtaacgtgaagaagctgatcaacgagaaaaaggaggatggcaaggtgttttggcagaatctggctggctacaagagacaggaagccctgagaccatacctgagcagcgaggaagatcggaagaagggaaagaaattcgctcggtaccagctgggcgacctgctgctgcacctggaaaagaagcacggcgaggactggggaaaggtgtacgacgaggcctgggagcggattgacaagaaagtggaaggcctgagcaagcacatcaagctggaagaggaacggagaagcgaggacgcccagagcaaggccgccctgaccgactggctgcgggctaaggccagcttcgtgatcgagggcctgaaggaggccgacaaggacgagttctgcagatgcgagctgaagctgcagaagtggtacggggacctgcggggaaagcccttcgccatcgaagccgagaacagcatcctggacatcagcggcttcagcaagcagtacaactgtgccttcatctggcagaaggacggcgtgaagaagctgaacctgtacctgatcatcaactacttcaagggcggcaagctgcggttcaagaagatcaaacctgaagccttcgaagccaacagattctacaccgtgatcaacaaaaagagcggcgagatcgtgcccatggaggtgaacttcaacttcgacgaccccaacctgatcatcctgcctctggcctttggcaagagacagggcagagaattcatctggaacgacctgctgtccctggaaaccggcagcctgaagctggccaacggaagagtgatcgagaagacactgtacaacagaagaacccggcaggatgagcctgccctgttcgtggccctgaccttcgagcggcgggaggtcctggactcctccaatatcaaaccaatgaacctgatcggcgtggcaagaggcgaaaacatccccgccgtgatcgccctgaccgaccccgagggctgcccactgagccggtttaaggatagcctgggaaacccaacccacatcctgagaatcggcgagagctataaggagaagcagcggaccatccaggccaagaaggaggtggagcagcggagagccggcggctacagccggaagtacgccagcaaagccaagaatctggcagacgatatggtgagaaacaccgctagagatctgctgtactacgccgtgacccaggatgccatgctgatcttcgccaacctgagccggggcttcggccggcagggcaagcggaccttcatggccgagagacagtacacacggatggaggactggctgaccgccaagctggcctacgagggcctgagcaagacctacctgtccaagacactggcccagtacacctccaagacatgcagcaactgtgggtttaccatcaccagcgccgactacgacagggtgctggagaagctgaagaagacagcaacaggctggatgaccacaattaacggcaaggagctgaaggtggagggccagattacctactacaacagatacaagagacagaacgtagtcaaggacctgtccgtcgagctggatagactgagcgaagaatctgtgaacaacgacatctcctcctggacaaagggcagaagcggagaagctctgagcctcctgaagaaaagattctcccatagacccgtgcaggagaagttcgtgtgcctgaactgcggcttcgagacacacgcagccgagcaagccgccctgaacatcgccagatcctggctgttcctgcggagccaggagtacaagaaataccagacaaacaagacaaccggcaacaccgataagagagccttcgtcgagacctggcagtccttttaccggaagaagcttaaggaggtgtggaaacctgccgtgcggtctggcggatctggcggaggctccacaagcgaggaggtgcccgtggtgttcgaggacgtggccgtgtacttcaccagggaggagtgggccgccctggacaagaggcagaaggagctgtacagggacgtgatgaggaccaactacgagctgctggccagcctgggccccgccgccgccaagcccgacctgatcagcaagctggagaggagggccgccccctggatcagggaccccgacggccccgagtggggcaagggcaggccccccggcaagaccagccccaagaaaaagagaaaagtctaagctgccttctgcggggcttgccttctggccatgcccttcttctctcccttgcacctgtacctcttggtctttgaataaagcctgagtaggaaggctagcaaaaaaaaaaaaaaaaaaaaaaaaaaaaaaaaaaaaaaaaaaaaaaaaaaaaaaaaaaaaaaaaaaaaaaaaaaaaaaaa

SEQ ID NO: 3015 - RNA, 5419 nt, synthetic construct
  source 1..5419: mol_type = other RNA
aggaaataagagagaaaagaagagtaagaagaaatataagagccaccatggcccctaagaagaagcgtaaagtgagccgggtgaacggcagcggcagcggcggcggcatgaaccacgaccaggagttcgacccccctaaggtgtaccctcccgtccccgccgagaagagaaagcccatccgggtcctgagcctgttcgatggcatcgccaccggtctgctggtgctgaaggacctgggcatccaggtggataggtacattgcctccgaggtgtgcgaggactccatcaccgtgggaatggtgcgtcatcagggcaagatcatgtacgtgggcgacgtgcggagcgtgacacagaagcatatccaggagtggggccctttcgacctggtgatcggcggcagcccttgcaatgacctgagcatcgtgaacccagcccggaagggcctgtacgagggaaccggcagactgttcttcgagttttacagactgctgcacgacgcccggcctaaggaaggcgacgaccggcccttcttttggctgttcgagaatgtggtggccatgggagtcagcgacaagcgggatattagccggttcctggagagcaaccccgtgatgatcgatgccaaggaagtgagcgccgcccaccgggccagatacttctggggcaatctgcctggcatgaacagacccctggccagcaccgtgaacgacaagctggagctgcaggagtgcctggagcacggccggatcgccaagttcagcaaggtgagaaccatcaccacccgaagcaacagcatcaaacaaggcaaggaccagcactttcctgtgttcatgaacgagaaggaggacatcctgtggtgtaccgagatggagagagtgttcgggttcccagtccactacacagatgtcagcaacatgtctagactggccagacagagactgctgggaagaagctggtccgtccctgtgatcagacacctgttcgcccctctgaaggagtacttcgcctgcgtgagcagcggcaacagcaacgccaacagccggggccccagcttctctagcggcctggtgccactgtccctgagagggagccacatgggccccatggagatctacaaaaccgtgagcgcctggaagcggcagcctgtgcgcgtgctgagcctgtttcggaatatcgataaagtcctgaaaagcctgggattcctggagagcggctctggctccggcggtggcaccctgaagtacgtggaggatgtgacaaacgtggtcagacgggatgtggagaagtggggccccttcgatctggtgtacggcagcacccaacccctgggcagctcttgtgaccggtgccctggctggtacatgtttcagttccaccggatcctgcagtacgccctgccgagacaggagtcccagcggccattcttttggattttcatggacaacttgctgctgaccgaggatgaccaggaaactaccactcggttcctgcagaccgaagccgtgaccctgcaggacgtgagaggccgggactaccagaacgccatgcgggtgtggtccaacatccctggactgaaaagcaagcacgcacctctgacccctaaagaagaggagtacctgcaggcccaggtgcggagcagaagcaagctggacgcccctaaggtggatctgctggtgaagaattgcctcctgcccctgagagagtacttcaagtatttcagccagaatagtctgcccctgggcggcccaagcagcggcgcccctcctcccagcggcggcagcccagccggctccccaacctctaccgaggagggcacctctgagtccgccacccccgagagcggccctggcacctccaccgagcccagcgagggcagcgcacccggcagccctgccggcagccccacctccacagaggagggaaccagcaccgagcccagcgaaggcagcgccccaggcaccagcaccgagcctagtgagggcggctctggcggcggcagcgcccaggagattaaacggatcaacaagatcagaagaagacttgtgaaagacagcaacaccaagaaggccggcaagacaggccccatgaaaaccctgctggttagagtgatgacacccgatctgagagagcggctggaaaacctgagaaagaagcctgaaaatatcccccagcccatcagcaatacatctagagccaacctgaataagctgctgaccgattacaccgaaatgaagaaggcgatcctgcatgtgtactgggaagagttccagaaggaccctgtgggcctgatgagccgggtggcccagcctgccagcaagaagatcgatcagaacaagctgaaacctgagatggacgagaagggcaacctgaccaccgccggctttgcctgctctcagtgtggccagcccctgttcgtgtacaagctggagcaggtgtctgagaagggcaaggcttacaccaactacttcggacggtgcaatgtggccgagcacgaaaagctgatcctgctggcccagctgaagcccgagaaggatagcgacgaagccgtgacatatagcctgggaaagtttgggcagagggccctggatttctacagcattcatgtgaccaaggagtccacccaccccgtgaagcccctggcccagatcgccggaaacagatacgcctccggacctgtgggaaaggccctgagcgacgcatgtatgggcacaatcgcctccttcctgtctaagtaccaggacatcatcatcgaacaccagaaggtggtgaagggcaaccagaagagactggagagcctgcgggagctggccggcaaggaaaacctggaataccctagcgtgaccctgccacctcagcctcacaccaaggagggcgttgatgcctacaacgaagtgatcgcccgggtgcgaatgtgggtgaacctgaacctgtggcagaagctgaagctaagcagagatgatgccaagcctctgctgagactgaagggattcccttcctttcctctggtcgagagacaggccaacgaagtggactggtgggacatggtgtgtaacgtgaagaagctgatcaacgagaaaaaggaggatggcaaggtgttttggcagaatctggctggctacaagagacaggaagccctgagaccatacctgagcagcgaggaagatcggaagaagggaaagaaattcgctcggtaccagctgggcgacctgctgctgcacctggaaaagaagcacggcgaggactggggaaaggtgtacgacgaggcctgggagcggattgacaagaaagtggaaggcctgagcaagcacatcaagctggaagaggaacggagaagcgaggacgcccagagcaaggccgccctgaccgactggctgcgggctaaggccagcttcgtgatcgagggcctgaaggaggccgacaaggacgagttctgcagatgcgagctgaagctgcagaagtggtacggggacctgcggggaaagcccttcgccatcgaagccgagaacagcatcctggacatcagcggcttcagcaagcagtacaactgtgccttcatctggcagaaggacggcgtgaagaagctgaacctgtacctgatcatcaactacttcaagggcggcaagctgcggttcaagaagatcaaacctgaagccttcgaagccaacagattctacaccgtgatcaacaaaaagagcggcgagatcgtgcccatggaggtgaacttcaacttcgacgaccccaacctgatcatcctgcctctggcctttggcaagagacagggcagagaattcatctggaacgacctgctgtccctggaaaccggcagcctgaagctggccaacggaagagtgatcgagaagacactgtacaacagaagaacccggcaggatgagcctgccctgttcgtggccctgaccttcgagcggcgggaggtcctggactcctccaatatcaaaccaatgaacctgatcggcgtggcaagaggcgaaaacatccccgccgtgatcgccctgaccgaccccgagggctgcccactgagccggtttaaggatagcctgggaaacccaacccacatcctgagaatcggcgagagctataaggagaagcagcggaccatccaggccaagaaggaggtggagcagcggagagccggcggctacagccggaagtacgccagcaaagccaagaatctggcagacgatatggtgagaaacaccgctagagatctgctgtactacgccgtgacccaggatgccatgctgatcttcgccaacctgagccggggcttcggccggcagggcaagcggaccttcatggccgagagacagtacacacggatggaggactggctgaccgccaagctggcctacgagggcctgagcaagacctacctgtccaagacactggcccagtacacctccaagacatgcagcaactgtgggtttaccatcaccagcgccgactacgacagggtgctggagaagctgaagaagacagcaacaggctggatgaccacaattaacggcaaggagctgaaggtggagggccagattacctactacaacagatacaagagacagaacgtagtcaaggacctgtccgtcgagctggatagactgagcgaagaatctgtgaacaacgacatctcctcctggacaaagggcagaagcggagaagctctgagcctcctgaagaaaagattctcccatagacccgtgcaggagaagttcgtgtgcctgaactgcggcttcgagacacacgcagccgagcaagccgccctgaacatcgccagatcctggctgttcctgcggagccaggagtacaagaaataccagacaaacaagacaaccggcaacaccgataagagagccttcgtcgagacctggcagtccttttaccggaagaagcttaaggaggtgtggaaacctgccgtgcggtctggcggatctggcggaggctccacaagcagccagagcctggtgaccttcggcgacgtggccgtggacttcagccaggaggagtgggagtggctgaacagcgcccagaggaacctgtacaggagcgtgatgctggagaactacaggaacctggtgagcctgggcctgtgcgtgagcaagcccgacgtgatcagcagcctggagcagaggaaggagccctggatggtgaagaggaagctgaccaggggcaggtgccccgacctgaagaccgtgaccagccccaagaaaaagagaaaagtctaagctgccttctgcggggcttgccttctggccatgcccttcttctctcccttgcacctgtacctcttggtctttgaataaagcctgagtaggaaggctagcaaaaaaaaaaaaaaaaaaaaaaaaaaaaaaaaaaaaaaaaaaaaaaaaaaaaaaaaaaaaaaaaaaaaaaaaaaaaaaaa

SEQ ID NO: 3016 - RNA, 5419 nt, synthetic construct
  source 1..5419: mol_type = other RNA
aggaaataagagagaaaagaagagtaagaagaaatataagagccaccatggcccctaagaagaagcgtaaagtgagccgggtgaacggcagcggcagcggcggcggcatgaaccacgaccaggagttcgacccccctaaggtgtaccctcccgtccccgccgagaagagaaagcccatccgggtcctgagcctgttcgatggcatcgccaccggtctgctggtgctgaaggacctgggcatccaggtggataggtacattgcctccgaggtgtgcgaggactccatcaccgtgggaatggtgcgtcatcagggcaagatcatgtacgtgggcgacgtgcggagcgtgacacagaagcatatccaggagtggggccctttcgacctggtgatcggcggcagcccttgcaatgacctgagcatcgtgaacccagcccggaagggcctgtacgagggaaccggcagactgttcttcgagttttacagactgctgcacgacgcccggcctaaggaaggcgacgaccggcccttcttttggctgttcgagaatgtggtggccatgggagtcagcgacaagcgggatattagccggttcctggagagcaaccccgtgatgatcgatgccaaggaagtgagcgccgcccaccgggccagatacttctggggcaatctgcctggcatgaacagacccctggccagcaccgtgaacgacaagctggagctgcaggagtgcctggagcacggccggatcgccaagttcagcaaggtgagaaccatcaccacccgaagcaacagcatcaaacaaggcaaggaccagcactttcctgtgttcatgaacgagaaggaggacatcctgtggtgtaccgagatggagagagtgttcgggttcccagtccactacacagatgtcagcaacatgtctagactggccagacagagactgctgggaagaagctggtccgtccctgtgatcagacacctgttcgcccctctgaaggagtacttcgcctgcgtgagcagcggcaacagcaacgccaacagccggggccccagcttctctagcggcctggtgccactgtccctgagagggagccacatgggccccatggagatctacaaaaccgtgagcgcctggaagcggcagcctgtgcgcgtgctgagcctgtttcggaatatcgataaagtcctgaaaagcctgggattcctggagagcggctctggctccggcggtggcaccctgaagtacgtggaggatgtgacaaacgtggtcagacgggatgtggagaagtggggccccttcgatctggtgtacggcagcacccaacccctgggcagctcttgtgaccggtgccctggctggtacatgtttcagttccaccggatcctgcagtacgccctgccgagacaggagtcccagcggccattcttttggattttcatggacaacttgctgctgaccgaggatgaccaggaaactaccactcggttcctgcagaccgaagccgtgaccctgcaggacgtgagaggccgggactaccagaacgccatgcgggtgtggtccaacatccctggactgaaaagcaagcacgcacctctgacccctaaagaagaggagtacctgcaggcccaggtgcggagcagaagcaagctggacgcccctaaggtggatctgctggtgaagaattgcctcctgcccctgagagagtacttcaagtatttcagccagaatagtctgcccctgggcggcccaagcagcggcgcccctcctcccagcggcggcagcccagccggctccccaacctctaccgaggagggcacctctgagtccgccacccccgagagcggccctggcacctccaccgagcccagcgagggcagcgcacccggcagccctgccggcagccccacctccacagaggagggaaccagcaccgagcccagcgaaggcagcgccccaggcaccagcaccgagcctagtgagggcggctctggcggcggcagcgcccaggagattaaacggatcaacaagatcagaagaagacttgtgaaagacagcaacaccaagaaggccggcaagacaggccccatgaaaaccctgctggttagagtgatgacacccgatctgagagagcggctggaaaacctgagaaagaagcctgaaaatatcccccagcccatcagcaatacatctagagccaacctgaataagctgctgaccgattacaccgaaatgaagaaggcgatcctgcatgtgtactgggaagagttccagaaggaccctgtgggcctgatgagccgggtggcccagcctgccagcaagaagatcgatcagaacaagctgaaacctgagatggacgagaagggcaacctgaccaccgccggctttgcctgctctcagtgtggccagcccctgttcgtgtacaagctggagcaggtgtctgagaagggcaaggcttacaccaactacttcggacggtgcaatgtggccgagcacgaaaagctgatcctgctggcccagctgaagcccgagaaggatagcgacgaagccgtgacatatagcctgggaaagtttgggcagagggccctggatttctacagcattcatgtgaccaaggagtccacccaccccgtgaagcccctggcccagatcgccggaaacagatacgcctccggacctgtgggaaaggccctgagcgacgcatgtatgggcacaatcgcctccttcctgtctaagtaccaggacatcatcatcgaacaccagaaggtggtgaagggcaaccagaagagactggagagcctgcgggagctggccggcaaggaaaacctggaataccctagcgtgaccctgccacctcagcctcacaccaaggagggcgttgatgcctacaacgaagtgatcgcccgggtgcgaatgtgggtgaacctgaacctgtggcagaagctgaagctaagcagagatgatgccaagcctctgctgagactgaagggattcccttcctttcctctggtcgagagacaggccaacgaagtggactggtgggacatggtgtgtaacgtgaagaagctgatcaacgagaaaaaggaggatggcaaggtgttttggcagaatctggctggctacaagagacaggaagccctgagaccatacctgagcagcgaggaagatcggaagaagggaaagaaattcgctcggtaccagctgggcgacctgctgctgcacctggaaaagaagcacggcgaggactggggaaaggtgtacgacgaggcctgggagcggattgacaagaaagtggaaggcctgagcaagcacatcaagctggaagaggaacggagaagcgaggacgcccagagcaaggccgccctgaccgactggctgcgggctaaggccagcttcgtgatcgagggcctgaaggaggccgacaaggacgagttctgcagatgcgagctgaagctgcagaagtggtacggggacctgcggggaaagcccttcgccatcgaagccgagaacagcatcctggacatcagcggcttcagcaagcagtacaactgtgccttcatctggcagaaggacggcgtgaagaagctgaacctgtacctgatcatcaactacttcaagggcggcaagctgcggttcaagaagatcaaacctgaagccttcgaagccaacagattctacaccgtgatcaacaaaaagagcggcgagatcgtgcccatggaggtgaacttcaacttcgacgaccccaacctgatcatcctgcctctggcctttggcaagagacagggcagagaattcatctggaacgacctgctgtccctggaaaccggcagcctgaagctggccaacggaagagtgatcgagaagacactgtacaacagaagaacccggcaggatgagcctgccctgttcgtggccctgaccttcgagcggcgggaggtcctggactcctccaatatcaaaccaatgaacctgatcggcgtggcaagaggcgaaaacatccccgccgtgatcgccctgaccgaccccgagggctgcccactgagccggtttaaggatagcctgggaaacccaacccacatcctgagaatcggcgagagctataaggagaagcagcggaccatccaggccaagaaggaggtggagcagcggagagccggcggctacagccggaagtacgccagcaaagccaagaatctggcagacgatatggtgagaaacaccgctagagatctgctgtactacgccgtgacccaggatgccatgctgatcttcgccaacctgagccggggcttcggccggcagggcaagcggaccttcatggccgagagacagtacacacggatggaggactggctgaccgccaagctggcctacgagggcctgagcaagacctacctgtccaagacactggcccagtacacctccaagacatgcagcaactgtgggtttaccatcaccagcgccgactacgacagggtgctggagaagctgaagaagacagcaacaggctggatgaccacaattaacggcaaggagctgaaggtggagggccagattacctactacaacagatacaagagacagaacgtagtcaaggacctgtccgtcgagctggatagactgagcgaagaatctgtgaacaacgacatctcctcctggacaaagggcagaagcggagaagctctgagcctcctgaagaaaagattctcccatagacccgtgcaggagaagttcgtgtgcctgaactgcggcttcgagacacacgcagccgagcaagccgccctgaacatcgccagatcctggctgttcctgcggagccaggagtacaagaaataccagacaaacaagacaaccggcaacaccgataagagagccttcgtcgagacctggcagtccttttaccggaagaagcttaaggaggtgtggaaacctgccgtgcggtctggcggatctggcggaggctccacaagcgcccaggagagcgtgatgttcagcgacgtgagcatcgacttcagccaggaggagtgggagtgcctgaacgacgaccagagggccctgtacagggacgtgatgctggagaactacagcaacctggtgagcatggccggccacagcatcagcaagcccgacgtgatcagcttcctggagcagggcaaggagccctggctggtggacagggagctgaccaggggccagtggcccgtgctggagagcaccagccccaagaaaaagagaaaagtctaagctgccttctgcggggcttgccttctggccatgcccttcttctctcccttgcacctgtacctcttggtctttgaataaagcctgagtaggaaggctagcaaaaaaaaaaaaaaaaaaaaaaaaaaaaaaaaaaaaaaaaaaaaaaaaaaaaaaaaaaaaaaaaaaaaaaaaaaaaaaaa

SEQ ID NO: 3017 - RNA, 5419 nt, synthetic construct
  source 1..5419: mol_type = other RNA
aggaaataagagagaaaagaagagtaagaagaaatataagagccaccatggcccctaagaagaagcgtaaagtgagccgggtgaacggcagcggcagcggcggcggcatgaaccacgaccaggagttcgacccccctaaggtgtaccctcccgtccccgccgagaagagaaagcccatccgggtcctgagcctgttcgatggcatcgccaccggtctgctggtgctgaaggacctgggcatccaggtggataggtacattgcctccgaggtgtgcgaggactccatcaccgtgggaatggtgcgtcatcagggcaagatcatgtacgtgggcgacgtgcggagcgtgacacagaagcatatccaggagtggggccctttcgacctggtgatcggcggcagcccttgcaatgacctgagcatcgtgaacccagcccggaagggcctgtacgagggaaccggcagactgttcttcgagttttacagactgctgcacgacgcccggcctaaggaaggcgacgaccggcccttcttttggctgttcgagaatgtggtggccatgggagtcagcgacaagcgggatattagccggttcctggagagcaaccccgtgatgatcgatgccaaggaagtgagcgccgcccaccgggccagatacttctggggcaatctgcctggcatgaacagacccctggccagcaccgtgaacgacaagctggagctgcaggagtgcctggagcacggccggatcgccaagttcagcaaggtgagaaccatcaccacccgaagcaacagcatcaaacaaggcaaggaccagcactttcctgtgttcatgaacgagaaggaggacatcctgtggtgtaccgagatggagagagtgttcgggttcccagtccactacacagatgtcagcaacatgtctagactggccagacagagactgctgggaagaagctggtccgtccctgtgatcagacacctgttcgcccctctgaaggagtacttcgcctgcgtgagcagcggcaacagcaacgccaacagccggggccccagcttctctagcggcctggtgccactgtccctgagagggagccacatgggccccatggagatctacaaaaccgtgagcgcctggaagcggcagcctgtgcgcgtgctgagcctgtttcggaatatcgataaagtcctgaaaagcctgggattcctggagagcggctctggctccggcggtggcaccctgaagtacgtggaggatgtgacaaacgtggtcagacgggatgtggagaagtggggccccttcgatctggtgtacggcagcacccaacccctgggcagctcttgtgaccggtgccctggctggtacatgtttcagttccaccggatcctgcagtacgccctgccgagacaggagtcccagcggccattcttttggattttcatggacaacttgctgctgaccgaggatgaccaggaaactaccactcggttcctgcagaccgaagccgtgaccctgcaggacgtgagaggccgggactaccagaacgccatgcgggtgtggtccaacatccctggactgaaaagcaagcacgcacctctgacccctaaagaagaggagtacctgcaggcccaggtgcggagcagaagcaagctggacgcccctaaggtggatctgctggtgaagaattgcctcctgcccctgagagagtacttcaagtatttcagccagaatagtctgcccctgggcggcccaagcagcggcgcccctcctcccagcggcggcagcccagccggctccccaacctctaccgaggagggcacctctgagtccgccacccccgagagcggccctggcacctccaccgagcccagcgagggcagcgcacccggcagccctgccggcagccccacctccacagaggagggaaccagcaccgagcccagcgaaggcagcgccccaggcaccagcaccgagcctagtgagggcggctctggcggcggcagcgcccaggagattaaacggatcaacaagatcagaagaagacttgtgaaagacagcaacaccaagaaggccggcaagacaggccccatgaaaaccctgctggttagagtgatgacacccgatctgagagagcggctggaaaacctgagaaagaagcctgaaaatatcccccagcccatcagcaatacatctagagccaacctgaataagctgctgaccgattacaccgaaatgaagaaggcgatcctgcatgtgtactgggaagagttccagaaggaccctgtgggcctgatgagccgggtggcccagcctgccagcaagaagatcgatcagaacaagctgaaacctgagatggacgagaagggcaacctgaccaccgccggctttgcctgctctcagtgtggccagcccctgttcgtgtacaagctggagcaggtgtctgagaagggcaaggcttacaccaactacttcggacggtgcaatgtggccgagcacgaaaagctgatcctgctggcccagctgaagcccgagaaggatagcgacgaagccgtgacatatagcctgggaaagtttgggcagagggccctggatttctacagcattcatgtgaccaaggagtccacccaccccgtgaagcccctggcccagatcgccggaaacagatacgcctccggacctgtgggaaaggccctgagcgacgcatgtatgggcacaatcgcctccttcctgtctaagtaccaggacatcatcatcgaacaccagaaggtggtgaagggcaaccagaagagactggagagcctgcgggagctggccggcaaggaaaacctggaataccctagcgtgaccctgccacctcagcctcacaccaaggagggcgttgatgcctacaacgaagtgatcgcccgggtgcgaatgtgggtgaacctgaacctgtggcagaagctgaagctaagcagagatgatgccaagcctctgctgagactgaagggattcccttcctttcctctggtcgagagacaggccaacgaagtggactggtgggacatggtgtgtaacgtgaagaagctgatcaacgagaaaaaggaggatggcaaggtgttttggcagaatctggctggctacaagagacaggaagccctgagaccatacctgagcagcgaggaagatcggaagaagggaaagaaattcgctcggtaccagctgggcgacctgctgctgcacctggaaaagaagcacggcgaggactggggaaaggtgtacgacgaggcctgggagcggattgacaagaaagtggaaggcctgagcaagcacatcaagctggaagaggaacggagaagcgaggacgcccagagcaaggccgccctgaccgactggctgcgggctaaggccagcttcgtgatcgagggcctgaaggaggccgacaaggacgagttctgcagatgcgagctgaagctgcagaagtggtacggggacctgcggggaaagcccttcgccatcgaagccgagaacagcatcctggacatcagcggcttcagcaagcagtacaactgtgccttcatctggcagaaggacggcgtgaagaagctgaacctgtacctgatcatcaactacttcaagggcggcaagctgcggttcaagaagatcaaacctgaagccttcgaagccaacagattctacaccgtgatcaacaaaaagagcggcgagatcgtgcccatggaggtgaacttcaacttcgacgaccccaacctgatcatcctgcctctggcctttggcaagagacagggcagagaattcatctggaacgacctgctgtccctggaaaccggcagcctgaagctggccaacggaagagtgatcgagaagacactgtacaacagaagaacccggcaggatgagcctgccctgttcgtggccctgaccttcgagcggcgggaggtcctggactcctccaatatcaaaccaatgaacctgatcggcgtggcaagaggcgaaaacatccccgccgtgatcgccctgaccgaccccgagggctgcccactgagccggtttaaggatagcctgggaaacccaacccacatcctgagaatcggcgagagctataaggagaagcagcggaccatccaggccaagaaggaggtggagcagcggagagccggcggctacagccggaagtacgccagcaaagccaagaatctggcagacgatatggtgagaaacaccgctagagatctgctgtactacgccgtgacccaggatgccatgctgatcttcgccaacctgagccggggcttcggccggcagggcaagcggaccttcatggccgagagacagtacacacggatggaggactggctgaccgccaagctggcctacgagggcctgagcaagacctacctgtccaagacactggcccagtacacctccaagacatgcagcaactgtgggtttaccatcaccagcgccgactacgacagggtgctggagaagctgaagaagacagcaacaggctggatgaccacaattaacggcaaggagctgaaggtggagggccagattacctactacaacagatacaagagacagaacgtagtcaaggacctgtccgtcgagctggatagactgagcgaagaatctgtgaacaacgacatctcctcctggacaaagggcagaagcggagaagctctgagcctcctgaagaaaagattctcccatagacccgtgcaggagaagttcgtgtgcctgaactgcggcttcgagacacacgcagccgagcaagccgccctgaacatcgccagatcctggctgttcctgcggagccaggagtacaagaaataccagacaaacaagacaaccggcaacaccgataagagagccttcgtcgagacctggcagtccttttaccggaagaagcttaaggaggtgtggaaacctgccgtgcggtctggcggatctggcggaggctccacaagcgcccaccacctggtgatgttcagggacgtggccgtggacttcagccaggacgagtgggagtgcctgaacagctaccagaggaacctgtacagggacgtgatcctggagaactacagcaacctggtgagcgtggccggctgcagcatcagcaagcccgacgtgatcaccctgctggagcagggcagggagccctggatggtggtgagggacgagaggaggaggaggaccctggacctggagagcaccagccccaagaaaaagagaaaagtctaagctgccttctgcggggcttgccttctggccatgcccttcttctctcccttgcacctgtacctcttggtctttgaataaagcctgagtaggaaggctagcaaaaaaaaaaaaaaaaaaaaaaaaaaaaaaaaaaaaaaaaaaaaaaaaaaaaaaaaaaaaaaaaaaaaaaaaaaaaaaaa

SEQ ID NO: 3018 - RNA, 5419 nt, synthetic construct
  source 1..5419: mol_type = other RNA
aggaaataagagagaaaagaagagtaagaagaaatataagagccaccatggcccctaagaagaagcgtaaagtgagccgggtgaacggcagcggcagcggcggcggcatgaaccacgaccaggagttcgacccccctaaggtgtaccctcccgtccccgccgagaagagaaagcccatccgggtcctgagcctgttcgatggcatcgccaccggtctgctggtgctgaaggacctgggcatccaggtggataggtacattgcctccgaggtgtgcgaggactccatcaccgtgggaatggtgcgtcatcagggcaagatcatgtacgtgggcgacgtgcggagcgtgacacagaagcatatccaggagtggggccctttcgacctggtgatcggcggcagcccttgcaatgacctgagcatcgtgaacccagcccggaagggcctgtacgagggaaccggcagactgttcttcgagttttacagactgctgcacgacgcccggcctaaggaaggcgacgaccggcccttcttttggctgttcgagaatgtggtggccatgggagtcagcgacaagcgggatattagccggttcctggagagcaaccccgtgatgatcgatgccaaggaagtgagcgccgcccaccgggccagatacttctggggcaatctgcctggcatgaacagacccctggccagcaccgtgaacgacaagctggagctgcaggagtgcctggagcacggccggatcgccaagttcagcaaggtgagaaccatcaccacccgaagcaacagcatcaaacaaggcaaggaccagcactttcctgtgttcatgaacgagaaggaggacatcctgtggtgtaccgagatggagagagtgttcgggttcccagtccactacacagatgtcagcaacatgtctagactggccagacagagactgctgggaagaagctggtccgtccctgtgatcagacacctgttcgcccctctgaaggagtacttcgcctgcgtgagcagcggcaacagcaacgccaacagccggggccccagcttctctagcggcctggtgccactgtccctgagagggagccacatgggccccatggagatctacaaaaccgtgagcgcctggaagcggcagcctgtgcgcgtgctgagcctgtttcggaatatcgataaagtcctgaaaagcctgggattcctggagagcggctctggctccggcggtggcaccctgaagtacgtggaggatgtgacaaacgtggtcagacgggatgtggagaagtggggccccttcgatctggtgtacggcagcacccaacccctgggcagctcttgtgaccggtgccctggctggtacatgtttcagttccaccggatcctgcagtacgccctgccgagacaggagtcccagcggccattcttttggattttcatggacaacttgctgctgaccgaggatgaccaggaaactaccactcggttcctgcagaccgaagccgtgaccctgcaggacgtgagaggccgggactaccagaacgccatgcgggtgtggtccaacatccctggactgaaaagcaagcacgcacctctgacccctaaagaagaggagtacctgcaggcccaggtgcggagcagaagcaagctggacgcccctaaggtggatctgctggtgaagaattgcctcctgcccctgagagagtacttcaagtatttcagccagaatagtctgcccctgggcggcccaagcagcggcgcccctcctcccagcggcggcagcccagccggctccccaacctctaccgaggagggcacctctgagtccgccacccccgagagcggccctggcacctccaccgagcccagcgagggcagcgcacccggcagccctgccggcagccccacctccacagaggagggaaccagcaccgagcccagcgaaggcagcgccccaggcaccagcaccgagcctagtgagggcggctctggcggcggcagcgcccaggagattaaacggatcaacaagatcagaagaagacttgtgaaagacagcaacaccaagaaggccggcaagacaggccccatgaaaaccctgctggttagagtgatgacacccgatctgagagagcggctggaaaacctgagaaagaagcctgaaaatatcccccagcccatcagcaatacatctagagccaacctgaataagctgctgaccgattacaccgaaatgaagaaggcgatcctgcatgtgtactgggaagagttccagaaggaccctgtgggcctgatgagccgggtggcccagcctgccagcaagaagatcgatcagaacaagctgaaacctgagatggacgagaagggcaacctgaccaccgccggctttgcctgctctcagtgtggccagcccctgttcgtgtacaagctggagcaggtgtctgagaagggcaaggcttacaccaactacttcggacggtgcaatgtggccgagcacgaaaagctgatcctgctggcccagctgaagcccgagaaggatagcgacgaagccgtgacatatagcctgggaaagtttgggcagagggccctggatttctacagcattcatgtgaccaaggagtccacccaccccgtgaagcccctggcccagatcgccggaaacagatacgcctccggacctgtgggaaaggccctgagcgacgcatgtatgggcacaatcgcctccttcctgtctaagtaccaggacatcatcatcgaacaccagaaggtggtgaagggcaaccagaagagactggagagcctgcgggagctggccggcaaggaaaacctggaataccctagcgtgaccctgccacctcagcctcacaccaaggagggcgttgatgcctacaacgaagtgatcgcccgggtgcgaatgtgggtgaacctgaacctgtggcagaagctgaagctaagcagagatgatgccaagcctctgctgagactgaagggattcccttcctttcctctggtcgagagacaggccaacgaagtggactggtgggacatggtgtgtaacgtgaagaagctgatcaacgagaaaaaggaggatggcaaggtgttttggcagaatctggctggctacaagagacaggaagccctgagaccatacctgagcagcgaggaagatcggaagaagggaaagaaattcgctcggtaccagctgggcgacctgctgctgcacctggaaaagaagcacggcgaggactggggaaaggtgtacgacgaggcctgggagcggattgacaagaaagtggaaggcctgagcaagcacatcaagctggaagaggaacggagaagcgaggacgcccagagcaaggccgccctgaccgactggctgcgggctaaggccagcttcgtgatcgagggcctgaaggaggccgacaaggacgagttctgcagatgcgagctgaagctgcagaagtggtacggggacctgcggggaaagcccttcgccatcgaagccgagaacagcatcctggacatcagcggcttcagcaagcagtacaactgtgccttcatctggcagaaggacggcgtgaagaagctgaacctgtacctgatcatcaactacttcaagggcggcaagctgcggttcaagaagatcaaacctgaagccttcgaagccaacagattctacaccgtgatcaacaaaaagagcggcgagatcgtgcccatggaggtgaacttcaacttcgacgaccccaacctgatcatcctgcctctggcctttggcaagagacagggcagagaattcatctggaacgacctgctgtccctggaaaccggcagcctgaagctggccaacggaagagtgatcgagaagacactgtacaacagaagaacccggcaggatgagcctgccctgttcgtggccctgaccttcgagcggcgggaggtcctggactcctccaatatcaaaccaatgaacctgatcggcgtggcaagaggcgaaaacatccccgccgtgatcgccctgaccgaccccgagggctgcccactgagccggtttaaggatagcctgggaaacccaacccacatcctgagaatcggcgagagctataaggagaagcagcggaccatccaggccaagaaggaggtggagcagcggagagccggcggctacagccggaagtacgccagcaaagccaagaatctggcagacgatatggtgagaaacaccgctagagatctgctgtactacgccgtgacccaggatgccatgctgatcttcgccaacctgagccggggcttcggccggcagggcaagcggaccttcatggccgagagacagtacacacggatggaggactggctgaccgccaagctggcctacgagggcctgagcaagacctacctgtccaagacactggcccagtacacctccaagacatgcagcaactgtgggtttaccatcaccagcgccgactacgacagggtgctggagaagctgaagaagacagcaacaggctggatgaccacaattaacggcaaggagctgaaggtggagggccagattacctactacaacagatacaagagacagaacgtagtcaaggacctgtccgtcgagctggatagactgagcgaagaatctgtgaacaacgacatctcctcctggacaaagggcagaagcggagaagctctgagcctcctgaagaaaagattctcccatagacccgtgcaggagaagttcgtgtgcctgaactgcggcttcgagacacacgcagccgagcaagccgccctgaacatcgccagatcctggctgttcctgcggagccaggagtacaagaaataccagacaaacaagacaaccggcaacaccgataagagagccttcgtcgagacctggcagtccttttaccggaagaagcttaaggaggtgtggaaacctgccgtgcggtctggcggatctggcggaggctccacaagcgagcccgtgagcttcgaggaggtggccgtgtacttcagcagggaggagtgggccctgctggaccccgcccagagggccctgtacagggacgtgatgctggagacctacgagtgcgtggccagcctggcccccctgcccggccccaagcccatggtgatcagcctgctggaggagggcgaggagccctggatccccgacgtgggcagccccgaggccgtggccggcgacgtgagccccggcgagaccagccccaagaaaaagagaaaagtctaagctgccttctgcggggcttgccttctggccatgcccttcttctctcccttgcacctgtacctcttggtctttgaataaagcctgagtaggaaggctagcaaaaaaaaaaaaaaaaaaaaaaaaaaaaaaaaaaaaaaaaaaaaaaaaaaaaaaaaaaaaaaaaaaaaaaaaaaaaaaaa

SEQ ID NO: 3019 - RNA, 5419 nt, synthetic construct
  source 1..5419: mol_type = other RNA
aggaaataagagagaaaagaagagtaagaagaaatataagagccaccatggcccctaagaagaagcgtaaagtgagccgggtgaacggcagcggcagcggcggcggcatgaaccacgaccaggagttcgacccccctaaggtgtaccctcccgtccccgccgagaagagaaagcccatccgggtcctgagcctgttcgatggcatcgccaccggtctgctggtgctgaaggacctgggcatccaggtggataggtacattgcctccgaggtgtgcgaggactccatcaccgtgggaatggtgcgtcatcagggcaagatcatgtacgtgggcgacgtgcggagcgtgacacagaagcatatccaggagtggggccctttcgacctggtgatcggcggcagcccttgcaatgacctgagcatcgtgaacccagcccggaagggcctgtacgagggaaccggcagactgttcttcgagttttacagactgctgcacgacgcccggcctaaggaaggcgacgaccggcccttcttttggctgttcgagaatgtggtggccatgggagtcagcgacaagcgggatattagccggttcctggagagcaaccccgtgatgatcgatgccaaggaagtgagcgccgcccaccgggccagatacttctggggcaatctgcctggcatgaacagacccctggccagcaccgtgaacgacaagctggagctgcaggagtgcctggagcacggccggatcgccaagttcagcaaggtgagaaccatcaccacccgaagcaacagcatcaaacaaggcaaggaccagcactttcctgtgttcatgaacgagaaggaggacatcctgtggtgtaccgagatggagagagtgttcgggttcccagtccactacacagatgtcagcaacatgtctagactggccagacagagactgctgggaagaagctggtccgtccctgtgatcagacacctgttcgcccctctgaaggagtacttcgcctgcgtgagcagcggcaacagcaacgccaacagccggggccccagcttctctagcggcctggtgccactgtccctgagagggagccacatgggccccatggagatctacaaaaccgtgagcgcctggaagcggcagcctgtgcgcgtgctgagcctgtttcggaatatcgataaagtcctgaaaagcctgggattcctggagagcggctctggctccggcggtggcaccctgaagtacgtggaggatgtgacaaacgtggtcagacgggatgtggagaagtggggccccttcgatctggtgtacggcagcacccaacccctgggcagctcttgtgaccggtgccctggctggtacatgtttcagttccaccggatcctgcagtacgccctgccgagacaggagtcccagcggccattcttttggattttcatggacaacttgctgctgaccgaggatgaccaggaaactaccactcggttcctgcagaccgaagccgtgaccctgcaggacgtgagaggccgggactaccagaacgccatgcgggtgtggtccaacatccctggactgaaaagcaagcacgcacctctgacccctaaagaagaggagtacctgcaggcccaggtgcggagcagaagcaagctggacgcccctaaggtggatctgctggtgaagaattgcctcctgcccctgagagagtacttcaagtatttcagccagaatagtctgcccctgggcggcccaagcagcggcgcccctcctcccagcggcggcagcccagccggctccccaacctctaccgaggagggcacctctgagtccgccacccccgagagcggccctggcacctccaccgagcccagcgagggcagcgcacccggcagccctgccggcagccccacctccacagaggagggaaccagcaccgagcccagcgaaggcagcgccccaggcaccagcaccgagcctagtgagggcggctctggcggcggcagcgcccaggagattaaacggatcaacaagatcagaagaagacttgtgaaagacagcaacaccaagaaggccggcaagacaggccccatgaaaaccctgctggttagagtgatgacacccgatctgagagagcggctggaaaacctgagaaagaagcctgaaaatatcccccagcccatcagcaatacatctagagccaacctgaataagctgctgaccgattacaccgaaatgaagaaggcgatcctgcatgtgtactgggaagagttccagaaggaccctgtgggcctgatgagccgggtggcccagcctgccagcaagaagatcgatcagaacaagctgaaacctgagatggacgagaagggcaacctgaccaccgccggctttgcctgctctcagtgtggccagcccctgttcgtgtacaagctggagcaggtgtctgagaagggcaaggcttacaccaactacttcggacggtgcaatgtggccgagcacgaaaagctgatcctgctggcccagctgaagcccgagaaggatagcgacgaagccgtgacatatagcctgggaaagtttgggcagagggccctggatttctacagcattcatgtgaccaaggagtccacccaccccgtgaagcccctggcccagatcgccggaaacagatacgcctccggacctgtgggaaaggccctgagcgacgcatgtatgggcacaatcgcctccttcctgtctaagtaccaggacatcatcatcgaacaccagaaggtggtgaagggcaaccagaagagactggagagcctgcgggagctggccggcaaggaaaacctggaataccctagcgtgaccctgccacctcagcctcacaccaaggagggcgttgatgcctacaacgaagtgatcgcccgggtgcgaatgtgggtgaacctgaacctgtggcagaagctgaagctaagcagagatgatgccaagcctctgctgagactgaagggattcccttcctttcctctggtcgagagacaggccaacgaagtggactggtgggacatggtgtgtaacgtgaagaagctgatcaacgagaaaaaggaggatggcaaggtgttttggcagaatctggctggctacaagagacaggaagccctgagaccatacctgagcagcgaggaagatcggaagaagggaaagaaattcgctcggtaccagctgggcgacctgctgctgcacctggaaaagaagcacggcgaggactggggaaaggtgtacgacgaggcctgggagcggattgacaagaaagtggaaggcctgagcaagcacatcaagctggaagaggaacggagaagcgaggacgcccagagcaaggccgccctgaccgactggctgcgggctaaggccagcttcgtgatcgagggcctgaaggaggccgacaaggacgagttctgcagatgcgagctgaagctgcagaagtggtacggggacctgcggggaaagcccttcgccatcgaagccgagaacagcatcctggacatcagcggcttcagcaagcagtacaactgtgccttcatctggcagaaggacggcgtgaagaagctgaacctgtacctgatcatcaactacttcaagggcggcaagctgcggttcaagaagatcaaacctgaagccttcgaagccaacagattctacaccgtgatcaacaaaaagagcggcgagatcgtgcccatggaggtgaacttcaacttcgacgaccccaacctgatcatcctgcctctggcctttggcaagagacagggcagagaattcatctggaacgacctgctgtccctggaaaccggcagcctgaagctggccaacggaagagtgatcgagaagacactgtacaacagaagaacccggcaggatgagcctgccctgttcgtggccctgaccttcgagcggcgggaggtcctggactcctccaatatcaaaccaatgaacctgatcggcgtggcaagaggcgaaaacatccccgccgtgatcgccctgaccgaccccgagggctgcccactgagccggtttaaggatagcctgggaaacccaacccacatcctgagaatcggcgagagctataaggagaagcagcggaccatccaggccaagaaggaggtggagcagcggagagccggcggctacagccggaagtacgccagcaaagccaagaatctggcagacgatatggtgagaaacaccgctagagatctgctgtactacgccgtgacccaggatgccatgctgatcttcgccaacctgagccggggcttcggccggcagggcaagcggaccttcatggccgagagacagtacacacggatggaggactggctgaccgccaagctggcctacgagggcctgagcaagacctacctgtccaagacactggcccagtacacctccaagacatgcagcaactgtgggtttaccatcaccagcgccgactacgacagggtgctggagaagctgaagaagacagcaacaggctggatgaccacaattaacggcaaggagctgaaggtggagggccagattacctactacaacagatacaagagacagaacgtagtcaaggacctgtccgtcgagctggatagactgagcgaagaatctgtgaacaacgacatctcctcctggacaaagggcagaagcggagaagctctgagcctcctgaagaaaagattctcccatagacccgtgcaggagaagttcgtgtgcctgaactgcggcttcgagacacacgcagccgagcaagccgccctgaacatcgccagatcctggctgttcctgcggagccaggagtacaagaaataccagacaaacaagacaaccggcaacaccgataagagagccttcgtcgagacctggcagtccttttaccggaagaagcttaaggaggtgtggaaacctgccgtgcggtctggcggatctggcggaggctccacaagcaaggaggccttcgtggccttcggcgacgtggccgtggacttcacccaggaggagtggaggctgctgagccccgcccagaggaccctgcacagggaggtgatgctggagacctacaaccacctggtgagcctggagatccccttcagcaagcccaagctgatcagccagctggagaggggcgaggagccctggatcgaggagaggcagaggcccctgggcctgtgccccgccagcaggcccaccaccagccccaagaaaaagagaaaagtctaagctgccttctgcggggcttgccttctggccatgcccttcttctctcccttgcacctgtacctcttggtctttgaataaagcctgagtaggaaggctagcaaaaaaaaaaaaaaaaaaaaaaaaaaaaaaaaaaaaaaaaaaaaaaaaaaaaaaaaaaaaaaaaaaaaaaaaaaaaaaaa

SEQ ID NO: 3020 - RNA, 5419 nt, synthetic construct
  source 1..5419: mol_type = other RNA
aggaaataagagagaaaagaagagtaagaagaaatataagagccaccatggcccctaagaagaagcgtaaagtgagccgggtgaacggcagcggcagcggcggcggcatgaaccacgaccaggagttcgacccccctaaggtgtaccctcccgtccccgccgagaagagaaagcccatccgggtcctgagcctgttcgatggcatcgccaccggtctgctggtgctgaaggacctgggcatccaggtggataggtacattgcctccgaggtgtgcgaggactccatcaccgtgggaatggtgcgtcatcagggcaagatcatgtacgtgggcgacgtgcggagcgtgacacagaagcatatccaggagtggggccctttcgacctggtgatcggcggcagcccttgcaatgacctgagcatcgtgaacccagcccggaagggcctgtacgagggaaccggcagactgttcttcgagttttacagactgctgcacgacgcccggcctaaggaaggcgacgaccggcccttcttttggctgttcgagaatgtggtggccatgggagtcagcgacaagcgggatattagccggttcctggagagcaaccccgtgatgatcgatgccaaggaagtgagcgccgcccaccgggccagatacttctggggcaatctgcctggcatgaacagacccctggccagcaccgtgaacgacaagctggagctgcaggagtgcctggagcacggccggatcgccaagttcagcaaggtgagaaccatcaccacccgaagcaacagcatcaaacaaggcaaggaccagcactttcctgtgttcatgaacgagaaggaggacatcctgtggtgtaccgagatggagagagtgttcgggttcccagtccactacacagatgtcagcaacatgtctagactggccagacagagactgctgggaagaagctggtccgtccctgtgatcagacacctgttcgcccctctgaaggagtacttcgcctgcgtgagcagcggcaacagcaacgccaacagccggggccccagcttctctagcggcctggtgccactgtccctgagagggagccacatgggccccatggagatctacaaaaccgtgagcgcctggaagcggcagcctgtgcgcgtgctgagcctgtttcggaatatcgataaagtcctgaaaagcctgggattcctggagagcggctctggctccggcggtggcaccctgaagtacgtggaggatgtgacaaacgtggtcagacgggatgtggagaagtggggccccttcgatctggtgtacggcagcacccaacccctgggcagctcttgtgaccggtgccctggctggtacatgtttcagttccaccggatcctgcagtacgccctgccgagacaggagtcccagcggccattcttttggattttcatggacaacttgctgctgaccgaggatgaccaggaaactaccactcggttcctgcagaccgaagccgtgaccctgcaggacgtgagaggccgggactaccagaacgccatgcgggtgtggtccaacatccctggactgaaaagcaagcacgcacctctgacccctaaagaagaggagtacctgcaggcccaggtgcggagcagaagcaagctggacgcccctaaggtggatctgctggtgaagaattgcctcctgcccctgagagagtacttcaagtatttcagccagaatagtctgcccctgggcggcccaagcagcggcgcccctcctcccagcggcggcagcccagccggctccccaacctctaccgaggagggcacctctgagtccgccacccccgagagcggccctggcacctccaccgagcccagcgagggcagcgcacccggcagccctgccggcagccccacctccacagaggagggaaccagcaccgagcccagcgaaggcagcgccccaggcaccagcaccgagcctagtgagggcggctctggcggcggcagcgcccaggagattaaacggatcaacaagatcagaagaagacttgtgaaagacagcaacaccaagaaggccggcaagacaggccccatgaaaaccctgctggttagagtgatgacacccgatctgagagagcggctggaaaacctgagaaagaagcctgaaaatatcccccagcccatcagcaatacatctagagccaacctgaataagctgctgaccgattacaccgaaatgaagaaggcgatcctgcatgtgtactgggaagagttccagaaggaccctgtgggcctgatgagccgggtggcccagcctgccagcaagaagatcgatcagaacaagctgaaacctgagatggacgagaagggcaacctgaccaccgccggctttgcctgctctcagtgtggccagcccctgttcgtgtacaagctggagcaggtgtctgagaagggcaaggcttacaccaactacttcggacggtgcaatgtggccgagcacgaaaagctgatcctgctggcccagctgaagcccgagaaggatagcgacgaagccgtgacatatagcctgggaaagtttgggcagagggccctggatttctacagcattcatgtgaccaaggagtccacccaccccgtgaagcccctggcccagatcgccggaaacagatacgcctccggacctgtgggaaaggccctgagcgacgcatgtatgggcacaatcgcctccttcctgtctaagtaccaggacatcatcatcgaacaccagaaggtggtgaagggcaaccagaagagactggagagcctgcgggagctggccggcaaggaaaacctggaataccctagcgtgaccctgccacctcagcctcacaccaaggagggcgttgatgcctacaacgaagtgatcgcccgggtgcgaatgtgggtgaacctgaacctgtggcagaagctgaagctaagcagagatgatgccaagcctctgctgagactgaagggattcccttcctttcctctggtcgagagacaggccaacgaagtggactggtgggacatggtgtgtaacgtgaagaagctgatcaacgagaaaaaggaggatggcaaggtgttttggcagaatctggctggctacaagagacaggaagccctgagaccatacctgagcagcgaggaagatcggaagaagggaaagaaattcgctcggtaccagctgggcgacctgctgctgcacctggaaaagaagcacggcgaggactggggaaaggtgtacgacgaggcctgggagcggattgacaagaaagtggaaggcctgagcaagcacatcaagctggaagaggaacggagaagcgaggacgcccagagcaaggccgccctgaccgactggctgcgggctaaggccagcttcgtgatcgagggcctgaaggaggccgacaaggacgagttctgcagatgcgagctgaagctgcagaagtggtacggggacctgcggggaaagcccttcgccatcgaagccgagaacagcatcctggacatcagcggcttcagcaagcagtacaactgtgccttcatctggcagaaggacggcgtgaagaagctgaacctgtacctgatcatcaactacttcaagggcggcaagctgcggttcaagaagatcaaacctgaagccttcgaagccaacagattctacaccgtgatcaacaaaaagagcggcgagatcgtgcccatggaggtgaacttcaacttcgacgaccccaacctgatcatcctgcctctggcctttggcaagagacagggcagagaattcatctggaacgacctgctgtccctggaaaccggcagcctgaagctggccaacggaagagtgatcgagaagacactgtacaacagaagaacccggcaggatgagcctgccctgttcgtggccctgaccttcgagcggcgggaggtcctggactcctccaatatcaaaccaatgaacctgatcggcgtggcaagaggcgaaaacatccccgccgtgatcgccctgaccgaccccgagggctgcccactgagccggtttaaggatagcctgggaaacccaacccacatcctgagaatcggcgagagctataaggagaagcagcggaccatccaggccaagaaggaggtggagcagcggagagccggcggctacagccggaagtacgccagcaaagccaagaatctggcagacgatatggtgagaaacaccgctagagatctgctgtactacgccgtgacccaggatgccatgctgatcttcgccaacctgagccggggcttcggccggcagggcaagcggaccttcatggccgagagacagtacacacggatggaggactggctgaccgccaagctggcctacgagggcctgagcaagacctacctgtccaagacactggcccagtacacctccaagacatgcagcaactgtgggtttaccatcaccagcgccgactacgacagggtgctggagaagctgaagaagacagcaacaggctggatgaccacaattaacggcaaggagctgaaggtggagggccagattacctactacaacagatacaagagacagaacgtagtcaaggacctgtccgtcgagctggatagactgagcgaagaatctgtgaacaacgacatctcctcctggacaaagggcagaagcggagaagctctgagcctcctgaagaaaagattctcccatagacccgtgcaggagaagttcgtgtgcctgaactgcggcttcgagacacacgcagccgagcaagccgccctgaacatcgccagatcctggctgttcctgcggagccaggagtacaagaaataccagacaaacaagacaaccggcaacaccgataagagagccttcgtcgagacctggcagtccttttaccggaagaagcttaaggaggtgtggaaacctgccgtgcggtctggcggatctggcggaggctccacaagcccccaggagagcgtgaccttcaaggacatcgccgtggacttcacccaggaggagtgggccctgctggacaccagccagaggaagctgtacagggacgtgatgctggagaacatcagccacctggtgagcgtgggctaccacctgtgcaagagcgacgtggtgagccagctggagcagggcgtggagctgtggagggagggcaggggcttcccccagggccccaaccccgacaggaagagcggcaccagccccaagaaaaagagaaaagtctaagctgccttctgcggggcttgccttctggccatgcccttcttctctcccttgcacctgtacctcttggtctttgaataaagcctgagtaggaaggctagcaaaaaaaaaaaaaaaaaaaaaaaaaaaaaaaaaaaaaaaaaaaaaaaaaaaaaaaaaaaaaaaaaaaaaaaaaaaaaaaa

SEQ ID NO: 3021 - RNA, 5419 nt, synthetic construct
  source 1..5419: mol_type = other RNA
aggaaataagagagaaaagaagagtaagaagaaatataagagccaccatggcccctaagaagaagcgtaaagtgagccgggtgaacggcagcggcagcggcggcggcatgaaccacgaccaggagttcgacccccctaaggtgtaccctcccgtccccgccgagaagagaaagcccatccgggtcctgagcctgttcgatggcatcgccaccggtctgctggtgctgaaggacctgggcatccaggtggataggtacattgcctccgaggtgtgcgaggactccatcaccgtgggaatggtgcgtcatcagggcaagatcatgtacgtgggcgacgtgcggagcgtgacacagaagcatatccaggagtggggccctttcgacctggtgatcggcggcagcccttgcaatgacctgagcatcgtgaacccagcccggaagggcctgtacgagggaaccggcagactgttcttcgagttttacagactgctgcacgacgcccggcctaaggaaggcgacgaccggcccttcttttggctgttcgagaatgtggtggccatgggagtcagcgacaagcgggatattagccggttcctggagagcaaccccgtgatgatcgatgccaaggaagtgagcgccgcccaccgggccagatacttctggggcaatctgcctggcatgaacagacccctggccagcaccgtgaacgacaagctggagctgcaggagtgcctggagcacggccggatcgccaagttcagcaaggtgagaaccatcaccacccgaagcaacagcatcaaacaaggcaaggaccagcactttcctgtgttcatgaacgagaaggaggacatcctgtggtgtaccgagatggagagagtgttcgggttcccagtccactacacagatgtcagcaacatgtctagactggccagacagagactgctgggaagaagctggtccgtccctgtgatcagacacctgttcgcccctctgaaggagtacttcgcctgcgtgagcagcggcaacagcaacgccaacagccggggccccagcttctctagcggcctggtgccactgtccctgagagggagccacatgggccccatggagatctacaaaaccgtgagcgcctggaagcggcagcctgtgcgcgtgctgagcctgtttcggaatatcgataaagtcctgaaaagcctgggattcctggagagcggctctggctccggcggtggcaccctgaagtacgtggaggatgtgacaaacgtggtcagacgggatgtggagaagtggggccccttcgatctggtgtacggcagcacccaacccctgggcagctcttgtgaccggtgccctggctggtacatgtttcagttccaccggatcctgcagtacgccctgccgagacaggagtcccagcggccattcttttggattttcatggacaacttgctgctgaccgaggatgaccaggaaactaccactcggttcctgcagaccgaagccgtgaccctgcaggacgtgagaggccgggactaccagaacgccatgcgggtgtggtccaacatccctggactgaaaagcaagcacgcacctctgacccctaaagaagaggagtacctgcaggcccaggtgcggagcagaagcaagctggacgcccctaaggtggatctgctggtgaagaattgcctcctgcccctgagagagtacttcaagtatttcagccagaatagtctgcccctgggcggcccaagcagcggcgcccctcctcccagcggcggcagcccagccggctccccaacctctaccgaggagggcacctctgagtccgccacccccgagagcggccctggcacctccaccgagcccagcgagggcagcgcacccggcagccctgccggcagccccacctccacagaggagggaaccagcaccgagcccagcgaaggcagcgccccaggcaccagcaccgagcctagtgagggcggctctggcggcggcagcgcccaggagattaaacggatcaacaagatcagaagaagacttgtgaaagacagcaacaccaagaaggccggcaagacaggccccatgaaaaccctgctggttagagtgatgacacccgatctgagagagcggctggaaaacctgagaaagaagcctgaaaatatcccccagcccatcagcaatacatctagagccaacctgaataagctgctgaccgattacaccgaaatgaagaaggcgatcctgcatgtgtactgggaagagttccagaaggaccctgtgggcctgatgagccgggtggcccagcctgccagcaagaagatcgatcagaacaagctgaaacctgagatggacgagaagggcaacctgaccaccgccggctttgcctgctctcagtgtggccagcccctgttcgtgtacaagctggagcaggtgtctgagaagggcaaggcttacaccaactacttcggacggtgcaatgtggccgagcacgaaaagctgatcctgctggcccagctgaagcccgagaaggatagcgacgaagccgtgacatatagcctgggaaagtttgggcagagggccctggatttctacagcattcatgtgaccaaggagtccacccaccccgtgaagcccctggcccagatcgccggaaacagatacgcctccggacctgtgggaaaggccctgagcgacgcatgtatgggcacaatcgcctccttcctgtctaagtaccaggacatcatcatcgaacaccagaaggtggtgaagggcaaccagaagagactggagagcctgcgggagctggccggcaaggaaaacctggaataccctagcgtgaccctgccacctcagcctcacaccaaggagggcgttgatgcctacaacgaagtgatcgcccgggtgcgaatgtgggtgaacctgaacctgtggcagaagctgaagctaagcagagatgatgccaagcctctgctgagactgaagggattcccttcctttcctctggtcgagagacaggccaacgaagtggactggtgggacatggtgtgtaacgtgaagaagctgatcaacgagaaaaaggaggatggcaaggtgttttggcagaatctggctggctacaagagacaggaagccctgagaccatacctgagcagcgaggaagatcggaagaagggaaagaaattcgctcggtaccagctgggcgacctgctgctgcacctggaaaagaagcacggcgaggactggggaaaggtgtacgacgaggcctgggagcggattgacaagaaagtggaaggcctgagcaagcacatcaagctggaagaggaacggagaagcgaggacgcccagagcaaggccgccctgaccgactggctgcgggctaaggccagcttcgtgatcgagggcctgaaggaggccgacaaggacgagttctgcagatgcgagctgaagctgcagaagtggtacggggacctgcggggaaagcccttcgccatcgaagccgagaacagcatcctggacatcagcggcttcagcaagcagtacaactgtgccttcatctggcagaaggacggcgtgaagaagctgaacctgtacctgatcatcaactacttcaagggcggcaagctgcggttcaagaagatcaaacctgaagccttcgaagccaacagattctacaccgtgatcaacaaaaagagcggcgagatcgtgcccatggaggtgaacttcaacttcgacgaccccaacctgatcatcctgcctctggcctttggcaagagacagggcagagaattcatctggaacgacctgctgtccctggaaaccggcagcctgaagctggccaacggaagagtgatcgagaagacactgtacaacagaagaacccggcaggatgagcctgccctgttcgtggccctgaccttcgagcggcgggaggtcctggactcctccaatatcaaaccaatgaacctgatcggcgtggcaagaggcgaaaacatccccgccgtgatcgccctgaccgaccccgagggctgcccactgagccggtttaaggatagcctgggaaacccaacccacatcctgagaatcggcgagagctataaggagaagcagcggaccatccaggccaagaaggaggtggagcagcggagagccggcggctacagccggaagtacgccagcaaagccaagaatctggcagacgatatggtgagaaacaccgctagagatctgctgtactacgccgtgacccaggatgccatgctgatcttcgccaacctgagccggggcttcggccggcagggcaagcggaccttcatggccgagagacagtacacacggatggaggactggctgaccgccaagctggcctacgagggcctgagcaagacctacctgtccaagacactggcccagtacacctccaagacatgcagcaactgtgggtttaccatcaccagcgccgactacgacagggtgctggagaagctgaagaagacagcaacaggctggatgaccacaattaacggcaaggagctgaaggtggagggccagattacctactacaacagatacaagagacagaacgtagtcaaggacctgtccgtcgagctggatagactgagcgaagaatctgtgaacaacgacatctcctcctggacaaagggcagaagcggagaagctctgagcctcctgaagaaaagattctcccatagacccgtgcaggagaagttcgtgtgcctgaactgcggcttcgagacacacgcagccgagcaagccgccctgaacatcgccagatcctggctgttcctgcggagccaggagtacaagaaataccagacaaacaagacaaccggcaacaccgataagagagccttcgtcgagacctggcagtccttttaccggaagaagcttaaggaggtgtggaaacctgccgtgcggtctggcggatctggcggaggctccacaagcatggccgagggcctgaagttcaaggacgtggtgatctacttcagccagaaggagtgggagtgcctgcacagcgcccagaaggacctgtacagggacgtgatgctggagaactacggcaacctggtgctgctgggcctgagcgacaccaagcccaacgtgatcagcctgctggagcagaagaaggagccctggatggtgaagaggaaggagaccaaggagtggtgccccgactgggagttcggcaccagccccaagaaaaagagaaaagtctaagctgccttctgcggggcttgccttctggccatgcccttcttctctcccttgcacctgtacctcttggtctttgaataaagcctgagtaggaaggctagcaaaaaaaaaaaaaaaaaaaaaaaaaaaaaaaaaaaaaaaaaaaaaaaaaaaaaaaaaaaaaaaaaaaaaaaaaaaaaaaa

SEQ ID NO: 3022 - RNA, 5419 nt, synthetic construct
  source 1..5419: mol_type = other RNA
aggaaataagagagaaaagaagagtaagaagaaatataagagccaccatggcccctaagaagaagcgtaaagtgagccgggtgaacggcagcggcagcggcggcggcatgaaccacgaccaggagttcgacccccctaaggtgtaccctcccgtccccgccgagaagagaaagcccatccgggtcctgagcctgttcgatggcatcgccaccggtctgctggtgctgaaggacctgggcatccaggtggataggtacattgcctccgaggtgtgcgaggactccatcaccgtgggaatggtgcgtcatcagggcaagatcatgtacgtgggcgacgtgcggagcgtgacacagaagcatatccaggagtggggccctttcgacctggtgatcggcggcagcccttgcaatgacctgagcatcgtgaacccagcccggaagggcctgtacgagggaaccggcagactgttcttcgagttttacagactgctgcacgacgcccggcctaaggaaggcgacgaccggcccttcttttggctgttcgagaatgtggtggccatgggagtcagcgacaagcgggatattagccggttcctggagagcaaccccgtgatgatcgatgccaaggaagtgagcgccgcccaccgggccagatacttctggggcaatctgcctggcatgaacagacccctggccagcaccgtgaacgacaagctggagctgcaggagtgcctggagcacggccggatcgccaagttcagcaaggtgagaaccatcaccacccgaagcaacagcatcaaacaaggcaaggaccagcactttcctgtgttcatgaacgagaaggaggacatcctgtggtgtaccgagatggagagagtgttcgggttcccagtccactacacagatgtcagcaacatgtctagactggccagacagagactgctgggaagaagctggtccgtccctgtgatcagacacctgttcgcccctctgaaggagtacttcgcctgcgtgagcagcggcaacagcaacgccaacagccggggccccagcttctctagcggcctggtgccactgtccctgagagggagccacatgggccccatggagatctacaaaaccgtgagcgcctggaagcggcagcctgtgcgcgtgctgagcctgtttcggaatatcgataaagtcctgaaaagcctgggattcctggagagcggctctggctccggcggtggcaccctgaagtacgtggaggatgtgacaaacgtggtcagacgggatgtggagaagtggggccccttcgatctggtgtacggcagcacccaacccctgggcagctcttgtgaccggtgccctggctggtacatgtttcagttccaccggatcctgcagtacgccctgccgagacaggagtcccagcggccattcttttggattttcatggacaacttgctgctgaccgaggatgaccaggaaactaccactcggttcctgcagaccgaagccgtgaccctgcaggacgtgagaggccgggactaccagaacgccatgcgggtgtggtccaacatccctggactgaaaagcaagcacgcacctctgacccctaaagaagaggagtacctgcaggcccaggtgcggagcagaagcaagctggacgcccctaaggtggatctgctggtgaagaattgcctcctgcccctgagagagtacttcaagtatttcagccagaatagtctgcccctgggcggcccaagcagcggcgcccctcctcccagcggcggcagcccagccggctccccaacctctaccgaggagggcacctctgagtccgccacccccgagagcggccctggcacctccaccgagcccagcgagggcagcgcacccggcagccctgccggcagccccacctccacagaggagggaaccagcaccgagcccagcgaaggcagcgccccaggcaccagcaccgagcctagtgagggcggctctggcggcggcagcgcccaggagattaaacggatcaacaagatcagaagaagacttgtgaaagacagcaacaccaagaaggccggcaagacaggccccatgaaaaccctgctggttagagtgatgacacccgatctgagagagcggctggaaaacctgagaaagaagcctgaaaatatcccccagcccatcagcaatacatctagagccaacctgaataagctgctgaccgattacaccgaaatgaagaaggcgatcctgcatgtgtactgggaagagttccagaaggaccctgtgggcctgatgagccgggtggcccagcctgccagcaagaagatcgatcagaacaagctgaaacctgagatggacgagaagggcaacctgaccaccgccggctttgcctgctctcagtgtggccagcccctgttcgtgtacaagctggagcaggtgtctgagaagggcaaggcttacaccaactacttcggacggtgcaatgtggccgagcacgaaaagctgatcctgctggcccagctgaagcccgagaaggatagcgacgaagccgtgacatatagcctgggaaagtttgggcagagggccctggatttctacagcattcatgtgaccaaggagtccacccaccccgtgaagcccctggcccagatcgccggaaacagatacgcctccggacctgtgggaaaggccctgagcgacgcatgtatgggcacaatcgcctccttcctgtctaagtaccaggacatcatcatcgaacaccagaaggtggtgaagggcaaccagaagagactggagagcctgcgggagctggccggcaaggaaaacctggaataccctagcgtgaccctgccacctcagcctcacaccaaggagggcgttgatgcctacaacgaagtgatcgcccgggtgcgaatgtgggtgaacctgaacctgtggcagaagctgaagctaagcagagatgatgccaagcctctgctgagactgaagggattcccttcctttcctctggtcgagagacaggccaacgaagtggactggtgggacatggtgtgtaacgtgaagaagctgatcaacgagaaaaaggaggatggcaaggtgttttggcagaatctggctggctacaagagacaggaagccctgagaccatacctgagcagcgaggaagatcggaagaagggaaagaaattcgctcggtaccagctgggcgacctgctgctgcacctggaaaagaagcacggcgaggactggggaaaggtgtacgacgaggcctgggagcggattgacaagaaagtggaaggcctgagcaagcacatcaagctggaagaggaacggagaagcgaggacgcccagagcaaggccgccctgaccgactggctgcgggctaaggccagcttcgtgatcgagggcctgaaggaggccgacaaggacgagttctgcagatgcgagctgaagctgcagaagtggtacggggacctgcggggaaagcccttcgccatcgaagccgagaacagcatcctggacatcagcggcttcagcaagcagtacaactgtgccttcatctggcagaaggacggcgtgaagaagctgaacctgtacctgatcatcaactacttcaagggcggcaagctgcggttcaagaagatcaaacctgaagccttcgaagccaacagattctacaccgtgatcaacaaaaagagcggcgagatcgtgcccatggaggtgaacttcaacttcgacgaccccaacctgatcatcctgcctctggcctttggcaagagacagggcagagaattcatctggaacgacctgctgtccctggaaaccggcagcctgaagctggccaacggaagagtgatcgagaagacactgtacaacagaagaacccggcaggatgagcctgccctgttcgtggccctgaccttcgagcggcgggaggtcctggactcctccaatatcaaaccaatgaacctgatcggcgtggcaagaggcgaaaacatccccgccgtgatcgccctgaccgaccccgagggctgcccactgagccggtttaaggatagcctgggaaacccaacccacatcctgagaatcggcgagagctataaggagaagcagcggaccatccaggccaagaaggaggtggagcagcggagagccggcggctacagccggaagtacgccagcaaagccaagaatctggcagacgatatggtgagaaacaccgctagagatctgctgtactacgccgtgacccaggatgccatgctgatcttcgccaacctgagccggggcttcggccggcagggcaagcggaccttcatggccgagagacagtacacacggatggaggactggctgaccgccaagctggcctacgagggcctgagcaagacctacctgtccaagacactggcccagtacacctccaagacatgcagcaactgtgggtttaccatcaccagcgccgactacgacagggtgctggagaagctgaagaagacagcaacaggctggatgaccacaattaacggcaaggagctgaaggtggagggccagattacctactacaacagatacaagagacagaacgtagtcaaggacctgtccgtcgagctggatagactgagcgaagaatctgtgaacaacgacatctcctcctggacaaagggcagaagcggagaagctctgagcctcctgaagaaaagattctcccatagacccgtgcaggagaagttcgtgtgcctgaactgcggcttcgagacacacgcagccgagcaagccgccctgaacatcgccagatcctggctgttcctgcggagccaggagtacaagaaataccagacaaacaagacaaccggcaacaccgataagagagccttcgtcgagacctggcagtccttttaccggaagaagcttaaggaggtgtggaaacctgccgtgcggtctggcggatctggcggaggctccacaagcgagggcgaggcccagaagaggaaggccgaggagagcggcatgcccctgacccagggccacctgaccttcagggacgtggccatcgagttcagccaggaggagtggaagtgcctggaccccgtgcagaaggccctgtacagggacgtgatgctggagaactacaggaacctggtgagcctgggcatctgcctgcccgacctgagcatcttcagcatgatgaagcagaggaccgagagctggaccaccagccccaagaaaaagagaaaagtctaagctgccttctgcggggcttgccttctggccatgcccttcttctctcccttgcacctgtacctcttggtctttgaataaagcctgagtaggaaggctagcaaaaaaaaaaaaaaaaaaaaaaaaaaaaaaaaaaaaaaaaaaaaaaaaaaaaaaaaaaaaaaaaaaaaaaaaaaaaaaaa

SEQ ID NO: 3023 - RNA, 5419 nt, synthetic construct
  source 1..5419: mol_type = other RNA
aggaaataagagagaaaagaagagtaagaagaaatataagagccaccatggcccctaagaagaagcgtaaagtgagccgggtgaacggcagcggcagcggcggcggcatgaaccacgaccaggagttcgacccccctaaggtgtaccctcccgtccccgccgagaagagaaagcccatccgggtcctgagcctgttcgatggcatcgccaccggtctgctggtgctgaaggacctgggcatccaggtggataggtacattgcctccgaggtgtgcgaggactccatcaccgtgggaatggtgcgtcatcagggcaagatcatgtacgtgggcgacgtgcggagcgtgacacagaagcatatccaggagtggggccctttcgacctggtgatcggcggcagcccttgcaatgacctgagcatcgtgaacccagcccggaagggcctgtacgagggaaccggcagactgttcttcgagttttacagactgctgcacgacgcccggcctaaggaaggcgacgaccggcccttcttttggctgttcgagaatgtggtggccatgggagtcagcgacaagcgggatattagccggttcctggagagcaaccccgtgatgatcgatgccaaggaagtgagcgccgcccaccgggccagatacttctggggcaatctgcctggcatgaacagacccctggccagcaccgtgaacgacaagctggagctgcaggagtgcctggagcacggccggatcgccaagttcagcaaggtgagaaccatcaccacccgaagcaacagcatcaaacaaggcaaggaccagcactttcctgtgttcatgaacgagaaggaggacatcctgtggtgtaccgagatggagagagtgttcgggttcccagtccactacacagatgtcagcaacatgtctagactggccagacagagactgctgggaagaagctggtccgtccctgtgatcagacacctgttcgcccctctgaaggagtacttcgcctgcgtgagcagcggcaacagcaacgccaacagccggggccccagcttctctagcggcctggtgccactgtccctgagagggagccacatgggccccatggagatctacaaaaccgtgagcgcctggaagcggcagcctgtgcgcgtgctgagcctgtttcggaatatcgataaagtcctgaaaagcctgggattcctggagagcggctctggctccggcggtggcaccctgaagtacgtggaggatgtgacaaacgtggtcagacgggatgtggagaagtggggccccttcgatctggtgtacggcagcacccaacccctgggcagctcttgtgaccggtgccctggctggtacatgtttcagttccaccggatcctgcagtacgccctgccgagacaggagtcccagcggccattcttttggattttcatggacaacttgctgctgaccgaggatgaccaggaaactaccactcggttcctgcagaccgaagccgtgaccctgcaggacgtgagaggccgggactaccagaacgccatgcgggtgtggtccaacatccctggactgaaaagcaagcacgcacctctgacccctaaagaagaggagtacctgcaggcccaggtgcggagcagaagcaagctggacgcccctaaggtggatctgctggtgaagaattgcctcctgcccctgagagagtacttcaagtatttcagccagaatagtctgcccctgggcggcccaagcagcggcgcccctcctcccagcggcggcagcccagccggctccccaacctctaccgaggagggcacctctgagtccgccacccccgagagcggccctggcacctccaccgagcccagcgagggcagcgcacccggcagccctgccggcagccccacctccacagaggagggaaccagcaccgagcccagcgaaggcagcgccccaggcaccagcaccgagcctagtgagggcggctctggcggcggcagcgcccaggagattaaacggatcaacaagatcagaagaagacttgtgaaagacagcaacaccaagaaggccggcaagacaggccccatgaaaaccctgctggttagagtgatgacacccgatctgagagagcggctggaaaacctgagaaagaagcctgaaaatatcccccagcccatcagcaatacatctagagccaacctgaataagctgctgaccgattacaccgaaatgaagaaggcgatcctgcatgtgtactgggaagagttccagaaggaccctgtgggcctgatgagccgggtggcccagcctgccagcaagaagatcgatcagaacaagctgaaacctgagatggacgagaagggcaacctgaccaccgccggctttgcctgctctcagtgtggccagcccctgttcgtgtacaagctggagcaggtgtctgagaagggcaaggcttacaccaactacttcggacggtgcaatgtggccgagcacgaaaagctgatcctgctggcccagctgaagcccgagaaggatagcgacgaagccgtgacatatagcctgggaaagtttgggcagagggccctggatttctacagcattcatgtgaccaaggagtccacccaccccgtgaagcccctggcccagatcgccggaaacagatacgcctccggacctgtgggaaaggccctgagcgacgcatgtatgggcacaatcgcctccttcctgtctaagtaccaggacatcatcatcgaacaccagaaggtggtgaagggcaaccagaagagactggagagcctgcgggagctggccggcaaggaaaacctggaataccctagcgtgaccctgccacctcagcctcacaccaaggagggcgttgatgcctacaacgaagtgatcgcccgggtgcgaatgtgggtgaacctgaacctgtggcagaagctgaagctaagcagagatgatgccaagcctctgctgagactgaagggattcccttcctttcctctggtcgagagacaggccaacgaagtggactggtgggacatggtgtgtaacgtgaagaagctgatcaacgagaaaaaggaggatggcaaggtgttttggcagaatctggctggctacaagagacaggaagccctgagaccatacctgagcagcgaggaagatcggaagaagggaaagaaattcgctcggtaccagctgggcgacctgctgctgcacctggaaaagaagcacggcgaggactggggaaaggtgtacgacgaggcctgggagcggattgacaagaaagtggaaggcctgagcaagcacatcaagctggaagaggaacggagaagcgaggacgcccagagcaaggccgccctgaccgactggctgcgggctaaggccagcttcgtgatcgagggcctgaaggaggccgacaaggacgagttctgcagatgcgagctgaagctgcagaagtggtacggggacctgcggggaaagcccttcgccatcgaagccgagaacagcatcctggacatcagcggcttcagcaagcagtacaactgtgccttcatctggcagaaggacggcgtgaagaagctgaacctgtacctgatcatcaactacttcaagggcggcaagctgcggttcaagaagatcaaacctgaagccttcgaagccaacagattctacaccgtgatcaacaaaaagagcggcgagatcgtgcccatggaggtgaacttcaacttcgacgaccccaacctgatcatcctgcctctggcctttggcaagagacagggcagagaattcatctggaacgacctgctgtccctggaaaccggcagcctgaagctggccaacggaagagtgatcgagaagacactgtacaacagaagaacccggcaggatgagcctgccctgttcgtggccctgaccttcgagcggcgggaggtcctggactcctccaatatcaaaccaatgaacctgatcggcgtggcaagaggcgaaaacatccccgccgtgatcgccctgaccgaccccgagggctgcccactgagccggtttaaggatagcctgggaaacccaacccacatcctgagaatcggcgagagctataaggagaagcagcggaccatccaggccaagaaggaggtggagcagcggagagccggcggctacagccggaagtacgccagcaaagccaagaatctggcagacgatatggtgagaaacaccgctagagatctgctgtactacgccgtgacccaggatgccatgctgatcttcgccaacctgagccggggcttcggccggcagggcaagcggaccttcatggccgagagacagtacacacggatggaggactggctgaccgccaagctggcctacgagggcctgagcaagacctacctgtccaagacactggcccagtacacctccaagacatgcagcaactgtgggtttaccatcaccagcgccgactacgacagggtgctggagaagctgaagaagacagcaacaggctggatgaccacaattaacggcaaggagctgaaggtggagggccagattacctactacaacagatacaagagacagaacgtagtcaaggacctgtccgtcgagctggatagactgagcgaagaatctgtgaacaacgacatctcctcctggacaaagggcagaagcggagaagctctgagcctcctgaagaaaagattctcccatagacccgtgcaggagaagttcgtgtgcctgaactgcggcttcgagacacacgcagccgagcaagccgccctgaacatcgccagatcctggctgttcctgcggagccaggagtacaagaaataccagacaaacaagacaaccggcaacaccgataagagagccttcgtcgagacctggcagtccttttaccggaagaagcttaaggaggtgtggaaacctgccgtgcggtctggcggatctggcggaggctccacaagcatggaggaccccctgagcttcaccgacgtggccatcgacttcagcgccgacgagtgcgagtgcctggacagcgcccagtggaacctgtacaaggaggtgatgctggagaactacagcaacctggtgttcctgggcctggccttcagcaagccccacctggtgaccttcctggagcagagcagcgacccctggagcgtgaagaggaaggccagcgccaccatccccctgggcagcaagccccacaccagccccaagaaaaagagaaaagtctaagctgccttctgcggggcttgccttctggccatgcccttcttctctcccttgcacctgtacctcttggtctttgaataaagcctgagtaggaaggctagcaaaaaaaaaaaaaaaaaaaaaaaaaaaaaaaaaaaaaaaaaaaaaaaaaaaaaaaaaaaaaaaaaaaaaaaaaaaaaaaa

SEQ ID NO: 3024 - RNA, 5419 nt, synthetic construct
  source 1..5419: mol_type = other RNA
aggaaataagagagaaaagaagagtaagaagaaatataagagccaccatggcccctaagaagaagcgtaaagtgagccgggtgaacggcagcggcagcggcggcggcatgaaccacgaccaggagttcgacccccctaaggtgtaccctcccgtccccgccgagaagagaaagcccatccgggtcctgagcctgttcgatggcatcgccaccggtctgctggtgctgaaggacctgggcatccaggtggataggtacattgcctccgaggtgtgcgaggactccatcaccgtgggaatggtgcgtcatcagggcaagatcatgtacgtgggcgacgtgcggagcgtgacacagaagcatatccaggagtggggccctttcgacctggtgatcggcggcagcccttgcaatgacctgagcatcgtgaacccagcccggaagggcctgtacgagggaaccggcagactgttcttcgagttttacagactgctgcacgacgcccggcctaaggaaggcgacgaccggcccttcttttggctgttcgagaatgtggtggccatgggagtcagcgacaagcgggatattagccggttcctggagagcaaccccgtgatgatcgatgccaaggaagtgagcgccgcccaccgggccagatacttctggggcaatctgcctggcatgaacagacccctggccagcaccgtgaacgacaagctggagctgcaggagtgcctggagcacggccggatcgccaagttcagcaaggtgagaaccatcaccacccgaagcaacagcatcaaacaaggcaaggaccagcactttcctgtgttcatgaacgagaaggaggacatcctgtggtgtaccgagatggagagagtgttcgggttcccagtccactacacagatgtcagcaacatgtctagactggccagacagagactgctgggaagaagctggtccgtccctgtgatcagacacctgttcgcccctctgaaggagtacttcgcctgcgtgagcagcggcaacagcaacgccaacagccggggccccagcttctctagcggcctggtgccactgtccctgagagggagccacatgggccccatggagatctacaaaaccgtgagcgcctggaagcggcagcctgtgcgcgtgctgagcctgtttcggaatatcgataaagtcctgaaaagcctgggattcctggagagcggctctggctccggcggtggcaccctgaagtacgtggaggatgtgacaaacgtggtcagacgggatgtggagaagtggggccccttcgatctggtgtacggcagcacccaacccctgggcagctcttgtgaccggtgccctggctggtacatgtttcagttccaccggatcctgcagtacgccctgccgagacaggagtcccagcggccattcttttggattttcatggacaacttgctgctgaccgaggatgaccaggaaactaccactcggttcctgcagaccgaagccgtgaccctgcaggacgtgagaggccgggactaccagaacgccatgcgggtgtggtccaacatccctggactgaaaagcaagcacgcacctctgacccctaaagaagaggagtacctgcaggcccaggtgcggagcagaagcaagctggacgcccctaaggtggatctgctggtgaagaattgcctcctgcccctgagagagtacttcaagtatttcagccagaatagtctgcccctgggcggcccaagcagcggcgcccctcctcccagcggcggcagcccagccggctccccaacctctaccgaggagggcacctctgagtccgccacccccgagagcggccctggcacctccaccgagcccagcgagggcagcgcacccggcagccctgccggcagccccacctccacagaggagggaaccagcaccgagcccagcgaaggcagcgccccaggcaccagcaccgagcctagtgagggcggctctggcggcggcagcgcccaggagattaaacggatcaacaagatcagaagaagacttgtgaaagacagcaacaccaagaaggccggcaagacaggccccatgaaaaccctgctggttagagtgatgacacccgatctgagagagcggctggaaaacctgagaaagaagcctgaaaatatcccccagcccatcagcaatacatctagagccaacctgaataagctgctgaccgattacaccgaaatgaagaaggcgatcctgcatgtgtactgggaagagttccagaaggaccctgtgggcctgatgagccgggtggcccagcctgccagcaagaagatcgatcagaacaagctgaaacctgagatggacgagaagggcaacctgaccaccgccggctttgcctgctctcagtgtggccagcccctgttcgtgtacaagctggagcaggtgtctgagaagggcaaggcttacaccaactacttcggacggtgcaatgtggccgagcacgaaaagctgatcctgctggcccagctgaagcccgagaaggatagcgacgaagccgtgacatatagcctgggaaagtttgggcagagggccctggatttctacagcattcatgtgaccaaggagtccacccaccccgtgaagcccctggcccagatcgccggaaacagatacgcctccggacctgtgggaaaggccctgagcgacgcatgtatgggcacaatcgcctccttcctgtctaagtaccaggacatcatcatcgaacaccagaaggtggtgaagggcaaccagaagagactggagagcctgcgggagctggccggcaaggaaaacctggaataccctagcgtgaccctgccacctcagcctcacaccaaggagggcgttgatgcctacaacgaagtgatcgcccgggtgcgaatgtgggtgaacctgaacctgtggcagaagctgaagctaagcagagatgatgccaagcctctgctgagactgaagggattcccttcctttcctctggtcgagagacaggccaacgaagtggactggtgggacatggtgtgtaacgtgaagaagctgatcaacgagaaaaaggaggatggcaaggtgttttggcagaatctggctggctacaagagacaggaagccctgagaccatacctgagcagcgaggaagatcggaagaagggaaagaaattcgctcggtaccagctgggcgacctgctgctgcacctggaaaagaagcacggcgaggactggggaaaggtgtacgacgaggcctgggagcggattgacaagaaagtggaaggcctgagcaagcacatcaagctggaagaggaacggagaagcgaggacgcccagagcaaggccgccctgaccgactggctgcgggctaaggccagcttcgtgatcgagggcctgaaggaggccgacaaggacgagttctgcagatgcgagctgaagctgcagaagtggtacggggacctgcggggaaagcccttcgccatcgaagccgagaacagcatcctggacatcagcggcttcagcaagcagtacaactgtgccttcatctggcagaaggacggcgtgaagaagctgaacctgtacctgatcatcaactacttcaagggcggcaagctgcggttcaagaagatcaaacctgaagccttcgaagccaacagattctacaccgtgatcaacaaaaagagcggcgagatcgtgcccatggaggtgaacttcaacttcgacgaccccaacctgatcatcctgcctctggcctttggcaagagacagggcagagaattcatctggaacgacctgctgtccctggaaaccggcagcctgaagctggccaacggaagagtgatcgagaagacactgtacaacagaagaacccggcaggatgagcctgccctgttcgtggccctgaccttcgagcggcgggaggtcctggactcctccaatatcaaaccaatgaacctgatcggcgtggcaagaggcgaaaacatccccgccgtgatcgccctgaccgaccccgagggctgcccactgagccggtttaaggatagcctgggaaacccaacccacatcctgagaatcggcgagagctataaggagaagcagcggaccatccaggccaagaaggaggtggagcagcggagagccggcggctacagccggaagtacgccagcaaagccaagaatctggcagacgatatggtgagaaacaccgctagagatctgctgtactacgccgtgacccaggatgccatgctgatcttcgccaacctgagccggggcttcggccggcagggcaagcggaccttcatggccgagagacagtacacacggatggaggactggctgaccgccaagctggcctacgagggcctgagcaagacctacctgtccaagacactggcccagtacacctccaagacatgcagcaactgtgggtttaccatcaccagcgccgactacgacagggtgctggagaagctgaagaagacagcaacaggctggatgaccacaattaacggcaaggagctgaaggtggagggccagattacctactacaacagatacaagagacagaacgtagtcaaggacctgtccgtcgagctggatagactgagcgaagaatctgtgaacaacgacatctcctcctggacaaagggcagaagcggagaagctctgagcctcctgaagaaaagattctcccatagacccgtgcaggagaagttcgtgtgcctgaactgcggcttcgagacacacgcagccgagcaagccgccctgaacatcgccagatcctggctgttcctgcggagccaggagtacaagaaataccagacaaacaagacaaccggcaacaccgataagagagccttcgtcgagacctggcagtccttttaccggaagaagcttaaggaggtgtggaaacctgccgtgcggtctggcggatctggcggaggctccacaagcgcccccggcagcgtgaccttcagggacgtggccatcgacttcagccaggaggagtggaagtggctgcagcccgcccagagggacctgtacaggtgcgtgatgctggagaactacggccacctggtgagcctgggcctgtgcatcagcaagcccgacgtggtgagcctgctggagcagggcaaggagccctggctgggcaagggcggcgtgaacagggacctgttcagcgtgagcgacggcaagaccagccccaagaaaaagagaaaagtctaagctgccttctgcggggcttgccttctggccatgcccttcttctctcccttgcacctgtacctcttggtctttgaataaagcctgagtaggaaggctagcaaaaaaaaaaaaaaaaaaaaaaaaaaaaaaaaaaaaaaaaaaaaaaaaaaaaaaaaaaaaaaaaaaaaaaaaaaaaaaaa

SEQ ID NO: 3025 - RNA, 5419 nt, synthetic construct
  source 1..5419: mol_type = other RNA
aggaaataagagagaaaagaagagtaagaagaaatataagagccaccatggcccctaagaagaagcgtaaagtgagccgggtgaacggcagcggcagcggcggcggcatgaaccacgaccaggagttcgacccccctaaggtgtaccctcccgtccccgccgagaagagaaagcccatccgggtcctgagcctgttcgatggcatcgccaccggtctgctggtgctgaaggacctgggcatccaggtggataggtacattgcctccgaggtgtgcgaggactccatcaccgtgggaatggtgcgtcatcagggcaagatcatgtacgtgggcgacgtgcggagcgtgacacagaagcatatccaggagtggggccctttcgacctggtgatcggcggcagcccttgcaatgacctgagcatcgtgaacccagcccggaagggcctgtacgagggaaccggcagactgttcttcgagttttacagactgctgcacgacgcccggcctaaggaaggcgacgaccggcccttcttttggctgttcgagaatgtggtggccatgggagtcagcgacaagcgggatattagccggttcctggagagcaaccccgtgatgatcgatgccaaggaagtgagcgccgcccaccgggccagatacttctggggcaatctgcctggcatgaacagacccctggccagcaccgtgaacgacaagctggagctgcaggagtgcctggagcacggccggatcgccaagttcagcaaggtgagaaccatcaccacccgaagcaacagcatcaaacaaggcaaggaccagcactttcctgtgttcatgaacgagaaggaggacatcctgtggtgtaccgagatggagagagtgttcgggttcccagtccactacacagatgtcagcaacatgtctagactggccagacagagactgctgggaagaagctggtccgtccctgtgatcagacacctgttcgcccctctgaaggagtacttcgcctgcgtgagcagcggcaacagcaacgccaacagccggggccccagcttctctagcggcctggtgccactgtccctgagagggagccacatgggccccatggagatctacaaaaccgtgagcgcctggaagcggcagcctgtgcgcgtgctgagcctgtttcggaatatcgataaagtcctgaaaagcctgggattcctggagagcggctctggctccggcggtggcaccctgaagtacgtggaggatgtgacaaacgtggtcagacgggatgtggagaagtggggccccttcgatctggtgtacggcagcacccaacccctgggcagctcttgtgaccggtgccctggctggtacatgtttcagttccaccggatcctgcagtacgccctgccgagacaggagtcccagcggccattcttttggattttcatggacaacttgctgctgaccgaggatgaccaggaaactaccactcggttcctgcagaccgaagccgtgaccctgcaggacgtgagaggccgggactaccagaacgccatgcgggtgtggtccaacatccctggactgaaaagcaagcacgcacctctgacccctaaagaagaggagtacctgcaggcccaggtgcggagcagaagcaagctggacgcccctaaggtggatctgctggtgaagaattgcctcctgcccctgagagagtacttcaagtatttcagccagaatagtctgcccctgggcggcccaagcagcggcgcccctcctcccagcggcggcagcccagccggctccccaacctctaccgaggagggcacctctgagtccgccacccccgagagcggccctggcacctccaccgagcccagcgagggcagcgcacccggcagccctgccggcagccccacctccacagaggagggaaccagcaccgagcccagcgaaggcagcgccccaggcaccagcaccgagcctagtgagggcggctctggcggcggcagcgcccaggagattaaacggatcaacaagatcagaagaagacttgtgaaagacagcaacaccaagaaggccggcaagacaggccccatgaaaaccctgctggttagagtgatgacacccgatctgagagagcggctggaaaacctgagaaagaagcctgaaaatatcccccagcccatcagcaatacatctagagccaacctgaataagctgctgaccgattacaccgaaatgaagaaggcgatcctgcatgtgtactgggaagagttccagaaggaccctgtgggcctgatgagccgggtggcccagcctgccagcaagaagatcgatcagaacaagctgaaacctgagatggacgagaagggcaacctgaccaccgccggctttgcctgctctcagtgtggccagcccctgttcgtgtacaagctggagcaggtgtctgagaagggcaaggcttacaccaactacttcggacggtgcaatgtggccgagcacgaaaagctgatcctgctggcccagctgaagcccgagaaggatagcgacgaagccgtgacatatagcctgggaaagtttgggcagagggccctggatttctacagcattcatgtgaccaaggagtccacccaccccgtgaagcccctggcccagatcgccggaaacagatacgcctccggacctgtgggaaaggccctgagcgacgcatgtatgggcacaatcgcctccttcctgtctaagtaccaggacatcatcatcgaacaccagaaggtggtgaagggcaaccagaagagactggagagcctgcgggagctggccggcaaggaaaacctggaataccctagcgtgaccctgccacctcagcctcacaccaaggagggcgttgatgcctacaacgaagtgatcgcccgggtgcgaatgtgggtgaacctgaacctgtggcagaagctgaagctaagcagagatgatgccaagcctctgctgagactgaagggattcccttcctttcctctggtcgagagacaggccaacgaagtggactggtgggacatggtgtgtaacgtgaagaagctgatcaacgagaaaaaggaggatggcaaggtgttttggcagaatctggctggctacaagagacaggaagccctgagaccatacctgagcagcgaggaagatcggaagaagggaaagaaattcgctcggtaccagctgggcgacctgctgctgcacctggaaaagaagcacggcgaggactggggaaaggtgtacgacgaggcctgggagcggattgacaagaaagtggaaggcctgagcaagcacatcaagctggaagaggaacggagaagcgaggacgcccagagcaaggccgccctgaccgactggctgcgggctaaggccagcttcgtgatcgagggcctgaaggaggccgacaaggacgagttctgcagatgcgagctgaagctgcagaagtggtacggggacctgcggggaaagcccttcgccatcgaagccgagaacagcatcctggacatcagcggcttcagcaagcagtacaactgtgccttcatctggcagaaggacggcgtgaagaagctgaacctgtacctgatcatcaactacttcaagggcggcaagctgcggttcaagaagatcaaacctgaagccttcgaagccaacagattctacaccgtgatcaacaaaaagagcggcgagatcgtgcccatggaggtgaacttcaacttcgacgaccccaacctgatcatcctgcctctggcctttggcaagagacagggcagagaattcatctggaacgacctgctgtccctggaaaccggcagcctgaagctggccaacggaagagtgatcgagaagacactgtacaacagaagaacccggcaggatgagcctgccctgttcgtggccctgaccttcgagcggcgggaggtcctggactcctccaatatcaaaccaatgaacctgatcggcgtggcaagaggcgaaaacatccccgccgtgatcgccctgaccgaccccgagggctgcccactgagccggtttaaggatagcctgggaaacccaacccacatcctgagaatcggcgagagctataaggagaagcagcggaccatccaggccaagaaggaggtggagcagcggagagccggcggctacagccggaagtacgccagcaaagccaagaatctggcagacgatatggtgagaaacaccgctagagatctgctgtactacgccgtgacccaggatgccatgctgatcttcgccaacctgagccggggcttcggccggcagggcaagcggaccttcatggccgagagacagtacacacggatggaggactggctgaccgccaagctggcctacgagggcctgagcaagacctacctgtccaagacactggcccagtacacctccaagacatgcagcaactgtgggtttaccatcaccagcgccgactacgacagggtgctggagaagctgaagaagacagcaacaggctggatgaccacaattaacggcaaggagctgaaggtggagggccagattacctactacaacagatacaagagacagaacgtagtcaaggacctgtccgtcgagctggatagactgagcgaagaatctgtgaacaacgacatctcctcctggacaaagggcagaagcggagaagctctgagcctcctgaagaaaagattctcccatagacccgtgcaggagaagttcgtgtgcctgaactgcggcttcgagacacacgcagccgagcaagccgccctgaacatcgccagatcctggctgttcctgcggagccaggagtacaagaaataccagacaaacaagacaaccggcaacaccgataagagagccttcgtcgagacctggcagtccttttaccggaagaagcttaaggaggtgtggaaacctgccgtgcggtctggcggatctggcggaggctccacaagcggcagcgtgatgttcagcgacgtgagcgtggacttcagccaggacgagtgggagtgcctggaccccgtgcagagggacctgtacagggaggtgatgctggagaactacagcaacctggtgagcgtgggcctgtacatccccaagccccaggtgatcagcctgctggagcagggcaaggagccctggatggtgggcaaggagctgaccaggggcctgtgcagcgacctggagagcatgtgcgagaccagccccaagaaaaagagaaaagtctaagctgccttctgcggggcttgccttctggccatgcccttcttctctcccttgcacctgtacctcttggtctttgaataaagcctgagtaggaaggctagcaaaaaaaaaaaaaaaaaaaaaaaaaaaaaaaaaaaaaaaaaaaaaaaaaaaaaaaaaaaaaaaaaaaaaaaaaaaaaaaa

SEQ ID NO: 3026 - RNA, 5419 nt, synthetic construct
  source 1..5419: mol_type = other RNA
aggaaataagagagaaaagaagagtaagaagaaatataagagccaccatggcccctaagaagaagcgtaaagtgagccgggtgaacggcagcggcagcggcggcggcatgaaccacgaccaggagttcgacccccctaaggtgtaccctcccgtccccgccgagaagagaaagcccatccgggtcctgagcctgttcgatggcatcgccaccggtctgctggtgctgaaggacctgggcatccaggtggataggtacattgcctccgaggtgtgcgaggactccatcaccgtgggaatggtgcgtcatcagggcaagatcatgtacgtgggcgacgtgcggagcgtgacacagaagcatatccaggagtggggccctttcgacctggtgatcggcggcagcccttgcaatgacctgagcatcgtgaacccagcccggaagggcctgtacgagggaaccggcagactgttcttcgagttttacagactgctgcacgacgcccggcctaaggaaggcgacgaccggcccttcttttggctgttcgagaatgtggtggccatgggagtcagcgacaagcgggatattagccggttcctggagagcaaccccgtgatgatcgatgccaaggaagtgagcgccgcccaccgggccagatacttctggggcaatctgcctggcatgaacagacccctggccagcaccgtgaacgacaagctggagctgcaggagtgcctggagcacggccggatcgccaagttcagcaaggtgagaaccatcaccacccgaagcaacagcatcaaacaaggcaaggaccagcactttcctgtgttcatgaacgagaaggaggacatcctgtggtgtaccgagatggagagagtgttcgggttcccagtccactacacagatgtcagcaacatgtctagactggccagacagagactgctgggaagaagctggtccgtccctgtgatcagacacctgttcgcccctctgaaggagtacttcgcctgcgtgagcagcggcaacagcaacgccaacagccggggccccagcttctctagcggcctggtgccactgtccctgagagggagccacatgggccccatggagatctacaaaaccgtgagcgcctggaagcggcagcctgtgcgcgtgctgagcctgtttcggaatatcgataaagtcctgaaaagcctgggattcctggagagcggctctggctccggcggtggcaccctgaagtacgtggaggatgtgacaaacgtggtcagacgggatgtggagaagtggggccccttcgatctggtgtacggcagcacccaacccctgggcagctcttgtgaccggtgccctggctggtacatgtttcagttccaccggatcctgcagtacgccctgccgagacaggagtcccagcggccattcttttggattttcatggacaacttgctgctgaccgaggatgaccaggaaactaccactcggttcctgcagaccgaagccgtgaccctgcaggacgtgagaggccgggactaccagaacgccatgcgggtgtggtccaacatccctggactgaaaagcaagcacgcacctctgacccctaaagaagaggagtacctgcaggcccaggtgcggagcagaagcaagctggacgcccctaaggtggatctgctggtgaagaattgcctcctgcccctgagagagtacttcaagtatttcagccagaatagtctgcccctgggcggcccaagcagcggcgcccctcctcccagcggcggcagcccagccggctccccaacctctaccgaggagggcacctctgagtccgccacccccgagagcggccctggcacctccaccgagcccagcgagggcagcgcacccggcagccctgccggcagccccacctccacagaggagggaaccagcaccgagcccagcgaaggcagcgccccaggcaccagcaccgagcctagtgagggcggctctggcggcggcagcgcccaggagattaaacggatcaacaagatcagaagaagacttgtgaaagacagcaacaccaagaaggccggcaagacaggccccatgaaaaccctgctggttagagtgatgacacccgatctgagagagcggctggaaaacctgagaaagaagcctgaaaatatcccccagcccatcagcaatacatctagagccaacctgaataagctgctgaccgattacaccgaaatgaagaaggcgatcctgcatgtgtactgggaagagttccagaaggaccctgtgggcctgatgagccgggtggcccagcctgccagcaagaagatcgatcagaacaagctgaaacctgagatggacgagaagggcaacctgaccaccgccggctttgcctgctctcagtgtggccagcccctgttcgtgtacaagctggagcaggtgtctgagaagggcaaggcttacaccaactacttcggacggtgcaatgtggccgagcacgaaaagctgatcctgctggcccagctgaagcccgagaaggatagcgacgaagccgtgacatatagcctgggaaagtttgggcagagggccctggatttctacagcattcatgtgaccaaggagtccacccaccccgtgaagcccctggcccagatcgccggaaacagatacgcctccggacctgtgggaaaggccctgagcgacgcatgtatgggcacaatcgcctccttcctgtctaagtaccaggacatcatcatcgaacaccagaaggtggtgaagggcaaccagaagagactggagagcctgcgggagctggccggcaaggaaaacctggaataccctagcgtgaccctgccacctcagcctcacaccaaggagggcgttgatgcctacaacgaagtgatcgcccgggtgcgaatgtgggtgaacctgaacctgtggcagaagctgaagctaagcagagatgatgccaagcctctgctgagactgaagggattcccttcctttcctctggtcgagagacaggccaacgaagtggactggtgggacatggtgtgtaacgtgaagaagctgatcaacgagaaaaaggaggatggcaaggtgttttggcagaatctggctggctacaagagacaggaagccctgagaccatacctgagcagcgaggaagatcggaagaagggaaagaaattcgctcggtaccagctgggcgacctgctgctgcacctggaaaagaagcacggcgaggactggggaaaggtgtacgacgaggcctgggagcggattgacaagaaagtggaaggcctgagcaagcacatcaagctggaagaggaacggagaagcgaggacgcccagagcaaggccgccctgaccgactggctgcgggctaaggccagcttcgtgatcgagggcctgaaggaggccgacaaggacgagttctgcagatgcgagctgaagctgcagaagtggtacggggacctgcggggaaagcccttcgccatcgaagccgagaacagcatcctggacatcagcggcttcagcaagcagtacaactgtgccttcatctggcagaaggacggcgtgaagaagctgaacctgtacctgatcatcaactacttcaagggcggcaagctgcggttcaagaagatcaaacctgaagccttcgaagccaacagattctacaccgtgatcaacaaaaagagcggcgagatcgtgcccatggaggtgaacttcaacttcgacgaccccaacctgatcatcctgcctctggcctttggcaagagacagggcagagaattcatctggaacgacctgctgtccctggaaaccggcagcctgaagctggccaacggaagagtgatcgagaagacactgtacaacagaagaacccggcaggatgagcctgccctgttcgtggccctgaccttcgagcggcgggaggtcctggactcctccaatatcaaaccaatgaacctgatcggcgtggcaagaggcgaaaacatccccgccgtgatcgccctgaccgaccccgagggctgcccactgagccggtttaaggatagcctgggaaacccaacccacatcctgagaatcggcgagagctataaggagaagcagcggaccatccaggccaagaaggaggtggagcagcggagagccggcggctacagccggaagtacgccagcaaagccaagaatctggcagacgatatggtgagaaacaccgctagagatctgctgtactacgccgtgacccaggatgccatgctgatcttcgccaacctgagccggggcttcggccggcagggcaagcggaccttcatggccgagagacagtacacacggatggaggactggctgaccgccaagctggcctacgagggcctgagcaagacctacctgtccaagacactggcccagtacacctccaagacatgcagcaactgtgggtttaccatcaccagcgccgactacgacagggtgctggagaagctgaagaagacagcaacaggctggatgaccacaattaacggcaaggagctgaaggtggagggccagattacctactacaacagatacaagagacagaacgtagtcaaggacctgtccgtcgagctggatagactgagcgaagaatctgtgaacaacgacatctcctcctggacaaagggcagaagcggagaagctctgagcctcctgaagaaaagattctcccatagacccgtgcaggagaagttcgtgtgcctgaactgcggcttcgagacacacgcagccgagcaagccgccctgaacatcgccagatcctggctgttcctgcggagccaggagtacaagaaataccagacaaacaagacaaccggcaacaccgataagagagccttcgtcgagacctggcagtccttttaccggaagaagcttaaggaggtgtggaaacctgccgtgcggtctggcggatctggcggaggctccacaagcggcagcgtgtgcgaggtgagcgtgagcttcgaggacgtgaccgtggacttcagcagggaggagtggcagcacctggaccccgcccagaggaggctgtactgggacgtgaccctggagaactacagccacctgtgcagcgtgggctaccaggtgcccaagcccgaggtgatcttcaagctggagcagggcgagggcccctggaccctggaggaggagaccccccaccagagctgcagcggcgccaccagccccaagaaaaagagaaaagtctaagctgccttctgcggggcttgccttctggccatgcccttcttctctcccttgcacctgtacctcttggtctttgaataaagcctgagtaggaaggctagcaaaaaaaaaaaaaaaaaaaaaaaaaaaaaaaaaaaaaaaaaaaaaaaaaaaaaaaaaaaaaaaaaaaaaaaaaaaaaaaa

SEQ ID NO: 3027 - RNA, 5419 nt, synthetic construct
  source 1..5419: mol_type = other RNA
aggaaataagagagaaaagaagagtaagaagaaatataagagccaccatggcccctaagaagaagcgtaaagtgagccgggtgaacggcagcggcagcggcggcggcatgaaccacgaccaggagttcgacccccctaaggtgtaccctcccgtccccgccgagaagagaaagcccatccgggtcctgagcctgttcgatggcatcgccaccggtctgctggtgctgaaggacctgggcatccaggtggataggtacattgcctccgaggtgtgcgaggactccatcaccgtgggaatggtgcgtcatcagggcaagatcatgtacgtgggcgacgtgcggagcgtgacacagaagcatatccaggagtggggccctttcgacctggtgatcggcggcagcccttgcaatgacctgagcatcgtgaacccagcccggaagggcctgtacgagggaaccggcagactgttcttcgagttttacagactgctgcacgacgcccggcctaaggaaggcgacgaccggcccttcttttggctgttcgagaatgtggtggccatgggagtcagcgacaagcgggatattagccggttcctggagagcaaccccgtgatgatcgatgccaaggaagtgagcgccgcccaccgggccagatacttctggggcaatctgcctggcatgaacagacccctggccagcaccgtgaacgacaagctggagctgcaggagtgcctggagcacggccggatcgccaagttcagcaaggtgagaaccatcaccacccgaagcaacagcatcaaacaaggcaaggaccagcactttcctgtgttcatgaacgagaaggaggacatcctgtggtgtaccgagatggagagagtgttcgggttcccagtccactacacagatgtcagcaacatgtctagactggccagacagagactgctgggaagaagctggtccgtccctgtgatcagacacctgttcgcccctctgaaggagtacttcgcctgcgtgagcagcggcaacagcaacgccaacagccggggccccagcttctctagcggcctggtgccactgtccctgagagggagccacatgggccccatggagatctacaaaaccgtgagcgcctggaagcggcagcctgtgcgcgtgctgagcctgtttcggaatatcgataaagtcctgaaaagcctgggattcctggagagcggctctggctccggcggtggcaccctgaagtacgtggaggatgtgacaaacgtggtcagacgggatgtggagaagtggggccccttcgatctggtgtacggcagcacccaacccctgggcagctcttgtgaccggtgccctggctggtacatgtttcagttccaccggatcctgcagtacgccctgccgagacaggagtcccagcggccattcttttggattttcatggacaacttgctgctgaccgaggatgaccaggaaactaccactcggttcctgcagaccgaagccgtgaccctgcaggacgtgagaggccgggactaccagaacgccatgcgggtgtggtccaacatccctggactgaaaagcaagcacgcacctctgacccctaaagaagaggagtacctgcaggcccaggtgcggagcagaagcaagctggacgcccctaaggtggatctgctggtgaagaattgcctcctgcccctgagagagtacttcaagtatttcagccagaatagtctgcccctgggcggcccaagcagcggcgcccctcctcccagcggcggcagcccagccggctccccaacctctaccgaggagggcacctctgagtccgccacccccgagagcggccctggcacctccaccgagcccagcgagggcagcgcacccggcagccctgccggcagccccacctccacagaggagggaaccagcaccgagcccagcgaaggcagcgccccaggcaccagcaccgagcctagtgagggcggctctggcggcggcagcgcccaggagattaaacggatcaacaagatcagaagaagacttgtgaaagacagcaacaccaagaaggccggcaagacaggccccatgaaaaccctgctggttagagtgatgacacccgatctgagagagcggctggaaaacctgagaaagaagcctgaaaatatcccccagcccatcagcaatacatctagagccaacctgaataagctgctgaccgattacaccgaaatgaagaaggcgatcctgcatgtgtactgggaagagttccagaaggaccctgtgggcctgatgagccgggtggcccagcctgccagcaagaagatcgatcagaacaagctgaaacctgagatggacgagaagggcaacctgaccaccgccggctttgcctgctctcagtgtggccagcccctgttcgtgtacaagctggagcaggtgtctgagaagggcaaggcttacaccaactacttcggacggtgcaatgtggccgagcacgaaaagctgatcctgctggcccagctgaagcccgagaaggatagcgacgaagccgtgacatatagcctgggaaagtttgggcagagggccctggatttctacagcattcatgtgaccaaggagtccacccaccccgtgaagcccctggcccagatcgccggaaacagatacgcctccggacctgtgggaaaggccctgagcgacgcatgtatgggcacaatcgcctccttcctgtctaagtaccaggacatcatcatcgaacaccagaaggtggtgaagggcaaccagaagagactggagagcctgcgggagctggccggcaaggaaaacctggaataccctagcgtgaccctgccacctcagcctcacaccaaggagggcgttgatgcctacaacgaagtgatcgcccgggtgcgaatgtgggtgaacctgaacctgtggcagaagctgaagctaagcagagatgatgccaagcctctgctgagactgaagggattcccttcctttcctctggtcgagagacaggccaacgaagtggactggtgggacatggtgtgtaacgtgaagaagctgatcaacgagaaaaaggaggatggcaaggtgttttggcagaatctggctggctacaagagacaggaagccctgagaccatacctgagcagcgaggaagatcggaagaagggaaagaaattcgctcggtaccagctgggcgacctgctgctgcacctggaaaagaagcacggcgaggactggggaaaggtgtacgacgaggcctgggagcggattgacaagaaagtggaaggcctgagcaagcacatcaagctggaagaggaacggagaagcgaggacgcccagagcaaggccgccctgaccgactggctgcgggctaaggccagcttcgtgatcgagggcctgaaggaggccgacaaggacgagttctgcagatgcgagctgaagctgcagaagtggtacggggacctgcggggaaagcccttcgccatcgaagccgagaacagcatcctggacatcagcggcttcagcaagcagtacaactgtgccttcatctggcagaaggacggcgtgaagaagctgaacctgtacctgatcatcaactacttcaagggcggcaagctgcggttcaagaagatcaaacctgaagccttcgaagccaacagattctacaccgtgatcaacaaaaagagcggcgagatcgtgcccatggaggtgaacttcaacttcgacgaccccaacctgatcatcctgcctctggcctttggcaagagacagggcagagaattcatctggaacgacctgctgtccctggaaaccggcagcctgaagctggccaacggaagagtgatcgagaagacactgtacaacagaagaacccggcaggatgagcctgccctgttcgtggccctgaccttcgagcggcgggaggtcctggactcctccaatatcaaaccaatgaacctgatcggcgtggcaagaggcgaaaacatccccgccgtgatcgccctgaccgaccccgagggctgcccactgagccggtttaaggatagcctgggaaacccaacccacatcctgagaatcggcgagagctataaggagaagcagcggaccatccaggccaagaaggaggtggagcagcggagagccggcggctacagccggaagtacgccagcaaagccaagaatctggcagacgatatggtgagaaacaccgctagagatctgctgtactacgccgtgacccaggatgccatgctgatcttcgccaacctgagccggggcttcggccggcagggcaagcggaccttcatggccgagagacagtacacacggatggaggactggctgaccgccaagctggcctacgagggcctgagcaagacctacctgtccaagacactggcccagtacacctccaagacatgcagcaactgtgggtttaccatcaccagcgccgactacgacagggtgctggagaagctgaagaagacagcaacaggctggatgaccacaattaacggcaaggagctgaaggtggagggccagattacctactacaacagatacaagagacagaacgtagtcaaggacctgtccgtcgagctggatagactgagcgaagaatctgtgaacaacgacatctcctcctggacaaagggcagaagcggagaagctctgagcctcctgaagaaaagattctcccatagacccgtgcaggagaagttcgtgtgcctgaactgcggcttcgagacacacgcagccgagcaagccgccctgaacatcgccagatcctggctgttcctgcggagccaggagtacaagaaataccagacaaacaagacaaccggcaacaccgataagagagccttcgtcgagacctggcagtccttttaccggaagaagcttaaggaggtgtggaaacctgccgtgcggtctggcggatctggcggaggctccacaagcatggtgttcgaggacgtggccgtgtacttcagcagggaggagtggggcctgctggacagcgcccagagggccctgtacaggcaggtgatgctggagaacttcgccctggtggccagcctgggcctgagcgccagcaggcccaggatcatcctgcagctggagaggggcgaggagccctgggtgctgagcggcctggacgtggccctggccagggacgcccagaggaggcccagccccgcccagaccagccccaagaaaaagagaaaagtctaagctgccttctgcggggcttgccttctggccatgcccttcttctctcccttgcacctgtacctcttggtctttgaataaagcctgagtaggaaggctagcaaaaaaaaaaaaaaaaaaaaaaaaaaaaaaaaaaaaaaaaaaaaaaaaaaaaaaaaaaaaaaaaaaaaaaaaaaaaaaaa

SEQ ID NO: 3028 - RNA, 5419 nt, synthetic construct
  source 1..5419: mol_type = other RNA
aggaaataagagagaaaagaagagtaagaagaaatataagagccaccatggcccctaagaagaagcgtaaagtgagccgggtgaacggcagcggcagcggcggcggcatgaaccacgaccaggagttcgacccccctaaggtgtaccctcccgtccccgccgagaagagaaagcccatccgggtcctgagcctgttcgatggcatcgccaccggtctgctggtgctgaaggacctgggcatccaggtggataggtacattgcctccgaggtgtgcgaggactccatcaccgtgggaatggtgcgtcatcagggcaagatcatgtacgtgggcgacgtgcggagcgtgacacagaagcatatccaggagtggggccctttcgacctggtgatcggcggcagcccttgcaatgacctgagcatcgtgaacccagcccggaagggcctgtacgagggaaccggcagactgttcttcgagttttacagactgctgcacgacgcccggcctaaggaaggcgacgaccggcccttcttttggctgttcgagaatgtggtggccatgggagtcagcgacaagcgggatattagccggttcctggagagcaaccccgtgatgatcgatgccaaggaagtgagcgccgcccaccgggccagatacttctggggcaatctgcctggcatgaacagacccctggccagcaccgtgaacgacaagctggagctgcaggagtgcctggagcacggccggatcgccaagttcagcaaggtgagaaccatcaccacccgaagcaacagcatcaaacaaggcaaggaccagcactttcctgtgttcatgaacgagaaggaggacatcctgtggtgtaccgagatggagagagtgttcgggttcccagtccactacacagatgtcagcaacatgtctagactggccagacagagactgctgggaagaagctggtccgtccctgtgatcagacacctgttcgcccctctgaaggagtacttcgcctgcgtgagcagcggcaacagcaacgccaacagccggggccccagcttctctagcggcctggtgccactgtccctgagagggagccacatgggccccatggagatctacaaaaccgtgagcgcctggaagcggcagcctgtgcgcgtgctgagcctgtttcggaatatcgataaagtcctgaaaagcctgggattcctggagagcggctctggctccggcggtggcaccctgaagtacgtggaggatgtgacaaacgtggtcagacgggatgtggagaagtggggccccttcgatctggtgtacggcagcacccaacccctgggcagctcttgtgaccggtgccctggctggtacatgtttcagttccaccggatcctgcagtacgccctgccgagacaggagtcccagcggccattcttttggattttcatggacaacttgctgctgaccgaggatgaccaggaaactaccactcggttcctgcagaccgaagccgtgaccctgcaggacgtgagaggccgggactaccagaacgccatgcgggtgtggtccaacatccctggactgaaaagcaagcacgcacctctgacccctaaagaagaggagtacctgcaggcccaggtgcggagcagaagcaagctggacgcccctaaggtggatctgctggtgaagaattgcctcctgcccctgagagagtacttcaagtatttcagccagaatagtctgcccctgggcggcccaagcagcggcgcccctcctcccagcggcggcagcccagccggctccccaacctctaccgaggagggcacctctgagtccgccacccccgagagcggccctggcacctccaccgagcccagcgagggcagcgcacccggcagccctgccggcagccccacctccacagaggagggaaccagcaccgagcccagcgaaggcagcgccccaggcaccagcaccgagcctagtgagggcggctctggcggcggcagcgcccaggagattaaacggatcaacaagatcagaagaagacttgtgaaagacagcaacaccaagaaggccggcaagacaggccccatgaaaaccctgctggttagagtgatgacacccgatctgagagagcggctggaaaacctgagaaagaagcctgaaaatatcccccagcccatcagcaatacatctagagccaacctgaataagctgctgaccgattacaccgaaatgaagaaggcgatcctgcatgtgtactgggaagagttccagaaggaccctgtgggcctgatgagccgggtggcccagcctgccagcaagaagatcgatcagaacaagctgaaacctgagatggacgagaagggcaacctgaccaccgccggctttgcctgctctcagtgtggccagcccctgttcgtgtacaagctggagcaggtgtctgagaagggcaaggcttacaccaactacttcggacggtgcaatgtggccgagcacgaaaagctgatcctgctggcccagctgaagcccgagaaggatagcgacgaagccgtgacatatagcctgggaaagtttgggcagagggccctggatttctacagcattcatgtgaccaaggagtccacccaccccgtgaagcccctggcccagatcgccggaaacagatacgcctccggacctgtgggaaaggccctgagcgacgcatgtatgggcacaatcgcctccttcctgtctaagtaccaggacatcatcatcgaacaccagaaggtggtgaagggcaaccagaagagactggagagcctgcgggagctggccggcaaggaaaacctggaataccctagcgtgaccctgccacctcagcctcacaccaaggagggcgttgatgcctacaacgaagtgatcgcccgggtgcgaatgtgggtgaacctgaacctgtggcagaagctgaagctaagcagagatgatgccaagcctctgctgagactgaagggattcccttcctttcctctggtcgagagacaggccaacgaagtggactggtgggacatggtgtgtaacgtgaagaagctgatcaacgagaaaaaggaggatggcaaggtgttttggcagaatctggctggctacaagagacaggaagccctgagaccatacctgagcagcgaggaagatcggaagaagggaaagaaattcgctcggtaccagctgggcgacctgctgctgcacctggaaaagaagcacggcgaggactggggaaaggtgtacgacgaggcctgggagcggattgacaagaaagtggaaggcctgagcaagcacatcaagctggaagaggaacggagaagcgaggacgcccagagcaaggccgccctgaccgactggctgcgggctaaggccagcttcgtgatcgagggcctgaaggaggccgacaaggacgagttctgcagatgcgagctgaagctgcagaagtggtacggggacctgcggggaaagcccttcgccatcgaagccgagaacagcatcctggacatcagcggcttcagcaagcagtacaactgtgccttcatctggcagaaggacggcgtgaagaagctgaacctgtacctgatcatcaactacttcaagggcggcaagctgcggttcaagaagatcaaacctgaagccttcgaagccaacagattctacaccgtgatcaacaaaaagagcggcgagatcgtgcccatggaggtgaacttcaacttcgacgaccccaacctgatcatcctgcctctggcctttggcaagagacagggcagagaattcatctggaacgacctgctgtccctggaaaccggcagcctgaagctggccaacggaagagtgatcgagaagacactgtacaacagaagaacccggcaggatgagcctgccctgttcgtggccctgaccttcgagcggcgggaggtcctggactcctccaatatcaaaccaatgaacctgatcggcgtggcaagaggcgaaaacatccccgccgtgatcgccctgaccgaccccgagggctgcccactgagccggtttaaggatagcctgggaaacccaacccacatcctgagaatcggcgagagctataaggagaagcagcggaccatccaggccaagaaggaggtggagcagcggagagccggcggctacagccggaagtacgccagcaaagccaagaatctggcagacgatatggtgagaaacaccgctagagatctgctgtactacgccgtgacccaggatgccatgctgatcttcgccaacctgagccggggcttcggccggcagggcaagcggaccttcatggccgagagacagtacacacggatggaggactggctgaccgccaagctggcctacgagggcctgagcaagacctacctgtccaagacactggcccagtacacctccaagacatgcagcaactgtgggtttaccatcaccagcgccgactacgacagggtgctggagaagctgaagaagacagcaacaggctggatgaccacaattaacggcaaggagctgaaggtggagggccagattacctactacaacagatacaagagacagaacgtagtcaaggacctgtccgtcgagctggatagactgagcgaagaatctgtgaacaacgacatctcctcctggacaaagggcagaagcggagaagctctgagcctcctgaagaaaagattctcccatagacccgtgcaggagaagttcgtgtgcctgaactgcggcttcgagacacacgcagccgagcaagccgccctgaacatcgccagatcctggctgttcctgcggagccaggagtacaagaaataccagacaaacaagacaaccggcaacaccgataagagagccttcgtcgagacctggcagtccttttaccggaagaagcttaaggaggtgtggaaacctgccgtgcggtctggcggatctggcggaggctccacaagcagcatcaccttcaaggacgtggtggtggacttcacccaggaggagtggtgcctgctggaccccagccagaaggagctgtacagggaggtgatgctggagaacgtgcagaacctgttcttcgtggaggccgagaccaacttcgaggtgaaggagatgagcaccaagatgaggctgttcgtggagggcagcaacagccccaggggcatgaagaggaacccctgcgacttcctgttcagggagatcaccagccccaagaaaaagagaaaagtctaagctgccttctgcggggcttgccttctggccatgcccttcttctctcccttgcacctgtacctcttggtctttgaataaagcctgagtaggaaggctagcaaaaaaaaaaaaaaaaaaaaaaaaaaaaaaaaaaaaaaaaaaaaaaaaaaaaaaaaaaaaaaaaaaaaaaaaaaaaaaaa

SEQ ID NO: 3029 - RNA, 5419 nt, synthetic construct
  source 1..5419: mol_type = other RNA
aggaaataagagagaaaagaagagtaagaagaaatataagagccaccatggcccctaagaagaagcgtaaagtgagccgggtgaacggcagcggcagcggcggcggcatgaaccacgaccaggagttcgacccccctaaggtgtaccctcccgtccccgccgagaagagaaagcccatccgggtcctgagcctgttcgatggcatcgccaccggtctgctggtgctgaaggacctgggcatccaggtggataggtacattgcctccgaggtgtgcgaggactccatcaccgtgggaatggtgcgtcatcagggcaagatcatgtacgtgggcgacgtgcggagcgtgacacagaagcatatccaggagtggggccctttcgacctggtgatcggcggcagcccttgcaatgacctgagcatcgtgaacccagcccggaagggcctgtacgagggaaccggcagactgttcttcgagttttacagactgctgcacgacgcccggcctaaggaaggcgacgaccggcccttcttttggctgttcgagaatgtggtggccatgggagtcagcgacaagcgggatattagccggttcctggagagcaaccccgtgatgatcgatgccaaggaagtgagcgccgcccaccgggccagatacttctggggcaatctgcctggcatgaacagacccctggccagcaccgtgaacgacaagctggagctgcaggagtgcctggagcacggccggatcgccaagttcagcaaggtgagaaccatcaccacccgaagcaacagcatcaaacaaggcaaggaccagcactttcctgtgttcatgaacgagaaggaggacatcctgtggtgtaccgagatggagagagtgttcgggttcccagtccactacacagatgtcagcaacatgtctagactggccagacagagactgctgggaagaagctggtccgtccctgtgatcagacacctgttcgcccctctgaaggagtacttcgcctgcgtgagcagcggcaacagcaacgccaacagccggggccccagcttctctagcggcctggtgccactgtccctgagagggagccacatgggccccatggagatctacaaaaccgtgagcgcctggaagcggcagcctgtgcgcgtgctgagcctgtttcggaatatcgataaagtcctgaaaagcctgggattcctggagagcggctctggctccggcggtggcaccctgaagtacgtggaggatgtgacaaacgtggtcagacgggatgtggagaagtggggccccttcgatctggtgtacggcagcacccaacccctgggcagctcttgtgaccggtgccctggctggtacatgtttcagttccaccggatcctgcagtacgccctgccgagacaggagtcccagcggccattcttttggattttcatggacaacttgctgctgaccgaggatgaccaggaaactaccactcggttcctgcagaccgaagccgtgaccctgcaggacgtgagaggccgggactaccagaacgccatgcgggtgtggtccaacatccctggactgaaaagcaagcacgcacctctgacccctaaagaagaggagtacctgcaggcccaggtgcggagcagaagcaagctggacgcccctaaggtggatctgctggtgaagaattgcctcctgcccctgagagagtacttcaagtatttcagccagaatagtctgcccctgggcggcccaagcagcggcgcccctcctcccagcggcggcagcccagccggctccccaacctctaccgaggagggcacctctgagtccgccacccccgagagcggccctggcacctccaccgagcccagcgagggcagcgcacccggcagccctgccggcagccccacctccacagaggagggaaccagcaccgagcccagcgaaggcagcgccccaggcaccagcaccgagcctagtgagggcggctctggcggcggcagcgcccaggagattaaacggatcaacaagatcagaagaagacttgtgaaagacagcaacaccaagaaggccggcaagacaggccccatgaaaaccctgctggttagagtgatgacacccgatctgagagagcggctggaaaacctgagaaagaagcctgaaaatatcccccagcccatcagcaatacatctagagccaacctgaataagctgctgaccgattacaccgaaatgaagaaggcgatcctgcatgtgtactgggaagagttccagaaggaccctgtgggcctgatgagccgggtggcccagcctgccagcaagaagatcgatcagaacaagctgaaacctgagatggacgagaagggcaacctgaccaccgccggctttgcctgctctcagtgtggccagcccctgttcgtgtacaagctggagcaggtgtctgagaagggcaaggcttacaccaactacttcggacggtgcaatgtggccgagcacgaaaagctgatcctgctggcccagctgaagcccgagaaggatagcgacgaagccgtgacatatagcctgggaaagtttgggcagagggccctggatttctacagcattcatgtgaccaaggagtccacccaccccgtgaagcccctggcccagatcgccggaaacagatacgcctccggacctgtgggaaaggccctgagcgacgcatgtatgggcacaatcgcctccttcctgtctaagtaccaggacatcatcatcgaacaccagaaggtggtgaagggcaaccagaagagactggagagcctgcgggagctggccggcaaggaaaacctggaataccctagcgtgaccctgccacctcagcctcacaccaaggagggcgttgatgcctacaacgaagtgatcgcccgggtgcgaatgtgggtgaacctgaacctgtggcagaagctgaagctaagcagagatgatgccaagcctctgctgagactgaagggattcccttcctttcctctggtcgagagacaggccaacgaagtggactggtgggacatggtgtgtaacgtgaagaagctgatcaacgagaaaaaggaggatggcaaggtgttttggcagaatctggctggctacaagagacaggaagccctgagaccatacctgagcagcgaggaagatcggaagaagggaaagaaattcgctcggtaccagctgggcgacctgctgctgcacctggaaaagaagcacggcgaggactggggaaaggtgtacgacgaggcctgggagcggattgacaagaaagtggaaggcctgagcaagcacatcaagctggaagaggaacggagaagcgaggacgcccagagcaaggccgccctgaccgactggctgcgggctaaggccagcttcgtgatcgagggcctgaaggaggccgacaaggacgagttctgcagatgcgagctgaagctgcagaagtggtacggggacctgcggggaaagcccttcgccatcgaagccgagaacagcatcctggacatcagcggcttcagcaagcagtacaactgtgccttcatctggcagaaggacggcgtgaagaagctgaacctgtacctgatcatcaactacttcaagggcggcaagctgcggttcaagaagatcaaacctgaagccttcgaagccaacagattctacaccgtgatcaacaaaaagagcggcgagatcgtgcccatggaggtgaacttcaacttcgacgaccccaacctgatcatcctgcctctggcctttggcaagagacagggcagagaattcatctggaacgacctgctgtccctggaaaccggcagcctgaagctggccaacggaagagtgatcgagaagacactgtacaacagaagaacccggcaggatgagcctgccctgttcgtggccctgaccttcgagcggcgggaggtcctggactcctccaatatcaaaccaatgaacctgatcggcgtggcaagaggcgaaaacatccccgccgtgatcgccctgaccgaccccgagggctgcccactgagccggtttaaggatagcctgggaaacccaacccacatcctgagaatcggcgagagctataaggagaagcagcggaccatccaggccaagaaggaggtggagcagcggagagccggcggctacagccggaagtacgccagcaaagccaagaatctggcagacgatatggtgagaaacaccgctagagatctgctgtactacgccgtgacccaggatgccatgctgatcttcgccaacctgagccggggcttcggccggcagggcaagcggaccttcatggccgagagacagtacacacggatggaggactggctgaccgccaagctggcctacgagggcctgagcaagacctacctgtccaagacactggcccagtacacctccaagacatgcagcaactgtgggtttaccatcaccagcgccgactacgacagggtgctggagaagctgaagaagacagcaacaggctggatgaccacaattaacggcaaggagctgaaggtggagggccagattacctactacaacagatacaagagacagaacgtagtcaaggacctgtccgtcgagctggatagactgagcgaagaatctgtgaacaacgacatctcctcctggacaaagggcagaagcggagaagctctgagcctcctgaagaaaagattctcccatagacccgtgcaggagaagttcgtgtgcctgaactgcggcttcgagacacacgcagccgagcaagccgccctgaacatcgccagatcctggctgttcctgcggagccaggagtacaagaaataccagacaaacaagacaaccggcaacaccgataagagagccttcgtcgagacctggcagtccttttaccggaagaagcttaaggaggtgtggaaacctgccgtgcggtctggcggatctggcggaggctccacaagccagagcctggtgaccttcggcgacgtggccgtggacttcagcagggaggagtgggagtggctgaacagcgcccagaggaccctgcacagggacgtgatgctggagaactacaggaacctggtgagcctgggcctgtgcgtgagcaagcccgacatgatcagcagcctggagcagaggaaggagccctggatgctgaagaggaagctgaccaggggcaggtgccccgacctgaagaccatgcagaccagccccaagaaaaagagaaaagtctaagctgccttctgcggggcttgccttctggccatgcccttcttctctcccttgcacctgtacctcttggtctttgaataaagcctgagtaggaaggctagcaaaaaaaaaaaaaaaaaaaaaaaaaaaaaaaaaaaaaaaaaaaaaaaaaaaaaaaaaaaaaaaaaaaaaaaaaaaaaaaa

SEQ ID NO: 3030 - RNA, 5419 nt, synthetic construct
  source 1..5419: mol_type = other RNA
aggaaataagagagaaaagaagagtaagaagaaatataagagccaccatggcccctaagaagaagcgtaaagtgagccgggtgaacggcagcggcagcggcggcggcatgaaccacgaccaggagttcgacccccctaaggtgtaccctcccgtccccgccgagaagagaaagcccatccgggtcctgagcctgttcgatggcatcgccaccggtctgctggtgctgaaggacctgggcatccaggtggataggtacattgcctccgaggtgtgcgaggactccatcaccgtgggaatggtgcgtcatcagggcaagatcatgtacgtgggcgacgtgcggagcgtgacacagaagcatatccaggagtggggccctttcgacctggtgatcggcggcagcccttgcaatgacctgagcatcgtgaacccagcccggaagggcctgtacgagggaaccggcagactgttcttcgagttttacagactgctgcacgacgcccggcctaaggaaggcgacgaccggcccttcttttggctgttcgagaatgtggtggccatgggagtcagcgacaagcgggatattagccggttcctggagagcaaccccgtgatgatcgatgccaaggaagtgagcgccgcccaccgggccagatacttctggggcaatctgcctggcatgaacagacccctggccagcaccgtgaacgacaagctggagctgcaggagtgcctggagcacggccggatcgccaagttcagcaaggtgagaaccatcaccacccgaagcaacagcatcaaacaaggcaaggaccagcactttcctgtgttcatgaacgagaaggaggacatcctgtggtgtaccgagatggagagagtgttcgggttcccagtccactacacagatgtcagcaacatgtctagactggccagacagagactgctgggaagaagctggtccgtccctgtgatcagacacctgttcgcccctctgaaggagtacttcgcctgcgtgagcagcggcaacagcaacgccaacagccggggccccagcttctctagcggcctggtgccactgtccctgagagggagccacatgggccccatggagatctacaaaaccgtgagcgcctggaagcggcagcctgtgcgcgtgctgagcctgtttcggaatatcgataaagtcctgaaaagcctgggattcctggagagcggctctggctccggcggtggcaccctgaagtacgtggaggatgtgacaaacgtggtcagacgggatgtggagaagtggggccccttcgatctggtgtacggcagcacccaacccctgggcagctcttgtgaccggtgccctggctggtacatgtttcagttccaccggatcctgcagtacgccctgccgagacaggagtcccagcggccattcttttggattttcatggacaacttgctgctgaccgaggatgaccaggaaactaccactcggttcctgcagaccgaagccgtgaccctgcaggacgtgagaggccgggactaccagaacgccatgcgggtgtggtccaacatccctggactgaaaagcaagcacgcacctctgacccctaaagaagaggagtacctgcaggcccaggtgcggagcagaagcaagctggacgcccctaaggtggatctgctggtgaagaattgcctcctgcccctgagagagtacttcaagtatttcagccagaatagtctgcccctgggcggcccaagcagcggcgcccctcctcccagcggcggcagcccagccggctccccaacctctaccgaggagggcacctctgagtccgccacccccgagagcggccctggcacctccaccgagcccagcgagggcagcgcacccggcagccctgccggcagccccacctccacagaggagggaaccagcaccgagcccagcgaaggcagcgccccaggcaccagcaccgagcctagtgagggcggctctggcggcggcagcgcccaggagattaaacggatcaacaagatcagaagaagacttgtgaaagacagcaacaccaagaaggccggcaagacaggccccatgaaaaccctgctggttagagtgatgacacccgatctgagagagcggctggaaaacctgagaaagaagcctgaaaatatcccccagcccatcagcaatacatctagagccaacctgaataagctgctgaccgattacaccgaaatgaagaaggcgatcctgcatgtgtactgggaagagttccagaaggaccctgtgggcctgatgagccgggtggcccagcctgccagcaagaagatcgatcagaacaagctgaaacctgagatggacgagaagggcaacctgaccaccgccggctttgcctgctctcagtgtggccagcccctgttcgtgtacaagctggagcaggtgtctgagaagggcaaggcttacaccaactacttcggacggtgcaatgtggccgagcacgaaaagctgatcctgctggcccagctgaagcccgagaaggatagcgacgaagccgtgacatatagcctgggaaagtttgggcagagggccctggatttctacagcattcatgtgaccaaggagtccacccaccccgtgaagcccctggcccagatcgccggaaacagatacgcctccggacctgtgggaaaggccctgagcgacgcatgtatgggcacaatcgcctccttcctgtctaagtaccaggacatcatcatcgaacaccagaaggtggtgaagggcaaccagaagagactggagagcctgcgggagctggccggcaaggaaaacctggaataccctagcgtgaccctgccacctcagcctcacaccaaggagggcgttgatgcctacaacgaagtgatcgcccgggtgcgaatgtgggtgaacctgaacctgtggcagaagctgaagctaagcagagatgatgccaagcctctgctgagactgaagggattcccttcctttcctctggtcgagagacaggccaacgaagtggactggtgggacatggtgtgtaacgtgaagaagctgatcaacgagaaaaaggaggatggcaaggtgttttggcagaatctggctggctacaagagacaggaagccctgagaccatacctgagcagcgaggaagatcggaagaagggaaagaaattcgctcggtaccagctgggcgacctgctgctgcacctggaaaagaagcacggcgaggactggggaaaggtgtacgacgaggcctgggagcggattgacaagaaagtggaaggcctgagcaagcacatcaagctggaagaggaacggagaagcgaggacgcccagagcaaggccgccctgaccgactggctgcgggctaaggccagcttcgtgatcgagggcctgaaggaggccgacaaggacgagttctgcagatgcgagctgaagctgcagaagtggtacggggacctgcggggaaagcccttcgccatcgaagccgagaacagcatcctggacatcagcggcttcagcaagcagtacaactgtgccttcatctggcagaaggacggcgtgaagaagctgaacctgtacctgatcatcaactacttcaagggcggcaagctgcggttcaagaagatcaaacctgaagccttcgaagccaacagattctacaccgtgatcaacaaaaagagcggcgagatcgtgcccatggaggtgaacttcaacttcgacgaccccaacctgatcatcctgcctctggcctttggcaagagacagggcagagaattcatctggaacgacctgctgtccctggaaaccggcagcctgaagctggccaacggaagagtgatcgagaagacactgtacaacagaagaacccggcaggatgagcctgccctgttcgtggccctgaccttcgagcggcgggaggtcctggactcctccaatatcaaaccaatgaacctgatcggcgtggcaagaggcgaaaacatccccgccgtgatcgccctgaccgaccccgagggctgcccactgagccggtttaaggatagcctgggaaacccaacccacatcctgagaatcggcgagagctataaggagaagcagcggaccatccaggccaagaaggaggtggagcagcggagagccggcggctacagccggaagtacgccagcaaagccaagaatctggcagacgatatggtgagaaacaccgctagagatctgctgtactacgccgtgacccaggatgccatgctgatcttcgccaacctgagccggggcttcggccggcagggcaagcggaccttcatggccgagagacagtacacacggatggaggactggctgaccgccaagctggcctacgagggcctgagcaagacctacctgtccaagacactggcccagtacacctccaagacatgcagcaactgtgggtttaccatcaccagcgccgactacgacagggtgctggagaagctgaagaagacagcaacaggctggatgaccacaattaacggcaaggagctgaaggtggagggccagattacctactacaacagatacaagagacagaacgtagtcaaggacctgtccgtcgagctggatagactgagcgaagaatctgtgaacaacgacatctcctcctggacaaagggcagaagcggagaagctctgagcctcctgaagaaaagattctcccatagacccgtgcaggagaagttcgtgtgcctgaactgcggcttcgagacacacgcagccgagcaagccgccctgaacatcgccagatcctggctgttcctgcggagccaggagtacaagaaataccagacaaacaagacaaccggcaacaccgataagagagccttcgtcgagacctggcagtccttttaccggaagaagcttaaggaggtgtggaaacctgccgtgcggtctggcggatctggcggaggctccacaagcccccagaagagcgtgaccttcgaggacgtggccgtgtacttcacccccaccgagtgggacggcctgagccccgcccagagggccctgtacagggacgtgatgctggagaactacggcaacgtggccagcctgggcttccccctgatcaagcccgccgtgatcctgcagctggagggcggcggcgagctgggcggccccagccccctggccgccgagaccggcaccgacccccccggcctgtggaccagccccaagaaaaagagaaaagtctaagctgccttctgcggggcttgccttctggccatgcccttcttctctcccttgcacctgtacctcttggtctttgaataaagcctgagtaggaaggctagcaaaaaaaaaaaaaaaaaaaaaaaaaaaaaaaaaaaaaaaaaaaaaaaaaaaaaaaaaaaaaaaaaaaaaaaaaaaaaaaa

SEQ ID NO: 3031 - RNA, 5419 nt, synthetic construct
  source 1..5419: mol_type = other RNA
aggaaataagagagaaaagaagagtaagaagaaatataagagccaccatggcccctaagaagaagcgtaaagtgagccgggtgaacggcagcggcagcggcggcggcatgaaccacgaccaggagttcgacccccctaaggtgtaccctcccgtccccgccgagaagagaaagcccatccgggtcctgagcctgttcgatggcatcgccaccggtctgctggtgctgaaggacctgggcatccaggtggataggtacattgcctccgaggtgtgcgaggactccatcaccgtgggaatggtgcgtcatcagggcaagatcatgtacgtgggcgacgtgcggagcgtgacacagaagcatatccaggagtggggccctttcgacctggtgatcggcggcagcccttgcaatgacctgagcatcgtgaacccagcccggaagggcctgtacgagggaaccggcagactgttcttcgagttttacagactgctgcacgacgcccggcctaaggaaggcgacgaccggcccttcttttggctgttcgagaatgtggtggccatgggagtcagcgacaagcgggatattagccggttcctggagagcaaccccgtgatgatcgatgccaaggaagtgagcgccgcccaccgggccagatacttctggggcaatctgcctggcatgaacagacccctggccagcaccgtgaacgacaagctggagctgcaggagtgcctggagcacggccggatcgccaagttcagcaaggtgagaaccatcaccacccgaagcaacagcatcaaacaaggcaaggaccagcactttcctgtgttcatgaacgagaaggaggacatcctgtggtgtaccgagatggagagagtgttcgggttcccagtccactacacagatgtcagcaacatgtctagactggccagacagagactgctgggaagaagctggtccgtccctgtgatcagacacctgttcgcccctctgaaggagtacttcgcctgcgtgagcagcggcaacagcaacgccaacagccggggccccagcttctctagcggcctggtgccactgtccctgagagggagccacatgggccccatggagatctacaaaaccgtgagcgcctggaagcggcagcctgtgcgcgtgctgagcctgtttcggaatatcgataaagtcctgaaaagcctgggattcctggagagcggctctggctccggcggtggcaccctgaagtacgtggaggatgtgacaaacgtggtcagacgggatgtggagaagtggggccccttcgatctggtgtacggcagcacccaacccctgggcagctcttgtgaccggtgccctggctggtacatgtttcagttccaccggatcctgcagtacgccctgccgagacaggagtcccagcggccattcttttggattttcatggacaacttgctgctgaccgaggatgaccaggaaactaccactcggttcctgcagaccgaagccgtgaccctgcaggacgtgagaggccgggactaccagaacgccatgcgggtgtggtccaacatccctggactgaaaagcaagcacgcacctctgacccctaaagaagaggagtacctgcaggcccaggtgcggagcagaagcaagctggacgcccctaaggtggatctgctggtgaagaattgcctcctgcccctgagagagtacttcaagtatttcagccagaatagtctgcccctgggcggcccaagcagcggcgcccctcctcccagcggcggcagcccagccggctccccaacctctaccgaggagggcacctctgagtccgccacccccgagagcggccctggcacctccaccgagcccagcgagggcagcgcacccggcagccctgccggcagccccacctccacagaggagggaaccagcaccgagcccagcgaaggcagcgccccaggcaccagcaccgagcctagtgagggcggctctggcggcggcagcgcccaggagattaaacggatcaacaagatcagaagaagacttgtgaaagacagcaacaccaagaaggccggcaagacaggccccatgaaaaccctgctggttagagtgatgacacccgatctgagagagcggctggaaaacctgagaaagaagcctgaaaatatcccccagcccatcagcaatacatctagagccaacctgaataagctgctgaccgattacaccgaaatgaagaaggcgatcctgcatgtgtactgggaagagttccagaaggaccctgtgggcctgatgagccgggtggcccagcctgccagcaagaagatcgatcagaacaagctgaaacctgagatggacgagaagggcaacctgaccaccgccggctttgcctgctctcagtgtggccagcccctgttcgtgtacaagctggagcaggtgtctgagaagggcaaggcttacaccaactacttcggacggtgcaatgtggccgagcacgaaaagctgatcctgctggcccagctgaagcccgagaaggatagcgacgaagccgtgacatatagcctgggaaagtttgggcagagggccctggatttctacagcattcatgtgaccaaggagtccacccaccccgtgaagcccctggcccagatcgccggaaacagatacgcctccggacctgtgggaaaggccctgagcgacgcatgtatgggcacaatcgcctccttcctgtctaagtaccaggacatcatcatcgaacaccagaaggtggtgaagggcaaccagaagagactggagagcctgcgggagctggccggcaaggaaaacctggaataccctagcgtgaccctgccacctcagcctcacaccaaggagggcgttgatgcctacaacgaagtgatcgcccgggtgcgaatgtgggtgaacctgaacctgtggcagaagctgaagctaagcagagatgatgccaagcctctgctgagactgaagggattcccttcctttcctctggtcgagagacaggccaacgaagtggactggtgggacatggtgtgtaacgtgaagaagctgatcaacgagaaaaaggaggatggcaaggtgttttggcagaatctggctggctacaagagacaggaagccctgagaccatacctgagcagcgaggaagatcggaagaagggaaagaaattcgctcggtaccagctgggcgacctgctgctgcacctggaaaagaagcacggcgaggactggggaaaggtgtacgacgaggcctgggagcggattgacaagaaagtggaaggcctgagcaagcacatcaagctggaagaggaacggagaagcgaggacgcccagagcaaggccgccctgaccgactggctgcgggctaaggccagcttcgtgatcgagggcctgaaggaggccgacaaggacgagttctgcagatgcgagctgaagctgcagaagtggtacggggacctgcggggaaagcccttcgccatcgaagccgagaacagcatcctggacatcagcggcttcagcaagcagtacaactgtgccttcatctggcagaaggacggcgtgaagaagctgaacctgtacctgatcatcaactacttcaagggcggcaagctgcggttcaagaagatcaaacctgaagccttcgaagccaacagattctacaccgtgatcaacaaaaagagcggcgagatcgtgcccatggaggtgaacttcaacttcgacgaccccaacctgatcatcctgcctctggcctttggcaagagacagggcagagaattcatctggaacgacctgctgtccctggaaaccggcagcctgaagctggccaacggaagagtgatcgagaagacactgtacaacagaagaacccggcaggatgagcctgccctgttcgtggccctgaccttcgagcggcgggaggtcctggactcctccaatatcaaaccaatgaacctgatcggcgtggcaagaggcgaaaacatccccgccgtgatcgccctgaccgaccccgagggctgcccactgagccggtttaaggatagcctgggaaacccaacccacatcctgagaatcggcgagagctataaggagaagcagcggaccatccaggccaagaaggaggtggagcagcggagagccggcggctacagccggaagtacgccagcaaagccaagaatctggcagacgatatggtgagaaacaccgctagagatctgctgtactacgccgtgacccaggatgccatgctgatcttcgccaacctgagccggggcttcggccggcagggcaagcggaccttcatggccgagagacagtacacacggatggaggactggctgaccgccaagctggcctacgagggcctgagcaagacctacctgtccaagacactggcccagtacacctccaagacatgcagcaactgtgggtttaccatcaccagcgccgactacgacagggtgctggagaagctgaagaagacagcaacaggctggatgaccacaattaacggcaaggagctgaaggtggagggccagattacctactacaacagatacaagagacagaacgtagtcaaggacctgtccgtcgagctggatagactgagcgaagaatctgtgaacaacgacatctcctcctggacaaagggcagaagcggagaagctctgagcctcctgaagaaaagattctcccatagacccgtgcaggagaagttcgtgtgcctgaactgcggcttcgagacacacgcagccgagcaagccgccctgaacatcgccagatcctggctgttcctgcggagccaggagtacaagaaataccagacaaacaagacaaccggcaacaccgataagagagccttcgtcgagacctggcagtccttttaccggaagaagcttaaggaggtgtggaaacctgccgtgcggtctggcggatctggcggaggctccacaagcagcaaggcccccgtgaccttcggcgacctggccatctacttcagccaggaggagtgggagtggctgagccccatccagaaggacctgtacgaggacgtgatgctggagaactacaccaacctggtgagcctgggcctgagcagcaggaggcccaacgtgatcgccctgctggagaagggcaaggccccctggatggtggagccccccaggaggaggcagggccccgacagcaggagcaagtgcaccagccccaagaaaaagagaaaagtctaagctgccttctgcggggcttgccttctggccatgcccttcttctctcccttgcacctgtacctcttggtctttgaataaagcctgagtaggaaggctagcaaaaaaaaaaaaaaaaaaaaaaaaaaaaaaaaaaaaaaaaaaaaaaaaaaaaaaaaaaaaaaaaaaaaaaaaaaaaaaaa

SEQ ID NO: 3032 - RNA, 5419 nt, synthetic construct
  source 1..5419: mol_type = other RNA
aggaaataagagagaaaagaagagtaagaagaaatataagagccaccatggcccctaagaagaagcgtaaagtgagccgggtgaacggcagcggcagcggcggcggcatgaaccacgaccaggagttcgacccccctaaggtgtaccctcccgtccccgccgagaagagaaagcccatccgggtcctgagcctgttcgatggcatcgccaccggtctgctggtgctgaaggacctgggcatccaggtggataggtacattgcctccgaggtgtgcgaggactccatcaccgtgggaatggtgcgtcatcagggcaagatcatgtacgtgggcgacgtgcggagcgtgacacagaagcatatccaggagtggggccctttcgacctggtgatcggcggcagcccttgcaatgacctgagcatcgtgaacccagcccggaagggcctgtacgagggaaccggcagactgttcttcgagttttacagactgctgcacgacgcccggcctaaggaaggcgacgaccggcccttcttttggctgttcgagaatgtggtggccatgggagtcagcgacaagcgggatattagccggttcctggagagcaaccccgtgatgatcgatgccaaggaagtgagcgccgcccaccgggccagatacttctggggcaatctgcctggcatgaacagacccctggccagcaccgtgaacgacaagctggagctgcaggagtgcctggagcacggccggatcgccaagttcagcaaggtgagaaccatcaccacccgaagcaacagcatcaaacaaggcaaggaccagcactttcctgtgttcatgaacgagaaggaggacatcctgtggtgtaccgagatggagagagtgttcgggttcccagtccactacacagatgtcagcaacatgtctagactggccagacagagactgctgggaagaagctggtccgtccctgtgatcagacacctgttcgcccctctgaaggagtacttcgcctgcgtgagcagcggcaacagcaacgccaacagccggggccccagcttctctagcggcctggtgccactgtccctgagagggagccacatgggccccatggagatctacaaaaccgtgagcgcctggaagcggcagcctgtgcgcgtgctgagcctgtttcggaatatcgataaagtcctgaaaagcctgggattcctggagagcggctctggctccggcggtggcaccctgaagtacgtggaggatgtgacaaacgtggtcagacgggatgtggagaagtggggccccttcgatctggtgtacggcagcacccaacccctgggcagctcttgtgaccggtgccctggctggtacatgtttcagttccaccggatcctgcagtacgccctgccgagacaggagtcccagcggccattcttttggattttcatggacaacttgctgctgaccgaggatgaccaggaaactaccactcggttcctgcagaccgaagccgtgaccctgcaggacgtgagaggccgggactaccagaacgccatgcgggtgtggtccaacatccctggactgaaaagcaagcacgcacctctgacccctaaagaagaggagtacctgcaggcccaggtgcggagcagaagcaagctggacgcccctaaggtggatctgctggtgaagaattgcctcctgcccctgagagagtacttcaagtatttcagccagaatagtctgcccctgggcggcccaagcagcggcgcccctcctcccagcggcggcagcccagccggctccccaacctctaccgaggagggcacctctgagtccgccacccccgagagcggccctggcacctccaccgagcccagcgagggcagcgcacccggcagccctgccggcagccccacctccacagaggagggaaccagcaccgagcccagcgaaggcagcgccccaggcaccagcaccgagcctagtgagggcggctctggcggcggcagcgcccaggagattaaacggatcaacaagatcagaagaagacttgtgaaagacagcaacaccaagaaggccggcaagacaggccccatgaaaaccctgctggttagagtgatgacacccgatctgagagagcggctggaaaacctgagaaagaagcctgaaaatatcccccagcccatcagcaatacatctagagccaacctgaataagctgctgaccgattacaccgaaatgaagaaggcgatcctgcatgtgtactgggaagagttccagaaggaccctgtgggcctgatgagccgggtggcccagcctgccagcaagaagatcgatcagaacaagctgaaacctgagatggacgagaagggcaacctgaccaccgccggctttgcctgctctcagtgtggccagcccctgttcgtgtacaagctggagcaggtgtctgagaagggcaaggcttacaccaactacttcggacggtgcaatgtggccgagcacgaaaagctgatcctgctggcccagctgaagcccgagaaggatagcgacgaagccgtgacatatagcctgggaaagtttgggcagagggccctggatttctacagcattcatgtgaccaaggagtccacccaccccgtgaagcccctggcccagatcgccggaaacagatacgcctccggacctgtgggaaaggccctgagcgacgcatgtatgggcacaatcgcctccttcctgtctaagtaccaggacatcatcatcgaacaccagaaggtggtgaagggcaaccagaagagactggagagcctgcgggagctggccggcaaggaaaacctggaataccctagcgtgaccctgccacctcagcctcacaccaaggagggcgttgatgcctacaacgaagtgatcgcccgggtgcgaatgtgggtgaacctgaacctgtggcagaagctgaagctaagcagagatgatgccaagcctctgctgagactgaagggattcccttcctttcctctggtcgagagacaggccaacgaagtggactggtgggacatggtgtgtaacgtgaagaagctgatcaacgagaaaaaggaggatggcaaggtgttttggcagaatctggctggctacaagagacaggaagccctgagaccatacctgagcagcgaggaagatcggaagaagggaaagaaattcgctcggtaccagctgggcgacctgctgctgcacctggaaaagaagcacggcgaggactggggaaaggtgtacgacgaggcctgggagcggattgacaagaaagtggaaggcctgagcaagcacatcaagctggaagaggaacggagaagcgaggacgcccagagcaaggccgccctgaccgactggctgcgggctaaggccagcttcgtgatcgagggcctgaaggaggccgacaaggacgagttctgcagatgcgagctgaagctgcagaagtggtacggggacctgcggggaaagcccttcgccatcgaagccgagaacagcatcctggacatcagcggcttcagcaagcagtacaactgtgccttcatctggcagaaggacggcgtgaagaagctgaacctgtacctgatcatcaactacttcaagggcggcaagctgcggttcaagaagatcaaacctgaagccttcgaagccaacagattctacaccgtgatcaacaaaaagagcggcgagatcgtgcccatggaggtgaacttcaacttcgacgaccccaacctgatcatcctgcctctggcctttggcaagagacagggcagagaattcatctggaacgacctgctgtccctggaaaccggcagcctgaagctggccaacggaagagtgatcgagaagacactgtacaacagaagaacccggcaggatgagcctgccctgttcgtggccctgaccttcgagcggcgggaggtcctggactcctccaatatcaaaccaatgaacctgatcggcgtggcaagaggcgaaaacatccccgccgtgatcgccctgaccgaccccgagggctgcccactgagccggtttaaggatagcctgggaaacccaacccacatcctgagaatcggcgagagctataaggagaagcagcggaccatccaggccaagaaggaggtggagcagcggagagccggcggctacagccggaagtacgccagcaaagccaagaatctggcagacgatatggtgagaaacaccgctagagatctgctgtactacgccgtgacccaggatgccatgctgatcttcgccaacctgagccggggcttcggccggcagggcaagcggaccttcatggccgagagacagtacacacggatggaggactggctgaccgccaagctggcctacgagggcctgagcaagacctacctgtccaagacactggcccagtacacctccaagacatgcagcaactgtgggtttaccatcaccagcgccgactacgacagggtgctggagaagctgaagaagacagcaacaggctggatgaccacaattaacggcaaggagctgaaggtggagggccagattacctactacaacagatacaagagacagaacgtagtcaaggacctgtccgtcgagctggatagactgagcgaagaatctgtgaacaacgacatctcctcctggacaaagggcagaagcggagaagctctgagcctcctgaagaaaagattctcccatagacccgtgcaggagaagttcgtgtgcctgaactgcggcttcgagacacacgcagccgagcaagccgccctgaacatcgccagatcctggctgttcctgcggagccaggagtacaagaaataccagacaaacaagacaaccggcaacaccgataagagagccttcgtcgagacctggcagtccttttaccggaagaagcttaaggaggtgtggaaacctgccgtgcggtctggcggatctggcggaggctccacaagcttccagggcagcgtgagcttcaaggacgtgaccgtggacttcagcagggaggagtggcagcagctggacctggcccagaagagcctgtacagggacgtgatgctggagaactacttcaacctgatcagcgtgggctgccaggtgcccaagcccgaggtgatcttcaacctggagaggggcgagcagccctgcatgctggacggcgagatcagcagccagagctacctggaccagggcatcggcaccagccccaagaaaaagagaaaagtctaagctgccttctgcggggcttgccttctggccatgcccttcttctctcccttgcacctgtacctcttggtctttgaataaagcctgagtaggaaggctagcaaaaaaaaaaaaaaaaaaaaaaaaaaaaaaaaaaaaaaaaaaaaaaaaaaaaaaaaaaaaaaaaaaaaaaaaaaaaaaaa

SEQ ID NO: 3033 - RNA, 5419 nt, synthetic construct
  source 1..5419: mol_type = other RNA
aggaaataagagagaaaagaagagtaagaagaaatataagagccaccatggcccctaagaagaagcgtaaagtgagccgggtgaacggcagcggcagcggcggcggcatgaaccacgaccaggagttcgacccccctaaggtgtaccctcccgtccccgccgagaagagaaagcccatccgggtcctgagcctgttcgatggcatcgccaccggtctgctggtgctgaaggacctgggcatccaggtggataggtacattgcctccgaggtgtgcgaggactccatcaccgtgggaatggtgcgtcatcagggcaagatcatgtacgtgggcgacgtgcggagcgtgacacagaagcatatccaggagtggggccctttcgacctggtgatcggcggcagcccttgcaatgacctgagcatcgtgaacccagcccggaagggcctgtacgagggaaccggcagactgttcttcgagttttacagactgctgcacgacgcccggcctaaggaaggcgacgaccggcccttcttttggctgttcgagaatgtggtggccatgggagtcagcgacaagcgggatattagccggttcctggagagcaaccccgtgatgatcgatgccaaggaagtgagcgccgcccaccgggccagatacttctggggcaatctgcctggcatgaacagacccctggccagcaccgtgaacgacaagctggagctgcaggagtgcctggagcacggccggatcgccaagttcagcaaggtgagaaccatcaccacccgaagcaacagcatcaaacaaggcaaggaccagcactttcctgtgttcatgaacgagaaggaggacatcctgtggtgtaccgagatggagagagtgttcgggttcccagtccactacacagatgtcagcaacatgtctagactggccagacagagactgctgggaagaagctggtccgtccctgtgatcagacacctgttcgcccctctgaaggagtacttcgcctgcgtgagcagcggcaacagcaacgccaacagccggggccccagcttctctagcggcctggtgccactgtccctgagagggagccacatgggccccatggagatctacaaaaccgtgagcgcctggaagcggcagcctgtgcgcgtgctgagcctgtttcggaatatcgataaagtcctgaaaagcctgggattcctggagagcggctctggctccggcggtggcaccctgaagtacgtggaggatgtgacaaacgtggtcagacgggatgtggagaagtggggccccttcgatctggtgtacggcagcacccaacccctgggcagctcttgtgaccggtgccctggctggtacatgtttcagttccaccggatcctgcagtacgccctgccgagacaggagtcccagcggccattcttttggattttcatggacaacttgctgctgaccgaggatgaccaggaaactaccactcggttcctgcagaccgaagccgtgaccctgcaggacgtgagaggccgggactaccagaacgccatgcgggtgtggtccaacatccctggactgaaaagcaagcacgcacctctgacccctaaagaagaggagtacctgcaggcccaggtgcggagcagaagcaagctggacgcccctaaggtggatctgctggtgaagaattgcctcctgcccctgagagagtacttcaagtatttcagccagaatagtctgcccctgggcggcccaagcagcggcgcccctcctcccagcggcggcagcccagccggctccccaacctctaccgaggagggcacctctgagtccgccacccccgagagcggccctggcacctccaccgagcccagcgagggcagcgcacccggcagccctgccggcagccccacctccacagaggagggaaccagcaccgagcccagcgaaggcagcgccccaggcaccagcaccgagcctagtgagggcggctctggcggcggcagcgcccaggagattaaacggatcaacaagatcagaagaagacttgtgaaagacagcaacaccaagaaggccggcaagacaggccccatgaaaaccctgctggttagagtgatgacacccgatctgagagagcggctggaaaacctgagaaagaagcctgaaaatatcccccagcccatcagcaatacatctagagccaacctgaataagctgctgaccgattacaccgaaatgaagaaggcgatcctgcatgtgtactgggaagagttccagaaggaccctgtgggcctgatgagccgggtggcccagcctgccagcaagaagatcgatcagaacaagctgaaacctgagatggacgagaagggcaacctgaccaccgccggctttgcctgctctcagtgtggccagcccctgttcgtgtacaagctggagcaggtgtctgagaagggcaaggcttacaccaactacttcggacggtgcaatgtggccgagcacgaaaagctgatcctgctggcccagctgaagcccgagaaggatagcgacgaagccgtgacatatagcctgggaaagtttgggcagagggccctggatttctacagcattcatgtgaccaaggagtccacccaccccgtgaagcccctggcccagatcgccggaaacagatacgcctccggacctgtgggaaaggccctgagcgacgcatgtatgggcacaatcgcctccttcctgtctaagtaccaggacatcatcatcgaacaccagaaggtggtgaagggcaaccagaagagactggagagcctgcgggagctggccggcaaggaaaacctggaataccctagcgtgaccctgccacctcagcctcacaccaaggagggcgttgatgcctacaacgaagtgatcgcccgggtgcgaatgtgggtgaacctgaacctgtggcagaagctgaagctaagcagagatgatgccaagcctctgctgagactgaagggattcccttcctttcctctggtcgagagacaggccaacgaagtggactggtgggacatggtgtgtaacgtgaagaagctgatcaacgagaaaaaggaggatggcaaggtgttttggcagaatctggctggctacaagagacaggaagccctgagaccatacctgagcagcgaggaagatcggaagaagggaaagaaattcgctcggtaccagctgggcgacctgctgctgcacctggaaaagaagcacggcgaggactggggaaaggtgtacgacgaggcctgggagcggattgacaagaaagtggaaggcctgagcaagcacatcaagctggaagaggaacggagaagcgaggacgcccagagcaaggccgccctgaccgactggctgcgggctaaggccagcttcgtgatcgagggcctgaaggaggccgacaaggacgagttctgcagatgcgagctgaagctgcagaagtggtacggggacctgcggggaaagcccttcgccatcgaagccgagaacagcatcctggacatcagcggcttcagcaagcagtacaactgtgccttcatctggcagaaggacggcgtgaagaagctgaacctgtacctgatcatcaactacttcaagggcggcaagctgcggttcaagaagatcaaacctgaagccttcgaagccaacagattctacaccgtgatcaacaaaaagagcggcgagatcgtgcccatggaggtgaacttcaacttcgacgaccccaacctgatcatcctgcctctggcctttggcaagagacagggcagagaattcatctggaacgacctgctgtccctggaaaccggcagcctgaagctggccaacggaagagtgatcgagaagacactgtacaacagaagaacccggcaggatgagcctgccctgttcgtggccctgaccttcgagcggcgggaggtcctggactcctccaatatcaaaccaatgaacctgatcggcgtggcaagaggcgaaaacatccccgccgtgatcgccctgaccgaccccgagggctgcccactgagccggtttaaggatagcctgggaaacccaacccacatcctgagaatcggcgagagctataaggagaagcagcggaccatccaggccaagaaggaggtggagcagcggagagccggcggctacagccggaagtacgccagcaaagccaagaatctggcagacgatatggtgagaaacaccgctagagatctgctgtactacgccgtgacccaggatgccatgctgatcttcgccaacctgagccggggcttcggccggcagggcaagcggaccttcatggccgagagacagtacacacggatggaggactggctgaccgccaagctggcctacgagggcctgagcaagacctacctgtccaagacactggcccagtacacctccaagacatgcagcaactgtgggtttaccatcaccagcgccgactacgacagggtgctggagaagctgaagaagacagcaacaggctggatgaccacaattaacggcaaggagctgaaggtggagggccagattacctactacaacagatacaagagacagaacgtagtcaaggacctgtccgtcgagctggatagactgagcgaagaatctgtgaacaacgacatctcctcctggacaaagggcagaagcggagaagctctgagcctcctgaagaaaagattctcccatagacccgtgcaggagaagttcgtgtgcctgaactgcggcttcgagacacacgcagccgagcaagccgccctgaacatcgccagatcctggctgttcctgcggagccaggagtacaagaaataccagacaaacaagacaaccggcaacaccgataagagagccttcgtcgagacctggcagtccttttaccggaagaagcttaaggaggtgtggaaacctgccgtgcggtctggcggatctggcggaggctccacaagcatgagcctgggcagcgagctgttcagggacgtggccatcgtgttcagccaggaggagtggcagtggctggcccccgcccagagggacctgtacagggacgtgatgctggagacctacagcaacctggtgagcctgggcctggccatcagcaagcccgacgtgatcagcttcctggagcagggcaaggagccctggatggtggagagggtggtgagcaggggcctgtgccccgtgctggagagcaccagccccaagaaaaagagaaaagtctaagctgccttctgcggggcttgccttctggccatgcccttcttctctcccttgcacctgtacctcttggtctttgaataaagcctgagtaggaaggctagcaaaaaaaaaaaaaaaaaaaaaaaaaaaaaaaaaaaaaaaaaaaaaaaaaaaaaaaaaaaaaaaaaaaaaaaaaaaaaaaa

SEQ ID NO: 3034 - RNA, 5419 nt, synthetic construct
  source 1..5419: mol_type = other RNA
aggaaataagagagaaaagaagagtaagaagaaatataagagccaccatggcccctaagaagaagcgtaaagtgagccgggtgaacggcagcggcagcggcggcggcatgaaccacgaccaggagttcgacccccctaaggtgtaccctcccgtccccgccgagaagagaaagcccatccgggtcctgagcctgttcgatggcatcgccaccggtctgctggtgctgaaggacctgggcatccaggtggataggtacattgcctccgaggtgtgcgaggactccatcaccgtgggaatggtgcgtcatcagggcaagatcatgtacgtgggcgacgtgcggagcgtgacacagaagcatatccaggagtggggccctttcgacctggtgatcggcggcagcccttgcaatgacctgagcatcgtgaacccagcccggaagggcctgtacgagggaaccggcagactgttcttcgagttttacagactgctgcacgacgcccggcctaaggaaggcgacgaccggcccttcttttggctgttcgagaatgtggtggccatgggagtcagcgacaagcgggatattagccggttcctggagagcaaccccgtgatgatcgatgccaaggaagtgagcgccgcccaccgggccagatacttctggggcaatctgcctggcatgaacagacccctggccagcaccgtgaacgacaagctggagctgcaggagtgcctggagcacggccggatcgccaagttcagcaaggtgagaaccatcaccacccgaagcaacagcatcaaacaaggcaaggaccagcactttcctgtgttcatgaacgagaaggaggacatcctgtggtgtaccgagatggagagagtgttcgggttcccagtccactacacagatgtcagcaacatgtctagactggccagacagagactgctgggaagaagctggtccgtccctgtgatcagacacctgttcgcccctctgaaggagtacttcgcctgcgtgagcagcggcaacagcaacgccaacagccggggccccagcttctctagcggcctggtgccactgtccctgagagggagccacatgggccccatggagatctacaaaaccgtgagcgcctggaagcggcagcctgtgcgcgtgctgagcctgtttcggaatatcgataaagtcctgaaaagcctgggattcctggagagcggctctggctccggcggtggcaccctgaagtacgtggaggatgtgacaaacgtggtcagacgggatgtggagaagtggggccccttcgatctggtgtacggcagcacccaacccctgggcagctcttgtgaccggtgccctggctggtacatgtttcagttccaccggatcctgcagtacgccctgccgagacaggagtcccagcggccattcttttggattttcatggacaacttgctgctgaccgaggatgaccaggaaactaccactcggttcctgcagaccgaagccgtgaccctgcaggacgtgagaggccgggactaccagaacgccatgcgggtgtggtccaacatccctggactgaaaagcaagcacgcacctctgacccctaaagaagaggagtacctgcaggcccaggtgcggagcagaagcaagctggacgcccctaaggtggatctgctggtgaagaattgcctcctgcccctgagagagtacttcaagtatttcagccagaatagtctgcccctgggcggcccaagcagcggcgcccctcctcccagcggcggcagcccagccggctccccaacctctaccgaggagggcacctctgagtccgccacccccgagagcggccctggcacctccaccgagcccagcgagggcagcgcacccggcagccctgccggcagccccacctccacagaggagggaaccagcaccgagcccagcgaaggcagcgccccaggcaccagcaccgagcctagtgagggcggctctggcggcggcagcgcccaggagattaaacggatcaacaagatcagaagaagacttgtgaaagacagcaacaccaagaaggccggcaagacaggccccatgaaaaccctgctggttagagtgatgacacccgatctgagagagcggctggaaaacctgagaaagaagcctgaaaatatcccccagcccatcagcaatacatctagagccaacctgaataagctgctgaccgattacaccgaaatgaagaaggcgatcctgcatgtgtactgggaagagttccagaaggaccctgtgggcctgatgagccgggtggcccagcctgccagcaagaagatcgatcagaacaagctgaaacctgagatggacgagaagggcaacctgaccaccgccggctttgcctgctctcagtgtggccagcccctgttcgtgtacaagctggagcaggtgtctgagaagggcaaggcttacaccaactacttcggacggtgcaatgtggccgagcacgaaaagctgatcctgctggcccagctgaagcccgagaaggatagcgacgaagccgtgacatatagcctgggaaagtttgggcagagggccctggatttctacagcattcatgtgaccaaggagtccacccaccccgtgaagcccctggcccagatcgccggaaacagatacgcctccggacctgtgggaaaggccctgagcgacgcatgtatgggcacaatcgcctccttcctgtctaagtaccaggacatcatcatcgaacaccagaaggtggtgaagggcaaccagaagagactggagagcctgcgggagctggccggcaaggaaaacctggaataccctagcgtgaccctgccacctcagcctcacaccaaggagggcgttgatgcctacaacgaagtgatcgcccgggtgcgaatgtgggtgaacctgaacctgtggcagaagctgaagctaagcagagatgatgccaagcctctgctgagactgaagggattcccttcctttcctctggtcgagagacaggccaacgaagtggactggtgggacatggtgtgtaacgtgaagaagctgatcaacgagaaaaaggaggatggcaaggtgttttggcagaatctggctggctacaagagacaggaagccctgagaccatacctgagcagcgaggaagatcggaagaagggaaagaaattcgctcggtaccagctgggcgacctgctgctgcacctggaaaagaagcacggcgaggactggggaaaggtgtacgacgaggcctgggagcggattgacaagaaagtggaaggcctgagcaagcacatcaagctggaagaggaacggagaagcgaggacgcccagagcaaggccgccctgaccgactggctgcgggctaaggccagcttcgtgatcgagggcctgaaggaggccgacaaggacgagttctgcagatgcgagctgaagctgcagaagtggtacggggacctgcggggaaagcccttcgccatcgaagccgagaacagcatcctggacatcagcggcttcagcaagcagtacaactgtgccttcatctggcagaaggacggcgtgaagaagctgaacctgtacctgatcatcaactacttcaagggcggcaagctgcggttcaagaagatcaaacctgaagccttcgaagccaacagattctacaccgtgatcaacaaaaagagcggcgagatcgtgcccatggaggtgaacttcaacttcgacgaccccaacctgatcatcctgcctctggcctttggcaagagacagggcagagaattcatctggaacgacctgctgtccctggaaaccggcagcctgaagctggccaacggaagagtgatcgagaagacactgtacaacagaagaacccggcaggatgagcctgccctgttcgtggccctgaccttcgagcggcgggaggtcctggactcctccaatatcaaaccaatgaacctgatcggcgtggcaagaggcgaaaacatccccgccgtgatcgccctgaccgaccccgagggctgcccactgagccggtttaaggatagcctgggaaacccaacccacatcctgagaatcggcgagagctataaggagaagcagcggaccatccaggccaagaaggaggtggagcagcggagagccggcggctacagccggaagtacgccagcaaagccaagaatctggcagacgatatggtgagaaacaccgctagagatctgctgtactacgccgtgacccaggatgccatgctgatcttcgccaacctgagccggggcttcggccggcagggcaagcggaccttcatggccgagagacagtacacacggatggaggactggctgaccgccaagctggcctacgagggcctgagcaagacctacctgtccaagacactggcccagtacacctccaagacatgcagcaactgtgggtttaccatcaccagcgccgactacgacagggtgctggagaagctgaagaagacagcaacaggctggatgaccacaattaacggcaaggagctgaaggtggagggccagattacctactacaacagatacaagagacagaacgtagtcaaggacctgtccgtcgagctggatagactgagcgaagaatctgtgaacaacgacatctcctcctggacaaagggcagaagcggagaagctctgagcctcctgaagaaaagattctcccatagacccgtgcaggagaagttcgtgtgcctgaactgcggcttcgagacacacgcagccgagcaagccgccctgaacatcgccagatcctggctgttcctgcggagccaggagtacaagaaataccagacaaacaagacaaccggcaacaccgataagagagccttcgtcgagacctggcagtccttttaccggaagaagcttaaggaggtgtggaaacctgccgtgcggtctggcggatctggcggaggctccacaagcgcccaggagagcgtgatgttcagcgacgtgagcatcgacttcagccaggaggagtgggagtgcctgaccgacgaccagaggcacctgtacagggacgtgatgctggagaactacagcaacctggtgagcatgggccacagcatcagcaagcccaacgtgatcagctacctggagcagggcaaggagccctggctggtggacaggggcaggaccaggggccagtggcccgtgctggagagcaccaccagccccaagaaaaagagaaaagtctaagctgccttctgcggggcttgccttctggccatgcccttcttctctcccttgcacctgtacctcttggtctttgaataaagcctgagtaggaaggctagcaaaaaaaaaaaaaaaaaaaaaaaaaaaaaaaaaaaaaaaaaaaaaaaaaaaaaaaaaaaaaaaaaaaaaaaaaaaaaaaa

SEQ ID NO: 3035 - RNA, 5419 nt, synthetic construct
  source 1..5419: mol_type = other RNA
aggaaataagagagaaaagaagagtaagaagaaatataagagccaccatggcccctaagaagaagcgtaaagtgagccgggtgaacggcagcggcagcggcggcggcatgaaccacgaccaggagttcgacccccctaaggtgtaccctcccgtccccgccgagaagagaaagcccatccgggtcctgagcctgttcgatggcatcgccaccggtctgctggtgctgaaggacctgggcatccaggtggataggtacattgcctccgaggtgtgcgaggactccatcaccgtgggaatggtgcgtcatcagggcaagatcatgtacgtgggcgacgtgcggagcgtgacacagaagcatatccaggagtggggccctttcgacctggtgatcggcggcagcccttgcaatgacctgagcatcgtgaacccagcccggaagggcctgtacgagggaaccggcagactgttcttcgagttttacagactgctgcacgacgcccggcctaaggaaggcgacgaccggcccttcttttggctgttcgagaatgtggtggccatgggagtcagcgacaagcgggatattagccggttcctggagagcaaccccgtgatgatcgatgccaaggaagtgagcgccgcccaccgggccagatacttctggggcaatctgcctggcatgaacagacccctggccagcaccgtgaacgacaagctggagctgcaggagtgcctggagcacggccggatcgccaagttcagcaaggtgagaaccatcaccacccgaagcaacagcatcaaacaaggcaaggaccagcactttcctgtgttcatgaacgagaaggaggacatcctgtggtgtaccgagatggagagagtgttcgggttcccagtccactacacagatgtcagcaacatgtctagactggccagacagagactgctgggaagaagctggtccgtccctgtgatcagacacctgttcgcccctctgaaggagtacttcgcctgcgtgagcagcggcaacagcaacgccaacagccggggccccagcttctctagcggcctggtgccactgtccctgagagggagccacatgggccccatggagatctacaaaaccgtgagcgcctggaagcggcagcctgtgcgcgtgctgagcctgtttcggaatatcgataaagtcctgaaaagcctgggattcctggagagcggctctggctccggcggtggcaccctgaagtacgtggaggatgtgacaaacgtggtcagacgggatgtggagaagtggggccccttcgatctggtgtacggcagcacccaacccctgggcagctcttgtgaccggtgccctggctggtacatgtttcagttccaccggatcctgcagtacgccctgccgagacaggagtcccagcggccattcttttggattttcatggacaacttgctgctgaccgaggatgaccaggaaactaccactcggttcctgcagaccgaagccgtgaccctgcaggacgtgagaggccgggactaccagaacgccatgcgggtgtggtccaacatccctggactgaaaagcaagcacgcacctctgacccctaaagaagaggagtacctgcaggcccaggtgcggagcagaagcaagctggacgcccctaaggtggatctgctggtgaagaattgcctcctgcccctgagagagtacttcaagtatttcagccagaatagtctgcccctgggcggcccaagcagcggcgcccctcctcccagcggcggcagcccagccggctccccaacctctaccgaggagggcacctctgagtccgccacccccgagagcggccctggcacctccaccgagcccagcgagggcagcgcacccggcagccctgccggcagccccacctccacagaggagggaaccagcaccgagcccagcgaaggcagcgccccaggcaccagcaccgagcctagtgagggcggctctggcggcggcagcgcccaggagattaaacggatcaacaagatcagaagaagacttgtgaaagacagcaacaccaagaaggccggcaagacaggccccatgaaaaccctgctggttagagtgatgacacccgatctgagagagcggctggaaaacctgagaaagaagcctgaaaatatcccccagcccatcagcaatacatctagagccaacctgaataagctgctgaccgattacaccgaaatgaagaaggcgatcctgcatgtgtactgggaagagttccagaaggaccctgtgggcctgatgagccgggtggcccagcctgccagcaagaagatcgatcagaacaagctgaaacctgagatggacgagaagggcaacctgaccaccgccggctttgcctgctctcagtgtggccagcccctgttcgtgtacaagctggagcaggtgtctgagaagggcaaggcttacaccaactacttcggacggtgcaatgtggccgagcacgaaaagctgatcctgctggcccagctgaagcccgagaaggatagcgacgaagccgtgacatatagcctgggaaagtttgggcagagggccctggatttctacagcattcatgtgaccaaggagtccacccaccccgtgaagcccctggcccagatcgccggaaacagatacgcctccggacctgtgggaaaggccctgagcgacgcatgtatgggcacaatcgcctccttcctgtctaagtaccaggacatcatcatcgaacaccagaaggtggtgaagggcaaccagaagagactggagagcctgcgggagctggccggcaaggaaaacctggaataccctagcgtgaccctgccacctcagcctcacaccaaggagggcgttgatgcctacaacgaagtgatcgcccgggtgcgaatgtgggtgaacctgaacctgtggcagaagctgaagctaagcagagatgatgccaagcctctgctgagactgaagggattcccttcctttcctctggtcgagagacaggccaacgaagtggactggtgggacatggtgtgtaacgtgaagaagctgatcaacgagaaaaaggaggatggcaaggtgttttggcagaatctggctggctacaagagacaggaagccctgagaccatacctgagcagcgaggaagatcggaagaagggaaagaaattcgctcggtaccagctgggcgacctgctgctgcacctggaaaagaagcacggcgaggactggggaaaggtgtacgacgaggcctgggagcggattgacaagaaagtggaaggcctgagcaagcacatcaagctggaagaggaacggagaagcgaggacgcccagagcaaggccgccctgaccgactggctgcgggctaaggccagcttcgtgatcgagggcctgaaggaggccgacaaggacgagttctgcagatgcgagctgaagctgcagaagtggtacggggacctgcggggaaagcccttcgccatcgaagccgagaacagcatcctggacatcagcggcttcagcaagcagtacaactgtgccttcatctggcagaaggacggcgtgaagaagctgaacctgtacctgatcatcaactacttcaagggcggcaagctgcggttcaagaagatcaaacctgaagccttcgaagccaacagattctacaccgtgatcaacaaaaagagcggcgagatcgtgcccatggaggtgaacttcaacttcgacgaccccaacctgatcatcctgcctctggcctttggcaagagacagggcagagaattcatctggaacgacctgctgtccctggaaaccggcagcctgaagctggccaacggaagagtgatcgagaagacactgtacaacagaagaacccggcaggatgagcctgccctgttcgtggccctgaccttcgagcggcgggaggtcctggactcctccaatatcaaaccaatgaacctgatcggcgtggcaagaggcgaaaacatccccgccgtgatcgccctgaccgaccccgagggctgcccactgagccggtttaaggatagcctgggaaacccaacccacatcctgagaatcggcgagagctataaggagaagcagcggaccatccaggccaagaaggaggtggagcagcggagagccggcggctacagccggaagtacgccagcaaagccaagaatctggcagacgatatggtgagaaacaccgctagagatctgctgtactacgccgtgacccaggatgccatgctgatcttcgccaacctgagccggggcttcggccggcagggcaagcggaccttcatggccgagagacagtacacacggatggaggactggctgaccgccaagctggcctacgagggcctgagcaagacctacctgtccaagacactggcccagtacacctccaagacatgcagcaactgtgggtttaccatcaccagcgccgactacgacagggtgctggagaagctgaagaagacagcaacaggctggatgaccacaattaacggcaaggagctgaaggtggagggccagattacctactacaacagatacaagagacagaacgtagtcaaggacctgtccgtcgagctggatagactgagcgaagaatctgtgaacaacgacatctcctcctggacaaagggcagaagcggagaagctctgagcctcctgaagaaaagattctcccatagacccgtgcaggagaagttcgtgtgcctgaactgcggcttcgagacacacgcagccgagcaagccgccctgaacatcgccagatcctggctgttcctgcggagccaggagtacaagaaataccagacaaacaagacaaccggcaacaccgataagagagccttcgtcgagacctggcagtccttttaccggaagaagcttaaggaggtgtggaaacctgccgtgcggtctggcggatctggcggaggctccacaagcctgcaggtgagcgtgagcttcgaggacgtgaccgtggacttcagcagggaggagtggcagcacctggaccccgcccagaggaggctgtacagggacgtgaccctggagaactacagccacctgcacagcgtgggctaccaggtgcccaagcccgaggtgatcttcaagctggagcagggcgagggcccctggaccctggagggcgagaccccccaccagggctgcagcgacgaggccatcggcaccagccccaagaaaaagagaaaagtctaagctgccttctgcggggcttgccttctggccatgcccttcttctctcccttgcacctgtacctcttggtctttgaataaagcctgagtaggaaggctagcaaaaaaaaaaaaaaaaaaaaaaaaaaaaaaaaaaaaaaaaaaaaaaaaaaaaaaaaaaaaaaaaaaaaaaaaaaaaaaaa

SEQ ID NO: 3036 - RNA, 5419 nt, synthetic construct
  source 1..5419: mol_type = other RNA
aggaaataagagagaaaagaagagtaagaagaaatataagagccaccatggcccctaagaagaagcgtaaagtgagccgggtgaacggcagcggcagcggcggcggcatgaaccacgaccaggagttcgacccccctaaggtgtaccctcccgtccccgccgagaagagaaagcccatccgggtcctgagcctgttcgatggcatcgccaccggtctgctggtgctgaaggacctgggcatccaggtggataggtacattgcctccgaggtgtgcgaggactccatcaccgtgggaatggtgcgtcatcagggcaagatcatgtacgtgggcgacgtgcggagcgtgacacagaagcatatccaggagtggggccctttcgacctggtgatcggcggcagcccttgcaatgacctgagcatcgtgaacccagcccggaagggcctgtacgagggaaccggcagactgttcttcgagttttacagactgctgcacgacgcccggcctaaggaaggcgacgaccggcccttcttttggctgttcgagaatgtggtggccatgggagtcagcgacaagcgggatattagccggttcctggagagcaaccccgtgatgatcgatgccaaggaagtgagcgccgcccaccgggccagatacttctggggcaatctgcctggcatgaacagacccctggccagcaccgtgaacgacaagctggagctgcaggagtgcctggagcacggccggatcgccaagttcagcaaggtgagaaccatcaccacccgaagcaacagcatcaaacaaggcaaggaccagcactttcctgtgttcatgaacgagaaggaggacatcctgtggtgtaccgagatggagagagtgttcgggttcccagtccactacacagatgtcagcaacatgtctagactggccagacagagactgctgggaagaagctggtccgtccctgtgatcagacacctgttcgcccctctgaaggagtacttcgcctgcgtgagcagcggcaacagcaacgccaacagccggggccccagcttctctagcggcctggtgccactgtccctgagagggagccacatgggccccatggagatctacaaaaccgtgagcgcctggaagcggcagcctgtgcgcgtgctgagcctgtttcggaatatcgataaagtcctgaaaagcctgggattcctggagagcggctctggctccggcggtggcaccctgaagtacgtggaggatgtgacaaacgtggtcagacgggatgtggagaagtggggccccttcgatctggtgtacggcagcacccaacccctgggcagctcttgtgaccggtgccctggctggtacatgtttcagttccaccggatcctgcagtacgccctgccgagacaggagtcccagcggccattcttttggattttcatggacaacttgctgctgaccgaggatgaccaggaaactaccactcggttcctgcagaccgaagccgtgaccctgcaggacgtgagaggccgggactaccagaacgccatgcgggtgtggtccaacatccctggactgaaaagcaagcacgcacctctgacccctaaagaagaggagtacctgcaggcccaggtgcggagcagaagcaagctggacgcccctaaggtggatctgctggtgaagaattgcctcctgcccctgagagagtacttcaagtatttcagccagaatagtctgcccctgggcggcccaagcagcggcgcccctcctcccagcggcggcagcccagccggctccccaacctctaccgaggagggcacctctgagtccgccacccccgagagcggccctggcacctccaccgagcccagcgagggcagcgcacccggcagccctgccggcagccccacctccacagaggagggaaccagcaccgagcccagcgaaggcagcgccccaggcaccagcaccgagcctagtgagggcggctctggcggcggcagcgcccaggagattaaacggatcaacaagatcagaagaagacttgtgaaagacagcaacaccaagaaggccggcaagacaggccccatgaaaaccctgctggttagagtgatgacacccgatctgagagagcggctggaaaacctgagaaagaagcctgaaaatatcccccagcccatcagcaatacatctagagccaacctgaataagctgctgaccgattacaccgaaatgaagaaggcgatcctgcatgtgtactgggaagagttccagaaggaccctgtgggcctgatgagccgggtggcccagcctgccagcaagaagatcgatcagaacaagctgaaacctgagatggacgagaagggcaacctgaccaccgccggctttgcctgctctcagtgtggccagcccctgttcgtgtacaagctggagcaggtgtctgagaagggcaaggcttacaccaactacttcggacggtgcaatgtggccgagcacgaaaagctgatcctgctggcccagctgaagcccgagaaggatagcgacgaagccgtgacatatagcctgggaaagtttgggcagagggccctggatttctacagcattcatgtgaccaaggagtccacccaccccgtgaagcccctggcccagatcgccggaaacagatacgcctccggacctgtgggaaaggccctgagcgacgcatgtatgggcacaatcgcctccttcctgtctaagtaccaggacatcatcatcgaacaccagaaggtggtgaagggcaaccagaagagactggagagcctgcgggagctggccggcaaggaaaacctggaataccctagcgtgaccctgccacctcagcctcacaccaaggagggcgttgatgcctacaacgaagtgatcgcccgggtgcgaatgtgggtgaacctgaacctgtggcagaagctgaagctaagcagagatgatgccaagcctctgctgagactgaagggattcccttcctttcctctggtcgagagacaggccaacgaagtggactggtgggacatggtgtgtaacgtgaagaagctgatcaacgagaaaaaggaggatggcaaggtgttttggcagaatctggctggctacaagagacaggaagccctgagaccatacctgagcagcgaggaagatcggaagaagggaaagaaattcgctcggtaccagctgggcgacctgctgctgcacctggaaaagaagcacggcgaggactggggaaaggtgtacgacgaggcctgggagcggattgacaagaaagtggaaggcctgagcaagcacatcaagctggaagaggaacggagaagcgaggacgcccagagcaaggccgccctgaccgactggctgcgggctaaggccagcttcgtgatcgagggcctgaaggaggccgacaaggacgagttctgcagatgcgagctgaagctgcagaagtggtacggggacctgcggggaaagcccttcgccatcgaagccgagaacagcatcctggacatcagcggcttcagcaagcagtacaactgtgccttcatctggcagaaggacggcgtgaagaagctgaacctgtacctgatcatcaactacttcaagggcggcaagctgcggttcaagaagatcaaacctgaagccttcgaagccaacagattctacaccgtgatcaacaaaaagagcggcgagatcgtgcccatggaggtgaacttcaacttcgacgaccccaacctgatcatcctgcctctggcctttggcaagagacagggcagagaattcatctggaacgacctgctgtccctggaaaccggcagcctgaagctggccaacggaagagtgatcgagaagacactgtacaacagaagaacccggcaggatgagcctgccctgttcgtggccctgaccttcgagcggcgggaggtcctggactcctccaatatcaaaccaatgaacctgatcggcgtggcaagaggcgaaaacatccccgccgtgatcgccctgaccgaccccgagggctgcccactgagccggtttaaggatagcctgggaaacccaacccacatcctgagaatcggcgagagctataaggagaagcagcggaccatccaggccaagaaggaggtggagcagcggagagccggcggctacagccggaagtacgccagcaaagccaagaatctggcagacgatatggtgagaaacaccgctagagatctgctgtactacgccgtgacccaggatgccatgctgatcttcgccaacctgagccggggcttcggccggcagggcaagcggaccttcatggccgagagacagtacacacggatggaggactggctgaccgccaagctggcctacgagggcctgagcaagacctacctgtccaagacactggcccagtacacctccaagacatgcagcaactgtgggtttaccatcaccagcgccgactacgacagggtgctggagaagctgaagaagacagcaacaggctggatgaccacaattaacggcaaggagctgaaggtggagggccagattacctactacaacagatacaagagacagaacgtagtcaaggacctgtccgtcgagctggatagactgagcgaagaatctgtgaacaacgacatctcctcctggacaaagggcagaagcggagaagctctgagcctcctgaagaaaagattctcccatagacccgtgcaggagaagttcgtgtgcctgaactgcggcttcgagacacacgcagccgagcaagccgccctgaacatcgccagatcctggctgttcctgcggagccaggagtacaagaaataccagacaaacaagacaaccggcaacaccgataagagagccttcgtcgagacctggcagtccttttaccggaagaagcttaaggaggtgtggaaacctgccgtgcggtctggcggatctggcggaggctccacaagcagcctgggcagcgacctgttcagggacgtggccatcgtgttcagccaggaggagtgggagcagctggcccccacccagagggacctgtacagggacgtgatgctggagacctacagcaacctggtgagcctgggcctggccgtgagcaagcccgacgtgatcagcttcctggagcagggcaaggagccctggaccgtggaggaggtggccgccggcggcctgtgccccgtgctgaagagcaggaccagccccaagaaaaagagaaaagtctaagctgccttctgcggggcttgccttctggccatgcccttcttctctcccttgcacctgtacctcttggtctttgaataaagcctgagtaggaaggctagcaaaaaaaaaaaaaaaaaaaaaaaaaaaaaaaaaaaaaaaaaaaaaaaaaaaaaaaaaaaaaaaaaaaaaaaaaaaaaaaa

SEQ ID NO: 3037 - RNA, 5419 nt, synthetic construct
  source 1..5419: mol_type = other RNA
aggaaataagagagaaaagaagagtaagaagaaatataagagccaccatggcccctaagaagaagcgtaaagtgagccgggtgaacggcagcggcagcggcggcggcatgaaccacgaccaggagttcgacccccctaaggtgtaccctcccgtccccgccgagaagagaaagcccatccgggtcctgagcctgttcgatggcatcgccaccggtctgctggtgctgaaggacctgggcatccaggtggataggtacattgcctccgaggtgtgcgaggactccatcaccgtgggaatggtgcgtcatcagggcaagatcatgtacgtgggcgacgtgcggagcgtgacacagaagcatatccaggagtggggccctttcgacctggtgatcggcggcagcccttgcaatgacctgagcatcgtgaacccagcccggaagggcctgtacgagggaaccggcagactgttcttcgagttttacagactgctgcacgacgcccggcctaaggaaggcgacgaccggcccttcttttggctgttcgagaatgtggtggccatgggagtcagcgacaagcgggatattagccggttcctggagagcaaccccgtgatgatcgatgccaaggaagtgagcgccgcccaccgggccagatacttctggggcaatctgcctggcatgaacagacccctggccagcaccgtgaacgacaagctggagctgcaggagtgcctggagcacggccggatcgccaagttcagcaaggtgagaaccatcaccacccgaagcaacagcatcaaacaaggcaaggaccagcactttcctgtgttcatgaacgagaaggaggacatcctgtggtgtaccgagatggagagagtgttcgggttcccagtccactacacagatgtcagcaacatgtctagactggccagacagagactgctgggaagaagctggtccgtccctgtgatcagacacctgttcgcccctctgaaggagtacttcgcctgcgtgagcagcggcaacagcaacgccaacagccggggccccagcttctctagcggcctggtgccactgtccctgagagggagccacatgggccccatggagatctacaaaaccgtgagcgcctggaagcggcagcctgtgcgcgtgctgagcctgtttcggaatatcgataaagtcctgaaaagcctgggattcctggagagcggctctggctccggcggtggcaccctgaagtacgtggaggatgtgacaaacgtggtcagacgggatgtggagaagtggggccccttcgatctggtgtacggcagcacccaacccctgggcagctcttgtgaccggtgccctggctggtacatgtttcagttccaccggatcctgcagtacgccctgccgagacaggagtcccagcggccattcttttggattttcatggacaacttgctgctgaccgaggatgaccaggaaactaccactcggttcctgcagaccgaagccgtgaccctgcaggacgtgagaggccgggactaccagaacgccatgcgggtgtggtccaacatccctggactgaaaagcaagcacgcacctctgacccctaaagaagaggagtacctgcaggcccaggtgcggagcagaagcaagctggacgcccctaaggtggatctgctggtgaagaattgcctcctgcccctgagagagtacttcaagtatttcagccagaatagtctgcccctgggcggcccaagcagcggcgcccctcctcccagcggcggcagcccagccggctccccaacctctaccgaggagggcacctctgagtccgccacccccgagagcggccctggcacctccaccgagcccagcgagggcagcgcacccggcagccctgccggcagccccacctccacagaggagggaaccagcaccgagcccagcgaaggcagcgccccaggcaccagcaccgagcctagtgagggcggctctggcggcggcagcgcccaggagattaaacggatcaacaagatcagaagaagacttgtgaaagacagcaacaccaagaaggccggcaagacaggccccatgaaaaccctgctggttagagtgatgacacccgatctgagagagcggctggaaaacctgagaaagaagcctgaaaatatcccccagcccatcagcaatacatctagagccaacctgaataagctgctgaccgattacaccgaaatgaagaaggcgatcctgcatgtgtactgggaagagttccagaaggaccctgtgggcctgatgagccgggtggcccagcctgccagcaagaagatcgatcagaacaagctgaaacctgagatggacgagaagggcaacctgaccaccgccggctttgcctgctctcagtgtggccagcccctgttcgtgtacaagctggagcaggtgtctgagaagggcaaggcttacaccaactacttcggacggtgcaatgtggccgagcacgaaaagctgatcctgctggcccagctgaagcccgagaaggatagcgacgaagccgtgacatatagcctgggaaagtttgggcagagggccctggatttctacagcattcatgtgaccaaggagtccacccaccccgtgaagcccctggcccagatcgccggaaacagatacgcctccggacctgtgggaaaggccctgagcgacgcatgtatgggcacaatcgcctccttcctgtctaagtaccaggacatcatcatcgaacaccagaaggtggtgaagggcaaccagaagagactggagagcctgcgggagctggccggcaaggaaaacctggaataccctagcgtgaccctgccacctcagcctcacaccaaggagggcgttgatgcctacaacgaagtgatcgcccgggtgcgaatgtgggtgaacctgaacctgtggcagaagctgaagctaagcagagatgatgccaagcctctgctgagactgaagggattcccttcctttcctctggtcgagagacaggccaacgaagtggactggtgggacatggtgtgtaacgtgaagaagctgatcaacgagaaaaaggaggatggcaaggtgttttggcagaatctggctggctacaagagacaggaagccctgagaccatacctgagcagcgaggaagatcggaagaagggaaagaaattcgctcggtaccagctgggcgacctgctgctgcacctggaaaagaagcacggcgaggactggggaaaggtgtacgacgaggcctgggagcggattgacaagaaagtggaaggcctgagcaagcacatcaagctggaagaggaacggagaagcgaggacgcccagagcaaggccgccctgaccgactggctgcgggctaaggccagcttcgtgatcgagggcctgaaggaggccgacaaggacgagttctgcagatgcgagctgaagctgcagaagtggtacggggacctgcggggaaagcccttcgccatcgaagccgagaacagcatcctggacatcagcggcttcagcaagcagtacaactgtgccttcatctggcagaaggacggcgtgaagaagctgaacctgtacctgatcatcaactacttcaagggcggcaagctgcggttcaagaagatcaaacctgaagccttcgaagccaacagattctacaccgtgatcaacaaaaagagcggcgagatcgtgcccatggaggtgaacttcaacttcgacgaccccaacctgatcatcctgcctctggcctttggcaagagacagggcagagaattcatctggaacgacctgctgtccctggaaaccggcagcctgaagctggccaacggaagagtgatcgagaagacactgtacaacagaagaacccggcaggatgagcctgccctgttcgtggccctgaccttcgagcggcgggaggtcctggactcctccaatatcaaaccaatgaacctgatcggcgtggcaagaggcgaaaacatccccgccgtgatcgccctgaccgaccccgagggctgcccactgagccggtttaaggatagcctgggaaacccaacccacatcctgagaatcggcgagagctataaggagaagcagcggaccatccaggccaagaaggaggtggagcagcggagagccggcggctacagccggaagtacgccagcaaagccaagaatctggcagacgatatggtgagaaacaccgctagagatctgctgtactacgccgtgacccaggatgccatgctgatcttcgccaacctgagccggggcttcggccggcagggcaagcggaccttcatggccgagagacagtacacacggatggaggactggctgaccgccaagctggcctacgagggcctgagcaagacctacctgtccaagacactggcccagtacacctccaagacatgcagcaactgtgggtttaccatcaccagcgccgactacgacagggtgctggagaagctgaagaagacagcaacaggctggatgaccacaattaacggcaaggagctgaaggtggagggccagattacctactacaacagatacaagagacagaacgtagtcaaggacctgtccgtcgagctggatagactgagcgaagaatctgtgaacaacgacatctcctcctggacaaagggcagaagcggagaagctctgagcctcctgaagaaaagattctcccatagacccgtgcaggagaagttcgtgtgcctgaactgcggcttcgagacacacgcagccgagcaagccgccctgaacatcgccagatcctggctgttcctgcggagccaggagtacaagaaataccagacaaacaagacaaccggcaacaccgataagagagccttcgtcgagacctggcagtccttttaccggaagaagcttaaggaggtgtggaaacctgccgtgcggtctggcggatctggcggaggctccacaagcgccagcgtgaccgtgaccttcgacgacgtggccctgtacttcagcgagcaggagtgggagatcctggagaagtggcagaagcagatgtacaagcaggagatgaagaccaactaccagaccctggacagcctgggctacgccttcagcaagcccgacctgatcacctggatggagcagggcaggatgctgttcatcagcgagcagggctgcctggacaagaccaggaggaccaccagcccccccaccagccccaagaaaaagagaaaagtctaagctgccttctgcggggcttgccttctggccatgcccttcttctctcccttgcacctgtacctcttggtctttgaataaagcctgagtaggaaggctagcaaaaaaaaaaaaaaaaaaaaaaaaaaaaaaaaaaaaaaaaaaaaaaaaaaaaaaaaaaaaaaaaaaaaaaaaaaaaaaaa

SEQ ID NO: 3038 - RNA, 5419 nt, synthetic construct
  source 1..5419: mol_type = other RNA
aggaaataagagagaaaagaagagtaagaagaaatataagagccaccatggcccctaagaagaagcgtaaagtgagccgggtgaacggcagcggcagcggcggcggcatgaaccacgaccaggagttcgacccccctaaggtgtaccctcccgtccccgccgagaagagaaagcccatccgggtcctgagcctgttcgatggcatcgccaccggtctgctggtgctgaaggacctgggcatccaggtggataggtacattgcctccgaggtgtgcgaggactccatcaccgtgggaatggtgcgtcatcagggcaagatcatgtacgtgggcgacgtgcggagcgtgacacagaagcatatccaggagtggggccctttcgacctggtgatcggcggcagcccttgcaatgacctgagcatcgtgaacccagcccggaagggcctgtacgagggaaccggcagactgttcttcgagttttacagactgctgcacgacgcccggcctaaggaaggcgacgaccggcccttcttttggctgttcgagaatgtggtggccatgggagtcagcgacaagcgggatattagccggttcctggagagcaaccccgtgatgatcgatgccaaggaagtgagcgccgcccaccgggccagatacttctggggcaatctgcctggcatgaacagacccctggccagcaccgtgaacgacaagctggagctgcaggagtgcctggagcacggccggatcgccaagttcagcaaggtgagaaccatcaccacccgaagcaacagcatcaaacaaggcaaggaccagcactttcctgtgttcatgaacgagaaggaggacatcctgtggtgtaccgagatggagagagtgttcgggttcccagtccactacacagatgtcagcaacatgtctagactggccagacagagactgctgggaagaagctggtccgtccctgtgatcagacacctgttcgcccctctgaaggagtacttcgcctgcgtgagcagcggcaacagcaacgccaacagccggggccccagcttctctagcggcctggtgccactgtccctgagagggagccacatgggccccatggagatctacaaaaccgtgagcgcctggaagcggcagcctgtgcgcgtgctgagcctgtttcggaatatcgataaagtcctgaaaagcctgggattcctggagagcggctctggctccggcggtggcaccctgaagtacgtggaggatgtgacaaacgtggtcagacgggatgtggagaagtggggccccttcgatctggtgtacggcagcacccaacccctgggcagctcttgtgaccggtgccctggctggtacatgtttcagttccaccggatcctgcagtacgccctgccgagacaggagtcccagcggccattcttttggattttcatggacaacttgctgctgaccgaggatgaccaggaaactaccactcggttcctgcagaccgaagccgtgaccctgcaggacgtgagaggccgggactaccagaacgccatgcgggtgtggtccaacatccctggactgaaaagcaagcacgcacctctgacccctaaagaagaggagtacctgcaggcccaggtgcggagcagaagcaagctggacgcccctaaggtggatctgctggtgaagaattgcctcctgcccctgagagagtacttcaagtatttcagccagaatagtctgcccctgggcggcccaagcagcggcgcccctcctcccagcggcggcagcccagccggctccccaacctctaccgaggagggcacctctgagtccgccacccccgagagcggccctggcacctccaccgagcccagcgagggcagcgcacccggcagccctgccggcagccccacctccacagaggagggaaccagcaccgagcccagcgaaggcagcgccccaggcaccagcaccgagcctagtgagggcggctctggcggcggcagcgcccaggagattaaacggatcaacaagatcagaagaagacttgtgaaagacagcaacaccaagaaggccggcaagacaggccccatgaaaaccctgctggttagagtgatgacacccgatctgagagagcggctggaaaacctgagaaagaagcctgaaaatatcccccagcccatcagcaatacatctagagccaacctgaataagctgctgaccgattacaccgaaatgaagaaggcgatcctgcatgtgtactgggaagagttccagaaggaccctgtgggcctgatgagccgggtggcccagcctgccagcaagaagatcgatcagaacaagctgaaacctgagatggacgagaagggcaacctgaccaccgccggctttgcctgctctcagtgtggccagcccctgttcgtgtacaagctggagcaggtgtctgagaagggcaaggcttacaccaactacttcggacggtgcaatgtggccgagcacgaaaagctgatcctgctggcccagctgaagcccgagaaggatagcgacgaagccgtgacatatagcctgggaaagtttgggcagagggccctggatttctacagcattcatgtgaccaaggagtccacccaccccgtgaagcccctggcccagatcgccggaaacagatacgcctccggacctgtgggaaaggccctgagcgacgcatgtatgggcacaatcgcctccttcctgtctaagtaccaggacatcatcatcgaacaccagaaggtggtgaagggcaaccagaagagactggagagcctgcgggagctggccggcaaggaaaacctggaataccctagcgtgaccctgccacctcagcctcacaccaaggagggcgttgatgcctacaacgaagtgatcgcccgggtgcgaatgtgggtgaacctgaacctgtggcagaagctgaagctaagcagagatgatgccaagcctctgctgagactgaagggattcccttcctttcctctggtcgagagacaggccaacgaagtggactggtgggacatggtgtgtaacgtgaagaagctgatcaacgagaaaaaggaggatggcaaggtgttttggcagaatctggctggctacaagagacaggaagccctgagaccatacctgagcagcgaggaagatcggaagaagggaaagaaattcgctcggtaccagctgggcgacctgctgctgcacctggaaaagaagcacggcgaggactggggaaaggtgtacgacgaggcctgggagcggattgacaagaaagtggaaggcctgagcaagcacatcaagctggaagaggaacggagaagcgaggacgcccagagcaaggccgccctgaccgactggctgcgggctaaggccagcttcgtgatcgagggcctgaaggaggccgacaaggacgagttctgcagatgcgagctgaagctgcagaagtggtacggggacctgcggggaaagcccttcgccatcgaagccgagaacagcatcctggacatcagcggcttcagcaagcagtacaactgtgccttcatctggcagaaggacggcgtgaagaagctgaacctgtacctgatcatcaactacttcaagggcggcaagctgcggttcaagaagatcaaacctgaagccttcgaagccaacagattctacaccgtgatcaacaaaaagagcggcgagatcgtgcccatggaggtgaacttcaacttcgacgaccccaacctgatcatcctgcctctggcctttggcaagagacagggcagagaattcatctggaacgacctgctgtccctggaaaccggcagcctgaagctggccaacggaagagtgatcgagaagacactgtacaacagaagaacccggcaggatgagcctgccctgttcgtggccctgaccttcgagcggcgggaggtcctggactcctccaatatcaaaccaatgaacctgatcggcgtggcaagaggcgaaaacatccccgccgtgatcgccctgaccgaccccgagggctgcccactgagccggtttaaggatagcctgggaaacccaacccacatcctgagaatcggcgagagctataaggagaagcagcggaccatccaggccaagaaggaggtggagcagcggagagccggcggctacagccggaagtacgccagcaaagccaagaatctggcagacgatatggtgagaaacaccgctagagatctgctgtactacgccgtgacccaggatgccatgctgatcttcgccaacctgagccggggcttcggccggcagggcaagcggaccttcatggccgagagacagtacacacggatggaggactggctgaccgccaagctggcctacgagggcctgagcaagacctacctgtccaagacactggcccagtacacctccaagacatgcagcaactgtgggtttaccatcaccagcgccgactacgacagggtgctggagaagctgaagaagacagcaacaggctggatgaccacaattaacggcaaggagctgaaggtggagggccagattacctactacaacagatacaagagacagaacgtagtcaaggacctgtccgtcgagctggatagactgagcgaagaatctgtgaacaacgacatctcctcctggacaaagggcagaagcggagaagctctgagcctcctgaagaaaagattctcccatagacccgtgcaggagaagttcgtgtgcctgaactgcggcttcgagacacacgcagccgagcaagccgccctgaacatcgccagatcctggctgttcctgcggagccaggagtacaagaaataccagacaaacaagacaaccggcaacaccgataagagagccttcgtcgagacctggcagtccttttaccggaagaagcttaaggaggtgtggaaacctgccgtgcggtctggcggatctggcggaggctccacaagccagccccaggaggccgtgaccttcaaggacgtggaggtgaccttcagccaggacgagtggggctggctggacgccagccagaggaacctgtacagggacgtgatgctggagaactacggcaacgtgaccagcctggtgggccccttcaccaagcccgccctgatcagctggctggaggccagggagccctggggcctgaacgtgcagggcgcccaccccaagaggagccccagcgccgcccccaccagccccaagaaaaagagaaaagtctaagctgccttctgcggggcttgccttctggccatgcccttcttctctcccttgcacctgtacctcttggtctttgaataaagcctgagtaggaaggctagcaaaaaaaaaaaaaaaaaaaaaaaaaaaaaaaaaaaaaaaaaaaaaaaaaaaaaaaaaaaaaaaaaaaaaaaaaaaaaaaa

SEQ ID NO: 3039 - RNA, 5419 nt, synthetic construct
  source 1..5419: mol_type = other RNA
aggaaataagagagaaaagaagagtaagaagaaatataagagccaccatggcccctaagaagaagcgtaaagtgagccgggtgaacggcagcggcagcggcggcggcatgaaccacgaccaggagttcgacccccctaaggtgtaccctcccgtccccgccgagaagagaaagcccatccgggtcctgagcctgttcgatggcatcgccaccggtctgctggtgctgaaggacctgggcatccaggtggataggtacattgcctccgaggtgtgcgaggactccatcaccgtgggaatggtgcgtcatcagggcaagatcatgtacgtgggcgacgtgcggagcgtgacacagaagcatatccaggagtggggccctttcgacctggtgatcggcggcagcccttgcaatgacctgagcatcgtgaacccagcccggaagggcctgtacgagggaaccggcagactgttcttcgagttttacagactgctgcacgacgcccggcctaaggaaggcgacgaccggcccttcttttggctgttcgagaatgtggtggccatgggagtcagcgacaagcgggatattagccggttcctggagagcaaccccgtgatgatcgatgccaaggaagtgagcgccgcccaccgggccagatacttctggggcaatctgcctggcatgaacagacccctggccagcaccgtgaacgacaagctggagctgcaggagtgcctggagcacggccggatcgccaagttcagcaaggtgagaaccatcaccacccgaagcaacagcatcaaacaaggcaaggaccagcactttcctgtgttcatgaacgagaaggaggacatcctgtggtgtaccgagatggagagagtgttcgggttcccagtccactacacagatgtcagcaacatgtctagactggccagacagagactgctgggaagaagctggtccgtccctgtgatcagacacctgttcgcccctctgaaggagtacttcgcctgcgtgagcagcggcaacagcaacgccaacagccggggccccagcttctctagcggcctggtgccactgtccctgagagggagccacatgggccccatggagatctacaaaaccgtgagcgcctggaagcggcagcctgtgcgcgtgctgagcctgtttcggaatatcgataaagtcctgaaaagcctgggattcctggagagcggctctggctccggcggtggcaccctgaagtacgtggaggatgtgacaaacgtggtcagacgggatgtggagaagtggggccccttcgatctggtgtacggcagcacccaacccctgggcagctcttgtgaccggtgccctggctggtacatgtttcagttccaccggatcctgcagtacgccctgccgagacaggagtcccagcggccattcttttggattttcatggacaacttgctgctgaccgaggatgaccaggaaactaccactcggttcctgcagaccgaagccgtgaccctgcaggacgtgagaggccgggactaccagaacgccatgcgggtgtggtccaacatccctggactgaaaagcaagcacgcacctctgacccctaaagaagaggagtacctgcaggcccaggtgcggagcagaagcaagctggacgcccctaaggtggatctgctggtgaagaattgcctcctgcccctgagagagtacttcaagtatttcagccagaatagtctgcccctgggcggcccaagcagcggcgcccctcctcccagcggcggcagcccagccggctccccaacctctaccgaggagggcacctctgagtccgccacccccgagagcggccctggcacctccaccgagcccagcgagggcagcgcacccggcagccctgccggcagccccacctccacagaggagggaaccagcaccgagcccagcgaaggcagcgccccaggcaccagcaccgagcctagtgagggcggctctggcggcggcagcgcccaggagattaaacggatcaacaagatcagaagaagacttgtgaaagacagcaacaccaagaaggccggcaagacaggccccatgaaaaccctgctggttagagtgatgacacccgatctgagagagcggctggaaaacctgagaaagaagcctgaaaatatcccccagcccatcagcaatacatctagagccaacctgaataagctgctgaccgattacaccgaaatgaagaaggcgatcctgcatgtgtactgggaagagttccagaaggaccctgtgggcctgatgagccgggtggcccagcctgccagcaagaagatcgatcagaacaagctgaaacctgagatggacgagaagggcaacctgaccaccgccggctttgcctgctctcagtgtggccagcccctgttcgtgtacaagctggagcaggtgtctgagaagggcaaggcttacaccaactacttcggacggtgcaatgtggccgagcacgaaaagctgatcctgctggcccagctgaagcccgagaaggatagcgacgaagccgtgacatatagcctgggaaagtttgggcagagggccctggatttctacagcattcatgtgaccaaggagtccacccaccccgtgaagcccctggcccagatcgccggaaacagatacgcctccggacctgtgggaaaggccctgagcgacgcatgtatgggcacaatcgcctccttcctgtctaagtaccaggacatcatcatcgaacaccagaaggtggtgaagggcaaccagaagagactggagagcctgcgggagctggccggcaaggaaaacctggaataccctagcgtgaccctgccacctcagcctcacaccaaggagggcgttgatgcctacaacgaagtgatcgcccgggtgcgaatgtgggtgaacctgaacctgtggcagaagctgaagctaagcagagatgatgccaagcctctgctgagactgaagggattcccttcctttcctctggtcgagagacaggccaacgaagtggactggtgggacatggtgtgtaacgtgaagaagctgatcaacgagaaaaaggaggatggcaaggtgttttggcagaatctggctggctacaagagacaggaagccctgagaccatacctgagcagcgaggaagatcggaagaagggaaagaaattcgctcggtaccagctgggcgacctgctgctgcacctggaaaagaagcacggcgaggactggggaaaggtgtacgacgaggcctgggagcggattgacaagaaagtggaaggcctgagcaagcacatcaagctggaagaggaacggagaagcgaggacgcccagagcaaggccgccctgaccgactggctgcgggctaaggccagcttcgtgatcgagggcctgaaggaggccgacaaggacgagttctgcagatgcgagctgaagctgcagaagtggtacggggacctgcggggaaagcccttcgccatcgaagccgagaacagcatcctggacatcagcggcttcagcaagcagtacaactgtgccttcatctggcagaaggacggcgtgaagaagctgaacctgtacctgatcatcaactacttcaagggcggcaagctgcggttcaagaagatcaaacctgaagccttcgaagccaacagattctacaccgtgatcaacaaaaagagcggcgagatcgtgcccatggaggtgaacttcaacttcgacgaccccaacctgatcatcctgcctctggcctttggcaagagacagggcagagaattcatctggaacgacctgctgtccctggaaaccggcagcctgaagctggccaacggaagagtgatcgagaagacactgtacaacagaagaacccggcaggatgagcctgccctgttcgtggccctgaccttcgagcggcgggaggtcctggactcctccaatatcaaaccaatgaacctgatcggcgtggcaagaggcgaaaacatccccgccgtgatcgccctgaccgaccccgagggctgcccactgagccggtttaaggatagcctgggaaacccaacccacatcctgagaatcggcgagagctataaggagaagcagcggaccatccaggccaagaaggaggtggagcagcggagagccggcggctacagccggaagtacgccagcaaagccaagaatctggcagacgatatggtgagaaacaccgctagagatctgctgtactacgccgtgacccaggatgccatgctgatcttcgccaacctgagccggggcttcggccggcagggcaagcggaccttcatggccgagagacagtacacacggatggaggactggctgaccgccaagctggcctacgagggcctgagcaagacctacctgtccaagacactggcccagtacacctccaagacatgcagcaactgtgggtttaccatcaccagcgccgactacgacagggtgctggagaagctgaagaagacagcaacaggctggatgaccacaattaacggcaaggagctgaaggtggagggccagattacctactacaacagatacaagagacagaacgtagtcaaggacctgtccgtcgagctggatagactgagcgaagaatctgtgaacaacgacatctcctcctggacaaagggcagaagcggagaagctctgagcctcctgaagaaaagattctcccatagacccgtgcaggagaagttcgtgtgcctgaactgcggcttcgagacacacgcagccgagcaagccgccctgaacatcgccagatcctggctgttcctgcggagccaggagtacaagaaataccagacaaacaagacaaccggcaacaccgataagagagccttcgtcgagacctggcagtccttttaccggaagaagcttaaggaggtgtggaaacctgccgtgcggtctggcggatctggcggaggctccacaagccaggccgaggtgaccttcgaggacgtggccgtgttcctgagccaggaggagtggggcctgctgggccccgcccagaagggcctgtacagggaggtgatgctggagacctacaggaacctggtgagcctgggcgccggcctggccggccccaagcccgaggtgatcgcccagctggagcagggcgacgagctgtgggtgctggacatgcacggcgccgagcagcccagcgtggacggcagcgccaccagccccaagaaaaagagaaaagtctaagctgccttctgcggggcttgccttctggccatgcccttcttctctcccttgcacctgtacctcttggtctttgaataaagcctgagtaggaaggctagcaaaaaaaaaaaaaaaaaaaaaaaaaaaaaaaaaaaaaaaaaaaaaaaaaaaaaaaaaaaaaaaaaaaaaaaaaaaaaaaa

SEQ ID NO: 3040 - RNA, 5416 nt, synthetic construct
  source 1..5416: mol_type = other RNA
aggaaataagagagaaaagaagagtaagaagaaatataagagccaccatggcccctaagaagaagcgtaaagtgagccgggtgaacggcagcggcagcggcggcggcatgaaccacgaccaggagttcgacccccctaaggtgtaccctcccgtccccgccgagaagagaaagcccatccgggtcctgagcctgttcgatggcatcgccaccggtctgctggtgctgaaggacctgggcatccaggtggataggtacattgcctccgaggtgtgcgaggactccatcaccgtgggaatggtgcgtcatcagggcaagatcatgtacgtgggcgacgtgcggagcgtgacacagaagcatatccaggagtggggccctttcgacctggtgatcggcggcagcccttgcaatgacctgagcatcgtgaacccagcccggaagggcctgtacgagggaaccggcagactgttcttcgagttttacagactgctgcacgacgcccggcctaaggaaggcgacgaccggcccttcttttggctgttcgagaatgtggtggccatgggagtcagcgacaagcgggatattagccggttcctggagagcaaccccgtgatgatcgatgccaaggaagtgagcgccgcccaccgggccagatacttctggggcaatctgcctggcatgaacagacccctggccagcaccgtgaacgacaagctggagctgcaggagtgcctggagcacggccggatcgccaagttcagcaaggtgagaaccatcaccacccgaagcaacagcatcaaacaaggcaaggaccagcactttcctgtgttcatgaacgagaaggaggacatcctgtggtgtaccgagatggagagagtgttcgggttcccagtccactacacagatgtcagcaacatgtctagactggccagacagagactgctgggaagaagctggtccgtccctgtgatcagacacctgttcgcccctctgaaggagtacttcgcctgcgtgagcagcggcaacagcaacgccaacagccggggccccagcttctctagcggcctggtgccactgtccctgagagggagccacatgggccccatggagatctacaaaaccgtgagcgcctggaagcggcagcctgtgcgcgtgctgagcctgtttcggaatatcgataaagtcctgaaaagcctgggattcctggagagcggctctggctccggcggtggcaccctgaagtacgtggaggatgtgacaaacgtggtcagacgggatgtggagaagtggggccccttcgatctggtgtacggcagcacccaacccctgggcagctcttgtgaccggtgccctggctggtacatgtttcagttccaccggatcctgcagtacgccctgccgagacaggagtcccagcggccattcttttggattttcatggacaacttgctgctgaccgaggatgaccaggaaactaccactcggttcctgcagaccgaagccgtgaccctgcaggacgtgagaggccgggactaccagaacgccatgcgggtgtggtccaacatccctggactgaaaagcaagcacgcacctctgacccctaaagaagaggagtacctgcaggcccaggtgcggagcagaagcaagctggacgcccctaaggtggatctgctggtgaagaattgcctcctgcccctgagagagtacttcaagtatttcagccagaatagtctgcccctgggcggcccaagcagcggcgcccctcctcccagcggcggcagcccagccggctccccaacctctaccgaggagggcacctctgagtccgccacccccgagagcggccctggcacctccaccgagcccagcgagggcagcgcacccggcagccctgccggcagccccacctccacagaggagggaaccagcaccgagcccagcgaaggcagcgccccaggcaccagcaccgagcctagtgagggcggctctggcggcggcagcgcccaggagattaaacggatcaacaagatcagaagaagacttgtgaaagacagcaacaccaagaaggccggcaagacaggccccatgaaaaccctgctggttagagtgatgacacccgatctgagagagcggctggaaaacctgagaaagaagcctgaaaatatcccccagcccatcagcaatacatctagagccaacctgaataagctgctgaccgattacaccgaaatgaagaaggcgatcctgcatgtgtactgggaagagttccagaaggaccctgtgggcctgatgagccgggtggcccagcctgccagcaagaagatcgatcagaacaagctgaaacctgagatggacgagaagggcaacctgaccaccgccggctttgcctgctctcagtgtggccagcccctgttcgtgtacaagctggagcaggtgtctgagaagggcaaggcttacaccaactacttcggacggtgcaatgtggccgagcacgaaaagctgatcctgctggcccagctgaagcccgagaaggatagcgacgaagccgtgacatatagcctgggaaagtttgggcagagggccctggatttctacagcattcatgtgaccaaggagtccacccaccccgtgaagcccctggcccagatcgccggaaacagatacgcctccggacctgtgggaaaggccctgagcgacgcatgtatgggcacaatcgcctccttcctgtctaagtaccaggacatcatcatcgaacaccagaaggtggtgaagggcaaccagaagagactggagagcctgcgggagctggccggcaaggaaaacctggaataccctagcgtgaccctgccacctcagcctcacaccaaggagggcgttgatgcctacaacgaagtgatcgcccgggtgcgaatgtgggtgaacctgaacctgtggcagaagctgaagctaagcagagatgatgccaagcctctgctgagactgaagggattcccttcctttcctctggtcgagagacaggccaacgaagtggactggtgggacatggtgtgtaacgtgaagaagctgatcaacgagaaaaaggaggatggcaaggtgttttggcagaatctggctggctacaagagacaggaagccctgagaccatacctgagcagcgaggaagatcggaagaagggaaagaaattcgctcggtaccagctgggcgacctgctgctgcacctggaaaagaagcacggcgaggactggggaaaggtgtacgacgaggcctgggagcggattgacaagaaagtggaaggcctgagcaagcacatcaagctggaagaggaacggagaagcgaggacgcccagagcaaggccgccctgaccgactggctgcgggctaaggccagcttcgtgatcgagggcctgaaggaggccgacaaggacgagttctgcagatgcgagctgaagctgcagaagtggtacggggacctgcggggaaagcccttcgccatcgaagccgagaacagcatcctggacatcagcggcttcagcaagcagtacaactgtgccttcatctggcagaaggacggcgtgaagaagctgaacctgtacctgatcatcaactacttcaagggcggcaagctgcggttcaagaagatcaaacctgaagccttcgaagccaacagattctacaccgtgatcaacaaaaagagcggcgagatcgtgcccatggaggtgaacttcaacttcgacgaccccaacctgatcatcctgcctctggcctttggcaagagacagggcagagaattcatctggaacgacctgctgtccctggaaaccggcagcctgaagctggccaacggaagagtgatcgagaagacactgtacaacagaagaacccggcaggatgagcctgccctgttcgtggccctgaccttcgagcggcgggaggtcctggactcctccaatatcaaaccaatgaacctgatcggcgtggcaagaggcgaaaacatccccgccgtgatcgccctgaccgaccccgagggctgcccactgagccggtttaaggatagcctgggaaacccaacccacatcctgagaatcggcgagagctataaggagaagcagcggaccatccaggccaagaaggaggtggagcagcggagagccggcggctacagccggaagtacgccagcaaagccaagaatctggcagacgatatggtgagaaacaccgctagagatctgctgtactacgccgtgacccaggatgccatgctgatcttcgccaacctgagccggggcttcggccggcagggcaagcggaccttcatggccgagagacagtacacacggatggaggactggctgaccgccaagctggcctacgagggcctgagcaagacctacctgtccaagacactggcccagtacacctccaagacatgcagcaactgtgggtttaccatcaccagcgccgactacgacagggtgctggagaagctgaagaagacagcaacaggctggatgaccacaattaacggcaaggagctgaaggtggagggccagattacctactacaacagatacaagagacagaacgtagtcaaggacctgtccgtcgagctggatagactgagcgaagaatctgtgaacaacgacatctcctcctggacaaagggcagaagcggagaagctctgagcctcctgaagaaaagattctcccatagacccgtgcaggagaagttcgtgtgcctgaactgcggcttcgagacacacgcagccgagcaagccgccctgaacatcgccagatcctggctgttcctgcggagccaggagtacaagaaataccagacaaacaagacaaccggcaacaccgataagagagccttcgtcgagacctggcagtccttttaccggaagaagcttaaggaggtgtggaaacctgccgtgcggtctggcggatctggcggaggctccacaagcaacatggagggcctggtgatgttccaggacctgagcatcgacttcagccaggaggagtgggagtgcctggacgccgcccagaaggacctgtacagagacgtgatgatggagaactacagcagcctggtgagcctgggcctgagcatccccaagcccgacgtgatcagcctgctggagcagggcaaggagccctggatggtgagcagagacgtgctgggcggctggtgcagagacagcgagaccagccccaagaaaaagagaaaagtctaagctgccttctgcggggcttgccttctggccatgcccttcttctctcccttgcacctgtacctcttggtctttgaataaagcctgagtaggaaggctagcaaaaaaaaaaaaaaaaaaaaaaaaaaaaaaaaaaaaaaaaaaaaaaaaaaaaaaaaaaaaaaaaaaaaaaaaaaaaaaaa

SEQ ID NO: 3041 - RNA, 5419 nt, synthetic construct
  source 1..5419: mol_type = other RNA
aggaaataagagagaaaagaagagtaagaagaaatataagagccaccatggcccctaagaagaagcgtaaagtgagccgggtgaacggcagcggcagcggcggcggcatgaaccacgaccaggagttcgacccccctaaggtgtaccctcccgtccccgccgagaagagaaagcccatccgggtcctgagcctgttcgatggcatcgccaccggtctgctggtgctgaaggacctgggcatccaggtggataggtacattgcctccgaggtgtgcgaggactccatcaccgtgggaatggtgcgtcatcagggcaagatcatgtacgtgggcgacgtgcggagcgtgacacagaagcatatccaggagtggggccctttcgacctggtgatcggcggcagcccttgcaatgacctgagcatcgtgaacccagcccggaagggcctgtacgagggaaccggcagactgttcttcgagttttacagactgctgcacgacgcccggcctaaggaaggcgacgaccggcccttcttttggctgttcgagaatgtggtggccatgggagtcagcgacaagcgggatattagccggttcctggagagcaaccccgtgatgatcgatgccaaggaagtgagcgccgcccaccgggccagatacttctggggcaatctgcctggcatgaacagacccctggccagcaccgtgaacgacaagctggagctgcaggagtgcctggagcacggccggatcgccaagttcagcaaggtgagaaccatcaccacccgaagcaacagcatcaaacaaggcaaggaccagcactttcctgtgttcatgaacgagaaggaggacatcctgtggtgtaccgagatggagagagtgttcgggttcccagtccactacacagatgtcagcaacatgtctagactggccagacagagactgctgggaagaagctggtccgtccctgtgatcagacacctgttcgcccctctgaaggagtacttcgcctgcgtgagcagcggcaacagcaacgccaacagccggggccccagcttctctagcggcctggtgccactgtccctgagagggagccacatgggccccatggagatctacaaaaccgtgagcgcctggaagcggcagcctgtgcgcgtgctgagcctgtttcggaatatcgataaagtcctgaaaagcctgggattcctggagagcggctctggctccggcggtggcaccctgaagtacgtggaggatgtgacaaacgtggtcagacgggatgtggagaagtggggccccttcgatctggtgtacggcagcacccaacccctgggcagctcttgtgaccggtgccctggctggtacatgtttcagttccaccggatcctgcagtacgccctgccgagacaggagtcccagcggccattcttttggattttcatggacaacttgctgctgaccgaggatgaccaggaaactaccactcggttcctgcagaccgaagccgtgaccctgcaggacgtgagaggccgggactaccagaacgccatgcgggtgtggtccaacatccctggactgaaaagcaagcacgcacctctgacccctaaagaagaggagtacctgcaggcccaggtgcggagcagaagcaagctggacgcccctaaggtggatctgctggtgaagaattgcctcctgcccctgagagagtacttcaagtatttcagccagaatagtctgcccctgggcggcccaagcagcggcgcccctcctcccagcggcggcagcccagccggctccccaacctctaccgaggagggcacctctgagtccgccacccccgagagcggccctggcacctccaccgagcccagcgagggcagcgcacccggcagccctgccggcagccccacctccacagaggagggaaccagcaccgagcccagcgaaggcagcgccccaggcaccagcaccgagcctagtgagggcggctctggcggcggcagcgcccaggagattaaacggatcaacaagatcagaagaagacttgtgaaagacagcaacaccaagaaggccggcaagacaggccccatgaaaaccctgctggttagagtgatgacacccgatctgagagagcggctggaaaacctgagaaagaagcctgaaaatatcccccagcccatcagcaatacatctagagccaacctgaataagctgctgaccgattacaccgaaatgaagaaggcgatcctgcatgtgtactgggaagagttccagaaggaccctgtgggcctgatgagccgggtggcccagcctgccagcaagaagatcgatcagaacaagctgaaacctgagatggacgagaagggcaacctgaccaccgccggctttgcctgctctcagtgtggccagcccctgttcgtgtacaagctggagcaggtgtctgagaagggcaaggcttacaccaactacttcggacggtgcaatgtggccgagcacgaaaagctgatcctgctggcccagctgaagcccgagaaggatagcgacgaagccgtgacatatagcctgggaaagtttgggcagagggccctggatttctacagcattcatgtgaccaaggagtccacccaccccgtgaagcccctggcccagatcgccggaaacagatacgcctccggacctgtgggaaaggccctgagcgacgcatgtatgggcacaatcgcctccttcctgtctaagtaccaggacatcatcatcgaacaccagaaggtggtgaagggcaaccagaagagactggagagcctgcgggagctggccggcaaggaaaacctggaataccctagcgtgaccctgccacctcagcctcacaccaaggagggcgttgatgcctacaacgaagtgatcgcccgggtgcgaatgtgggtgaacctgaacctgtggcagaagctgaagctaagcagagatgatgccaagcctctgctgagactgaagggattcccttcctttcctctggtcgagagacaggccaacgaagtggactggtgggacatggtgtgtaacgtgaagaagctgatcaacgagaaaaaggaggatggcaaggtgttttggcagaatctggctggctacaagagacaggaagccctgagaccatacctgagcagcgaggaagatcggaagaagggaaagaaattcgctcggtaccagctgggcgacctgctgctgcacctggaaaagaagcacggcgaggactggggaaaggtgtacgacgaggcctgggagcggattgacaagaaagtggaaggcctgagcaagcacatcaagctggaagaggaacggagaagcgaggacgcccagagcaaggccgccctgaccgactggctgcgggctaaggccagcttcgtgatcgagggcctgaaggaggccgacaaggacgagttctgcagatgcgagctgaagctgcagaagtggtacggggacctgcggggaaagcccttcgccatcgaagccgagaacagcatcctggacatcagcggcttcagcaagcagtacaactgtgccttcatctggcagaaggacggcgtgaagaagctgaacctgtacctgatcatcaactacttcaagggcggcaagctgcggttcaagaagatcaaacctgaagccttcgaagccaacagattctacaccgtgatcaacaaaaagagcggcgagatcgtgcccatggaggtgaacttcaacttcgacgaccccaacctgatcatcctgcctctggcctttggcaagagacagggcagagaattcatctggaacgacctgctgtccctggaaaccggcagcctgaagctggccaacggaagagtgatcgagaagacactgtacaacagaagaacccggcaggatgagcctgccctgttcgtggccctgaccttcgagcggcgggaggtcctggactcctccaatatcaaaccaatgaacctgatcggcgtggcaagaggcgaaaacatccccgccgtgatcgccctgaccgaccccgagggctgcccactgagccggtttaaggatagcctgggaaacccaacccacatcctgagaatcggcgagagctataaggagaagcagcggaccatccaggccaagaaggaggtggagcagcggagagccggcggctacagccggaagtacgccagcaaagccaagaatctggcagacgatatggtgagaaacaccgctagagatctgctgtactacgccgtgacccaggatgccatgctgatcttcgccaacctgagccggggcttcggccggcagggcaagcggaccttcatggccgagagacagtacacacggatggaggactggctgaccgccaagctggcctacgagggcctgagcaagacctacctgtccaagacactggcccagtacacctccaagacatgcagcaactgtgggtttaccatcaccagcgccgactacgacagggtgctggagaagctgaagaagacagcaacaggctggatgaccacaattaacggcaaggagctgaaggtggagggccagattacctactacaacagatacaagagacagaacgtagtcaaggacctgtccgtcgagctggatagactgagcgaagaatctgtgaacaacgacatctcctcctggacaaagggcagaagcggagaagctctgagcctcctgaagaaaagattctcccatagacccgtgcaggagaagttcgtgtgcctgaactgcggcttcgagacacacgcagccgagcaagccgccctgaacatcgccagatcctggctgttcctgcggagccaggagtacaagaaataccagacaaacaagacaaccggcaacaccgataagagagccttcgtcgagacctggcagtccttttaccggaagaagcttaaggaggtgtggaaacctgccgtgcggtctggcggatctggcggaggctccacaagcgcccccctgctggcccccaggcccggcgagaccaggcccggctgcaggaagcccggcgccgtgagcttcgccgacgtggccgtgtacttcagccccgaggagtggggctgcctgaggcccgcccagagggccctgtacagggacgtgatgagggagacctacggccacctgggcgccctgggcttccccggccccaagcccgccctgatcagctggatggagcaggagagcgaggcctggagcaccagccccaagaaaaagagaaaagtctaagctgccttctgcggggcttgccttctggccatgcccttcttctctcccttgcacctgtacctcttggtctttgaataaagcctgagtaggaaggctagcaaaaaaaaaaaaaaaaaaaaaaaaaaaaaaaaaaaaaaaaaaaaaaaaaaaaaaaaaaaaaaaaaaaaaaaaaaaaaaaa

SEQ ID NO: 3042 - RNA, 5419 nt, synthetic construct
  source 1..5419: mol_type = other RNA
aggaaataagagagaaaagaagagtaagaagaaatataagagccaccatggcccctaagaagaagcgtaaagtgagccgggtgaacggcagcggcagcggcggcggcatgaaccacgaccaggagttcgacccccctaaggtgtaccctcccgtccccgccgagaagagaaagcccatccgggtcctgagcctgttcgatggcatcgccaccggtctgctggtgctgaaggacctgggcatccaggtggataggtacattgcctccgaggtgtgcgaggactccatcaccgtgggaatggtgcgtcatcagggcaagatcatgtacgtgggcgacgtgcggagcgtgacacagaagcatatccaggagtggggccctttcgacctggtgatcggcggcagcccttgcaatgacctgagcatcgtgaacccagcccggaagggcctgtacgagggaaccggcagactgttcttcgagttttacagactgctgcacgacgcccggcctaaggaaggcgacgaccggcccttcttttggctgttcgagaatgtggtggccatgggagtcagcgacaagcgggatattagccggttcctggagagcaaccccgtgatgatcgatgccaaggaagtgagcgccgcccaccgggccagatacttctggggcaatctgcctggcatgaacagacccctggccagcaccgtgaacgacaagctggagctgcaggagtgcctggagcacggccggatcgccaagttcagcaaggtgagaaccatcaccacccgaagcaacagcatcaaacaaggcaaggaccagcactttcctgtgttcatgaacgagaaggaggacatcctgtggtgtaccgagatggagagagtgttcgggttcccagtccactacacagatgtcagcaacatgtctagactggccagacagagactgctgggaagaagctggtccgtccctgtgatcagacacctgttcgcccctctgaaggagtacttcgcctgcgtgagcagcggcaacagcaacgccaacagccggggccccagcttctctagcggcctggtgccactgtccctgagagggagccacatgggccccatggagatctacaaaaccgtgagcgcctggaagcggcagcctgtgcgcgtgctgagcctgtttcggaatatcgataaagtcctgaaaagcctgggattcctggagagcggctctggctccggcggtggcaccctgaagtacgtggaggatgtgacaaacgtggtcagacgggatgtggagaagtggggccccttcgatctggtgtacggcagcacccaacccctgggcagctcttgtgaccggtgccctggctggtacatgtttcagttccaccggatcctgcagtacgccctgccgagacaggagtcccagcggccattcttttggattttcatggacaacttgctgctgaccgaggatgaccaggaaactaccactcggttcctgcagaccgaagccgtgaccctgcaggacgtgagaggccgggactaccagaacgccatgcgggtgtggtccaacatccctggactgaaaagcaagcacgcacctctgacccctaaagaagaggagtacctgcaggcccaggtgcggagcagaagcaagctggacgcccctaaggtggatctgctggtgaagaattgcctcctgcccctgagagagtacttcaagtatttcagccagaatagtctgcccctgggcggcccaagcagcggcgcccctcctcccagcggcggcagcccagccggctccccaacctctaccgaggagggcacctctgagtccgccacccccgagagcggccctggcacctccaccgagcccagcgagggcagcgcacccggcagccctgccggcagccccacctccacagaggagggaaccagcaccgagcccagcgaaggcagcgccccaggcaccagcaccgagcctagtgagggcggctctggcggcggcagcgcccaggagattaaacggatcaacaagatcagaagaagacttgtgaaagacagcaacaccaagaaggccggcaagacaggccccatgaaaaccctgctggttagagtgatgacacccgatctgagagagcggctggaaaacctgagaaagaagcctgaaaatatcccccagcccatcagcaatacatctagagccaacctgaataagctgctgaccgattacaccgaaatgaagaaggcgatcctgcatgtgtactgggaagagttccagaaggaccctgtgggcctgatgagccgggtggcccagcctgccagcaagaagatcgatcagaacaagctgaaacctgagatggacgagaagggcaacctgaccaccgccggctttgcctgctctcagtgtggccagcccctgttcgtgtacaagctggagcaggtgtctgagaagggcaaggcttacaccaactacttcggacggtgcaatgtggccgagcacgaaaagctgatcctgctggcccagctgaagcccgagaaggatagcgacgaagccgtgacatatagcctgggaaagtttgggcagagggccctggatttctacagcattcatgtgaccaaggagtccacccaccccgtgaagcccctggcccagatcgccggaaacagatacgcctccggacctgtgggaaaggccctgagcgacgcatgtatgggcacaatcgcctccttcctgtctaagtaccaggacatcatcatcgaacaccagaaggtggtgaagggcaaccagaagagactggagagcctgcgggagctggccggcaaggaaaacctggaataccctagcgtgaccctgccacctcagcctcacaccaaggagggcgttgatgcctacaacgaagtgatcgcccgggtgcgaatgtgggtgaacctgaacctgtggcagaagctgaagctaagcagagatgatgccaagcctctgctgagactgaagggattcccttcctttcctctggtcgagagacaggccaacgaagtggactggtgggacatggtgtgtaacgtgaagaagctgatcaacgagaaaaaggaggatggcaaggtgttttggcagaatctggctggctacaagagacaggaagccctgagaccatacctgagcagcgaggaagatcggaagaagggaaagaaattcgctcggtaccagctgggcgacctgctgctgcacctggaaaagaagcacggcgaggactggggaaaggtgtacgacgaggcctgggagcggattgacaagaaagtggaaggcctgagcaagcacatcaagctggaagaggaacggagaagcgaggacgcccagagcaaggccgccctgaccgactggctgcgggctaaggccagcttcgtgatcgagggcctgaaggaggccgacaaggacgagttctgcagatgcgagctgaagctgcagaagtggtacggggacctgcggggaaagcccttcgccatcgaagccgagaacagcatcctggacatcagcggcttcagcaagcagtacaactgtgccttcatctggcagaaggacggcgtgaagaagctgaacctgtacctgatcatcaactacttcaagggcggcaagctgcggttcaagaagatcaaacctgaagccttcgaagccaacagattctacaccgtgatcaacaaaaagagcggcgagatcgtgcccatggaggtgaacttcaacttcgacgaccccaacctgatcatcctgcctctggcctttggcaagagacagggcagagaattcatctggaacgacctgctgtccctggaaaccggcagcctgaagctggccaacggaagagtgatcgagaagacactgtacaacagaagaacccggcaggatgagcctgccctgttcgtggccctgaccttcgagcggcgggaggtcctggactcctccaatatcaaaccaatgaacctgatcggcgtggcaagaggcgaaaacatccccgccgtgatcgccctgaccgaccccgagggctgcccactgagccggtttaaggatagcctgggaaacccaacccacatcctgagaatcggcgagagctataaggagaagcagcggaccatccaggccaagaaggaggtggagcagcggagagccggcggctacagccggaagtacgccagcaaagccaagaatctggcagacgatatggtgagaaacaccgctagagatctgctgtactacgccgtgacccaggatgccatgctgatcttcgccaacctgagccggggcttcggccggcagggcaagcggaccttcatggccgagagacagtacacacggatggaggactggctgaccgccaagctggcctacgagggcctgagcaagacctacctgtccaagacactggcccagtacacctccaagacatgcagcaactgtgggtttaccatcaccagcgccgactacgacagggtgctggagaagctgaagaagacagcaacaggctggatgaccacaattaacggcaaggagctgaaggtggagggccagattacctactacaacagatacaagagacagaacgtagtcaaggacctgtccgtcgagctggatagactgagcgaagaatctgtgaacaacgacatctcctcctggacaaagggcagaagcggagaagctctgagcctcctgaagaaaagattctcccatagacccgtgcaggagaagttcgtgtgcctgaactgcggcttcgagacacacgcagccgagcaagccgccctgaacatcgccagatcctggctgttcctgcggagccaggagtacaagaaataccagacaaacaagacaaccggcaacaccgataagagagccttcgtcgagacctggcagtccttttaccggaagaagcttaaggaggtgtggaaacctgccgtgcggtctggcggatctggcggaggctccacaagcttccagggcctggtgaccttcgaggaggtggccgtgtacttcaccagggaggagggcgccctgctggaccccacccagagggccctgtacagggacgtgatgcaggagaactacgagaccgtggtgctgctgggcaaggagagcttcagcaagcccgacgtgatcagccagctggagaggggcgaggagccctgggtgcccgacctgcagggcagcgagaaggagaggcccgaggagaacttcaccagccccaagaaaaagagaaaagtctaagctgccttctgcggggcttgccttctggccatgcccttcttctctcccttgcacctgtacctcttggtctttgaataaagcctgagtaggaaggctagcaaaaaaaaaaaaaaaaaaaaaaaaaaaaaaaaaaaaaaaaaaaaaaaaaaaaaaaaaaaaaaaaaaaaaaaaaaaaaaaa

SEQ ID NO: 3043 - RNA, 5419 nt, synthetic construct
  source 1..5419: mol_type = other RNA
aggaaataagagagaaaagaagagtaagaagaaatataagagccaccatggcccctaagaagaagcgtaaagtgagccgggtgaacggcagcggcagcggcggcggcatgaaccacgaccaggagttcgacccccctaaggtgtaccctcccgtccccgccgagaagagaaagcccatccgggtcctgagcctgttcgatggcatcgccaccggtctgctggtgctgaaggacctgggcatccaggtggataggtacattgcctccgaggtgtgcgaggactccatcaccgtgggaatggtgcgtcatcagggcaagatcatgtacgtgggcgacgtgcggagcgtgacacagaagcatatccaggagtggggccctttcgacctggtgatcggcggcagcccttgcaatgacctgagcatcgtgaacccagcccggaagggcctgtacgagggaaccggcagactgttcttcgagttttacagactgctgcacgacgcccggcctaaggaaggcgacgaccggcccttcttttggctgttcgagaatgtggtggccatgggagtcagcgacaagcgggatattagccggttcctggagagcaaccccgtgatgatcgatgccaaggaagtgagcgccgcccaccgggccagatacttctggggcaatctgcctggcatgaacagacccctggccagcaccgtgaacgacaagctggagctgcaggagtgcctggagcacggccggatcgccaagttcagcaaggtgagaaccatcaccacccgaagcaacagcatcaaacaaggcaaggaccagcactttcctgtgttcatgaacgagaaggaggacatcctgtggtgtaccgagatggagagagtgttcgggttcccagtccactacacagatgtcagcaacatgtctagactggccagacagagactgctgggaagaagctggtccgtccctgtgatcagacacctgttcgcccctctgaaggagtacttcgcctgcgtgagcagcggcaacagcaacgccaacagccggggccccagcttctctagcggcctggtgccactgtccctgagagggagccacatgggccccatggagatctacaaaaccgtgagcgcctggaagcggcagcctgtgcgcgtgctgagcctgtttcggaatatcgataaagtcctgaaaagcctgggattcctggagagcggctctggctccggcggtggcaccctgaagtacgtggaggatgtgacaaacgtggtcagacgggatgtggagaagtggggccccttcgatctggtgtacggcagcacccaacccctgggcagctcttgtgaccggtgccctggctggtacatgtttcagttccaccggatcctgcagtacgccctgccgagacaggagtcccagcggccattcttttggattttcatggacaacttgctgctgaccgaggatgaccaggaaactaccactcggttcctgcagaccgaagccgtgaccctgcaggacgtgagaggccgggactaccagaacgccatgcgggtgtggtccaacatccctggactgaaaagcaagcacgcacctctgacccctaaagaagaggagtacctgcaggcccaggtgcggagcagaagcaagctggacgcccctaaggtggatctgctggtgaagaattgcctcctgcccctgagagagtacttcaagtatttcagccagaatagtctgcccctgggcggcccaagcagcggcgcccctcctcccagcggcggcagcccagccggctccccaacctctaccgaggagggcacctctgagtccgccacccccgagagcggccctggcacctccaccgagcccagcgagggcagcgcacccggcagccctgccggcagccccacctccacagaggagggaaccagcaccgagcccagcgaaggcagcgccccaggcaccagcaccgagcctagtgagggcggctctggcggcggcagcgcccaggagattaaacggatcaacaagatcagaagaagacttgtgaaagacagcaacaccaagaaggccggcaagacaggccccatgaaaaccctgctggttagagtgatgacacccgatctgagagagcggctggaaaacctgagaaagaagcctgaaaatatcccccagcccatcagcaatacatctagagccaacctgaataagctgctgaccgattacaccgaaatgaagaaggcgatcctgcatgtgtactgggaagagttccagaaggaccctgtgggcctgatgagccgggtggcccagcctgccagcaagaagatcgatcagaacaagctgaaacctgagatggacgagaagggcaacctgaccaccgccggctttgcctgctctcagtgtggccagcccctgttcgtgtacaagctggagcaggtgtctgagaagggcaaggcttacaccaactacttcggacggtgcaatgtggccgagcacgaaaagctgatcctgctggcccagctgaagcccgagaaggatagcgacgaagccgtgacatatagcctgggaaagtttgggcagagggccctggatttctacagcattcatgtgaccaaggagtccacccaccccgtgaagcccctggcccagatcgccggaaacagatacgcctccggacctgtgggaaaggccctgagcgacgcatgtatgggcacaatcgcctccttcctgtctaagtaccaggacatcatcatcgaacaccagaaggtggtgaagggcaaccagaagagactggagagcctgcgggagctggccggcaaggaaaacctggaataccctagcgtgaccctgccacctcagcctcacaccaaggagggcgttgatgcctacaacgaagtgatcgcccgggtgcgaatgtgggtgaacctgaacctgtggcagaagctgaagctaagcagagatgatgccaagcctctgctgagactgaagggattcccttcctttcctctggtcgagagacaggccaacgaagtggactggtgggacatggtgtgtaacgtgaagaagctgatcaacgagaaaaaggaggatggcaaggtgttttggcagaatctggctggctacaagagacaggaagccctgagaccatacctgagcagcgaggaagatcggaagaagggaaagaaattcgctcggtaccagctgggcgacctgctgctgcacctggaaaagaagcacggcgaggactggggaaaggtgtacgacgaggcctgggagcggattgacaagaaagtggaaggcctgagcaagcacatcaagctggaagaggaacggagaagcgaggacgcccagagcaaggccgccctgaccgactggctgcgggctaaggccagcttcgtgatcgagggcctgaaggaggccgacaaggacgagttctgcagatgcgagctgaagctgcagaagtggtacggggacctgcggggaaagcccttcgccatcgaagccgagaacagcatcctggacatcagcggcttcagcaagcagtacaactgtgccttcatctggcagaaggacggcgtgaagaagctgaacctgtacctgatcatcaactacttcaagggcggcaagctgcggttcaagaagatcaaacctgaagccttcgaagccaacagattctacaccgtgatcaacaaaaagagcggcgagatcgtgcccatggaggtgaacttcaacttcgacgaccccaacctgatcatcctgcctctggcctttggcaagagacagggcagagaattcatctggaacgacctgctgtccctggaaaccggcagcctgaagctggccaacggaagagtgatcgagaagacactgtacaacagaagaacccggcaggatgagcctgccctgttcgtggccctgaccttcgagcggcgggaggtcctggactcctccaatatcaaaccaatgaacctgatcggcgtggcaagaggcgaaaacatccccgccgtgatcgccctgaccgaccccgagggctgcccactgagccggtttaaggatagcctgggaaacccaacccacatcctgagaatcggcgagagctataaggagaagcagcggaccatccaggccaagaaggaggtggagcagcggagagccggcggctacagccggaagtacgccagcaaagccaagaatctggcagacgatatggtgagaaacaccgctagagatctgctgtactacgccgtgacccaggatgccatgctgatcttcgccaacctgagccggggcttcggccggcagggcaagcggaccttcatggccgagagacagtacacacggatggaggactggctgaccgccaagctggcctacgagggcctgagcaagacctacctgtccaagacactggcccagtacacctccaagacatgcagcaactgtgggtttaccatcaccagcgccgactacgacagggtgctggagaagctgaagaagacagcaacaggctggatgaccacaattaacggcaaggagctgaaggtggagggccagattacctactacaacagatacaagagacagaacgtagtcaaggacctgtccgtcgagctggatagactgagcgaagaatctgtgaacaacgacatctcctcctggacaaagggcagaagcggagaagctctgagcctcctgaagaaaagattctcccatagacccgtgcaggagaagttcgtgtgcctgaactgcggcttcgagacacacgcagccgagcaagccgccctgaacatcgccagatcctggctgttcctgcggagccaggagtacaagaaataccagacaaacaagacaaccggcaacaccgataagagagccttcgtcgagacctggcagtccttttaccggaagaagcttaaggaggtgtggaaacctgccgtgcggtctggcggatctggcggaggctccacaagccaggccgaggtgaccttcgaggacgtggccgtgctgctgagcagggaggagtggggcaggctgggccccgtgcagaagggcctgtacagggacgtgatgctggagacctacaggaacctggtgagcctgggcggcggccccgccggccccaagcccgaggtgatcacccagctggagaggggcgacgagccctgggtgcccgacgtgcagggcagggagaggctgaccatcgacggcagcgccaccagccccaagaaaaagagaaaagtctaagctgccttctgcggggcttgccttctggccatgcccttcttctctcccttgcacctgtacctcttggtctttgaataaagcctgagtaggaaggctagcaaaaaaaaaaaaaaaaaaaaaaaaaaaaaaaaaaaaaaaaaaaaaaaaaaaaaaaaaaaaaaaaaaaaaaaaaaaaaaaa

SEQ ID NO: 3044 - RNA, 5419 nt, synthetic construct
  source 1..5419: mol_type = other RNA
aggaaataagagagaaaagaagagtaagaagaaatataagagccaccatggcccctaagaagaagcgtaaagtgagccgggtgaacggcagcggcagcggcggcggcatgaaccacgaccaggagttcgacccccctaaggtgtaccctcccgtccccgccgagaagagaaagcccatccgggtcctgagcctgttcgatggcatcgccaccggtctgctggtgctgaaggacctgggcatccaggtggataggtacattgcctccgaggtgtgcgaggactccatcaccgtgggaatggtgcgtcatcagggcaagatcatgtacgtgggcgacgtgcggagcgtgacacagaagcatatccaggagtggggccctttcgacctggtgatcggcggcagcccttgcaatgacctgagcatcgtgaacccagcccggaagggcctgtacgagggaaccggcagactgttcttcgagttttacagactgctgcacgacgcccggcctaaggaaggcgacgaccggcccttcttttggctgttcgagaatgtggtggccatgggagtcagcgacaagcgggatattagccggttcctggagagcaaccccgtgatgatcgatgccaaggaagtgagcgccgcccaccgggccagatacttctggggcaatctgcctggcatgaacagacccctggccagcaccgtgaacgacaagctggagctgcaggagtgcctggagcacggccggatcgccaagttcagcaaggtgagaaccatcaccacccgaagcaacagcatcaaacaaggcaaggaccagcactttcctgtgttcatgaacgagaaggaggacatcctgtggtgtaccgagatggagagagtgttcgggttcccagtccactacacagatgtcagcaacatgtctagactggccagacagagactgctgggaagaagctggtccgtccctgtgatcagacacctgttcgcccctctgaaggagtacttcgcctgcgtgagcagcggcaacagcaacgccaacagccggggccccagcttctctagcggcctggtgccactgtccctgagagggagccacatgggccccatggagatctacaaaaccgtgagcgcctggaagcggcagcctgtgcgcgtgctgagcctgtttcggaatatcgataaagtcctgaaaagcctgggattcctggagagcggctctggctccggcggtggcaccctgaagtacgtggaggatgtgacaaacgtggtcagacgggatgtggagaagtggggccccttcgatctggtgtacggcagcacccaacccctgggcagctcttgtgaccggtgccctggctggtacatgtttcagttccaccggatcctgcagtacgccctgccgagacaggagtcccagcggccattcttttggattttcatggacaacttgctgctgaccgaggatgaccaggaaactaccactcggttcctgcagaccgaagccgtgaccctgcaggacgtgagaggccgggactaccagaacgccatgcgggtgtggtccaacatccctggactgaaaagcaagcacgcacctctgacccctaaagaagaggagtacctgcaggcccaggtgcggagcagaagcaagctggacgcccctaaggtggatctgctggtgaagaattgcctcctgcccctgagagagtacttcaagtatttcagccagaatagtctgcccctgggcggcccaagcagcggcgcccctcctcccagcggcggcagcccagccggctccccaacctctaccgaggagggcacctctgagtccgccacccccgagagcggccctggcacctccaccgagcccagcgagggcagcgcacccggcagccctgccggcagccccacctccacagaggagggaaccagcaccgagcccagcgaaggcagcgccccaggcaccagcaccgagcctagtgagggcggctctggcggcggcagcgcccaggagattaaacggatcaacaagatcagaagaagacttgtgaaagacagcaacaccaagaaggccggcaagacaggccccatgaaaaccctgctggttagagtgatgacacccgatctgagagagcggctggaaaacctgagaaagaagcctgaaaatatcccccagcccatcagcaatacatctagagccaacctgaataagctgctgaccgattacaccgaaatgaagaaggcgatcctgcatgtgtactgggaagagttccagaaggaccctgtgggcctgatgagccgggtggcccagcctgccagcaagaagatcgatcagaacaagctgaaacctgagatggacgagaagggcaacctgaccaccgccggctttgcctgctctcagtgtggccagcccctgttcgtgtacaagctggagcaggtgtctgagaagggcaaggcttacaccaactacttcggacggtgcaatgtggccgagcacgaaaagctgatcctgctggcccagctgaagcccgagaaggatagcgacgaagccgtgacatatagcctgggaaagtttgggcagagggccctggatttctacagcattcatgtgaccaaggagtccacccaccccgtgaagcccctggcccagatcgccggaaacagatacgcctccggacctgtgggaaaggccctgagcgacgcatgtatgggcacaatcgcctccttcctgtctaagtaccaggacatcatcatcgaacaccagaaggtggtgaagggcaaccagaagagactggagagcctgcgggagctggccggcaaggaaaacctggaataccctagcgtgaccctgccacctcagcctcacaccaaggagggcgttgatgcctacaacgaagtgatcgcccgggtgcgaatgtgggtgaacctgaacctgtggcagaagctgaagctaagcagagatgatgccaagcctctgctgagactgaagggattcccttcctttcctctggtcgagagacaggccaacgaagtggactggtgggacatggtgtgtaacgtgaagaagctgatcaacgagaaaaaggaggatggcaaggtgttttggcagaatctggctggctacaagagacaggaagccctgagaccatacctgagcagcgaggaagatcggaagaagggaaagaaattcgctcggtaccagctgggcgacctgctgctgcacctggaaaagaagcacggcgaggactggggaaaggtgtacgacgaggcctgggagcggattgacaagaaagtggaaggcctgagcaagcacatcaagctggaagaggaacggagaagcgaggacgcccagagcaaggccgccctgaccgactggctgcgggctaaggccagcttcgtgatcgagggcctgaaggaggccgacaaggacgagttctgcagatgcgagctgaagctgcagaagtggtacggggacctgcggggaaagcccttcgccatcgaagccgagaacagcatcctggacatcagcggcttcagcaagcagtacaactgtgccttcatctggcagaaggacggcgtgaagaagctgaacctgtacctgatcatcaactacttcaagggcggcaagctgcggttcaagaagatcaaacctgaagccttcgaagccaacagattctacaccgtgatcaacaaaaagagcggcgagatcgtgcccatggaggtgaacttcaacttcgacgaccccaacctgatcatcctgcctctggcctttggcaagagacagggcagagaattcatctggaacgacctgctgtccctggaaaccggcagcctgaagctggccaacggaagagtgatcgagaagacactgtacaacagaagaacccggcaggatgagcctgccctgttcgtggccctgaccttcgagcggcgggaggtcctggactcctccaatatcaaaccaatgaacctgatcggcgtggcaagaggcgaaaacatccccgccgtgatcgccctgaccgaccccgagggctgcccactgagccggtttaaggatagcctgggaaacccaacccacatcctgagaatcggcgagagctataaggagaagcagcggaccatccaggccaagaaggaggtggagcagcggagagccggcggctacagccggaagtacgccagcaaagccaagaatctggcagacgatatggtgagaaacaccgctagagatctgctgtactacgccgtgacccaggatgccatgctgatcttcgccaacctgagccggggcttcggccggcagggcaagcggaccttcatggccgagagacagtacacacggatggaggactggctgaccgccaagctggcctacgagggcctgagcaagacctacctgtccaagacactggcccagtacacctccaagacatgcagcaactgtgggtttaccatcaccagcgccgactacgacagggtgctggagaagctgaagaagacagcaacaggctggatgaccacaattaacggcaaggagctgaaggtggagggccagattacctactacaacagatacaagagacagaacgtagtcaaggacctgtccgtcgagctggatagactgagcgaagaatctgtgaacaacgacatctcctcctggacaaagggcagaagcggagaagctctgagcctcctgaagaaaagattctcccatagacccgtgcaggagaagttcgtgtgcctgaactgcggcttcgagacacacgcagccgagcaagccgccctgaacatcgccagatcctggctgttcctgcggagccaggagtacaagaaataccagacaaacaagacaaccggcaacaccgataagagagccttcgtcgagacctggcagtccttttaccggaagaagcttaaggaggtgtggaaacctgccgtgcggtctggcggatctggcggaggctccacaagcaaggagctgcccagcgtgttcgaggacgtggccgtgtacttcaccagggaggagtggggcatgctggacaagaggcagaaggagctgtacagggacgtgatgaggatgaactacgagctgctggccagcctgggccccgccgccgccaagcccgacctgatcagcaagctggagaggagggccgccccctggatcaaggaccccaacggccccaagtggggcgagggccacccccccggcaagaccagccccaagaaaaagagaaaagtctaagctgccttctgcggggcttgccttctggccatgcccttcttctctcccttgcacctgtacctcttggtctttgaataaagcctgagtaggaaggctagcaaaaaaaaaaaaaaaaaaaaaaaaaaaaaaaaaaaaaaaaaaaaaaaaaaaaaaaaaaaaaaaaaaaaaaaaaaaaaaaa

SEQ ID NO: 3045 - RNA, 5419 nt, synthetic construct
  source 1..5419: mol_type = other RNA
aggaaataagagagaaaagaagagtaagaagaaatataagagccaccatggcccctaagaagaagcgtaaagtgagccgggtgaacggcagcggcagcggcggcggcatgaaccacgaccaggagttcgacccccctaaggtgtaccctcccgtccccgccgagaagagaaagcccatccgggtcctgagcctgttcgatggcatcgccaccggtctgctggtgctgaaggacctgggcatccaggtggataggtacattgcctccgaggtgtgcgaggactccatcaccgtgggaatggtgcgtcatcagggcaagatcatgtacgtgggcgacgtgcggagcgtgacacagaagcatatccaggagtggggccctttcgacctggtgatcggcggcagcccttgcaatgacctgagcatcgtgaacccagcccggaagggcctgtacgagggaaccggcagactgttcttcgagttttacagactgctgcacgacgcccggcctaaggaaggcgacgaccggcccttcttttggctgttcgagaatgtggtggccatgggagtcagcgacaagcgggatattagccggttcctggagagcaaccccgtgatgatcgatgccaaggaagtgagcgccgcccaccgggccagatacttctggggcaatctgcctggcatgaacagacccctggccagcaccgtgaacgacaagctggagctgcaggagtgcctggagcacggccggatcgccaagttcagcaaggtgagaaccatcaccacccgaagcaacagcatcaaacaaggcaaggaccagcactttcctgtgttcatgaacgagaaggaggacatcctgtggtgtaccgagatggagagagtgttcgggttcccagtccactacacagatgtcagcaacatgtctagactggccagacagagactgctgggaagaagctggtccgtccctgtgatcagacacctgttcgcccctctgaaggagtacttcgcctgcgtgagcagcggcaacagcaacgccaacagccggggccccagcttctctagcggcctggtgccactgtccctgagagggagccacatgggccccatggagatctacaaaaccgtgagcgcctggaagcggcagcctgtgcgcgtgctgagcctgtttcggaatatcgataaagtcctgaaaagcctgggattcctggagagcggctctggctccggcggtggcaccctgaagtacgtggaggatgtgacaaacgtggtcagacgggatgtggagaagtggggccccttcgatctggtgtacggcagcacccaacccctgggcagctcttgtgaccggtgccctggctggtacatgtttcagttccaccggatcctgcagtacgccctgccgagacaggagtcccagcggccattcttttggattttcatggacaacttgctgctgaccgaggatgaccaggaaactaccactcggttcctgcagaccgaagccgtgaccctgcaggacgtgagaggccgggactaccagaacgccatgcgggtgtggtccaacatccctggactgaaaagcaagcacgcacctctgacccctaaagaagaggagtacctgcaggcccaggtgcggagcagaagcaagctggacgcccctaaggtggatctgctggtgaagaattgcctcctgcccctgagagagtacttcaagtatttcagccagaatagtctgcccctgggcggcccaagcagcggcgcccctcctcccagcggcggcagcccagccggctccccaacctctaccgaggagggcacctctgagtccgccacccccgagagcggccctggcacctccaccgagcccagcgagggcagcgcacccggcagccctgccggcagccccacctccacagaggagggaaccagcaccgagcccagcgaaggcagcgccccaggcaccagcaccgagcctagtgagggcggctctggcggcggcagcgcccaggagattaaacggatcaacaagatcagaagaagacttgtgaaagacagcaacaccaagaaggccggcaagacaggccccatgaaaaccctgctggttagagtgatgacacccgatctgagagagcggctggaaaacctgagaaagaagcctgaaaatatcccccagcccatcagcaatacatctagagccaacctgaataagctgctgaccgattacaccgaaatgaagaaggcgatcctgcatgtgtactgggaagagttccagaaggaccctgtgggcctgatgagccgggtggcccagcctgccagcaagaagatcgatcagaacaagctgaaacctgagatggacgagaagggcaacctgaccaccgccggctttgcctgctctcagtgtggccagcccctgttcgtgtacaagctggagcaggtgtctgagaagggcaaggcttacaccaactacttcggacggtgcaatgtggccgagcacgaaaagctgatcctgctggcccagctgaagcccgagaaggatagcgacgaagccgtgacatatagcctgggaaagtttgggcagagggccctggatttctacagcattcatgtgaccaaggagtccacccaccccgtgaagcccctggcccagatcgccggaaacagatacgcctccggacctgtgggaaaggccctgagcgacgcatgtatgggcacaatcgcctccttcctgtctaagtaccaggacatcatcatcgaacaccagaaggtggtgaagggcaaccagaagagactggagagcctgcgggagctggccggcaaggaaaacctggaataccctagcgtgaccctgccacctcagcctcacaccaaggagggcgttgatgcctacaacgaagtgatcgcccgggtgcgaatgtgggtgaacctgaacctgtggcagaagctgaagctaagcagagatgatgccaagcctctgctgagactgaagggattcccttcctttcctctggtcgagagacaggccaacgaagtggactggtgggacatggtgtgtaacgtgaagaagctgatcaacgagaaaaaggaggatggcaaggtgttttggcagaatctggctggctacaagagacaggaagccctgagaccatacctgagcagcgaggaagatcggaagaagggaaagaaattcgctcggtaccagctgggcgacctgctgctgcacctggaaaagaagcacggcgaggactggggaaaggtgtacgacgaggcctgggagcggattgacaagaaagtggaaggcctgagcaagcacatcaagctggaagaggaacggagaagcgaggacgcccagagcaaggccgccctgaccgactggctgcgggctaaggccagcttcgtgatcgagggcctgaaggaggccgacaaggacgagttctgcagatgcgagctgaagctgcagaagtggtacggggacctgcggggaaagcccttcgccatcgaagccgagaacagcatcctggacatcagcggcttcagcaagcagtacaactgtgccttcatctggcagaaggacggcgtgaagaagctgaacctgtacctgatcatcaactacttcaagggcggcaagctgcggttcaagaagatcaaacctgaagccttcgaagccaacagattctacaccgtgatcaacaaaaagagcggcgagatcgtgcccatggaggtgaacttcaacttcgacgaccccaacctgatcatcctgcctctggcctttggcaagagacagggcagagaattcatctggaacgacctgctgtccctggaaaccggcagcctgaagctggccaacggaagagtgatcgagaagacactgtacaacagaagaacccggcaggatgagcctgccctgttcgtggccctgaccttcgagcggcgggaggtcctggactcctccaatatcaaaccaatgaacctgatcggcgtggcaagaggcgaaaacatccccgccgtgatcgccctgaccgaccccgagggctgcccactgagccggtttaaggatagcctgggaaacccaacccacatcctgagaatcggcgagagctataaggagaagcagcggaccatccaggccaagaaggaggtggagcagcggagagccggcggctacagccggaagtacgccagcaaagccaagaatctggcagacgatatggtgagaaacaccgctagagatctgctgtactacgccgtgacccaggatgccatgctgatcttcgccaacctgagccggggcttcggccggcagggcaagcggaccttcatggccgagagacagtacacacggatggaggactggctgaccgccaagctggcctacgagggcctgagcaagacctacctgtccaagacactggcccagtacacctccaagacatgcagcaactgtgggtttaccatcaccagcgccgactacgacagggtgctggagaagctgaagaagacagcaacaggctggatgaccacaattaacggcaaggagctgaaggtggagggccagattacctactacaacagatacaagagacagaacgtagtcaaggacctgtccgtcgagctggatagactgagcgaagaatctgtgaacaacgacatctcctcctggacaaagggcagaagcggagaagctctgagcctcctgaagaaaagattctcccatagacccgtgcaggagaagttcgtgtgcctgaactgcggcttcgagacacacgcagccgagcaagccgccctgaacatcgccagatcctggctgttcctgcggagccaggagtacaagaaataccagacaaacaagacaaccggcaacaccgataagagagccttcgtcgagacctggcagtccttttaccggaagaagcttaaggaggtgtggaaacctgccgtgcggtctggcggatctggcggaggctccacaagcggcaaggagctgctgagcttcgaggacgtggccatgtacttcaccagggaggagtggggcaggctggactggggccagaaggacctgtacagggacgtgatgctggagaactacaggaacatggtgctgctgggcttccagttccccaagcccgaggtgatctgccagctggagaactgggacgagcagtggatcctggacctgcccagggccggcagcaggaaggccagcggcagcgcctgcaccagccccaagaaaaagagaaaagtctaagctgccttctgcggggcttgccttctggccatgcccttcttctctcccttgcacctgtacctcttggtctttgaataaagcctgagtaggaaggctagcaaaaaaaaaaaaaaaaaaaaaaaaaaaaaaaaaaaaaaaaaaaaaaaaaaaaaaaaaaaaaaaaaaaaaaaaaaaaaaaa

SEQ ID NO: 3046 - RNA, 5419 nt, synthetic construct
  source 1..5419: mol_type = other RNA
aggaaataagagagaaaagaagagtaagaagaaatataagagccaccatggcccctaagaagaagcgtaaagtgagccgggtgaacggcagcggcagcggcggcggcatgaaccacgaccaggagttcgacccccctaaggtgtaccctcccgtccccgccgagaagagaaagcccatccgggtcctgagcctgttcgatggcatcgccaccggtctgctggtgctgaaggacctgggcatccaggtggataggtacattgcctccgaggtgtgcgaggactccatcaccgtgggaatggtgcgtcatcagggcaagatcatgtacgtgggcgacgtgcggagcgtgacacagaagcatatccaggagtggggccctttcgacctggtgatcggcggcagcccttgcaatgacctgagcatcgtgaacccagcccggaagggcctgtacgagggaaccggcagactgttcttcgagttttacagactgctgcacgacgcccggcctaaggaaggcgacgaccggcccttcttttggctgttcgagaatgtggtggccatgggagtcagcgacaagcgggatattagccggttcctggagagcaaccccgtgatgatcgatgccaaggaagtgagcgccgcccaccgggccagatacttctggggcaatctgcctggcatgaacagacccctggccagcaccgtgaacgacaagctggagctgcaggagtgcctggagcacggccggatcgccaagttcagcaaggtgagaaccatcaccacccgaagcaacagcatcaaacaaggcaaggaccagcactttcctgtgttcatgaacgagaaggaggacatcctgtggtgtaccgagatggagagagtgttcgggttcccagtccactacacagatgtcagcaacatgtctagactggccagacagagactgctgggaagaagctggtccgtccctgtgatcagacacctgttcgcccctctgaaggagtacttcgcctgcgtgagcagcggcaacagcaacgccaacagccggggccccagcttctctagcggcctggtgccactgtccctgagagggagccacatgggccccatggagatctacaaaaccgtgagcgcctggaagcggcagcctgtgcgcgtgctgagcctgtttcggaatatcgataaagtcctgaaaagcctgggattcctggagagcggctctggctccggcggtggcaccctgaagtacgtggaggatgtgacaaacgtggtcagacgggatgtggagaagtggggccccttcgatctggtgtacggcagcacccaacccctgggcagctcttgtgaccggtgccctggctggtacatgtttcagttccaccggatcctgcagtacgccctgccgagacaggagtcccagcggccattcttttggattttcatggacaacttgctgctgaccgaggatgaccaggaaactaccactcggttcctgcagaccgaagccgtgaccctgcaggacgtgagaggccgggactaccagaacgccatgcgggtgtggtccaacatccctggactgaaaagcaagcacgcacctctgacccctaaagaagaggagtacctgcaggcccaggtgcggagcagaagcaagctggacgcccctaaggtggatctgctggtgaagaattgcctcctgcccctgagagagtacttcaagtatttcagccagaatagtctgcccctgggcggcccaagcagcggcgcccctcctcccagcggcggcagcccagccggctccccaacctctaccgaggagggcacctctgagtccgccacccccgagagcggccctggcacctccaccgagcccagcgagggcagcgcacccggcagccctgccggcagccccacctccacagaggagggaaccagcaccgagcccagcgaaggcagcgccccaggcaccagcaccgagcctagtgagggcggctctggcggcggcagcgcccaggagattaaacggatcaacaagatcagaagaagacttgtgaaagacagcaacaccaagaaggccggcaagacaggccccatgaaaaccctgctggttagagtgatgacacccgatctgagagagcggctggaaaacctgagaaagaagcctgaaaatatcccccagcccatcagcaatacatctagagccaacctgaataagctgctgaccgattacaccgaaatgaagaaggcgatcctgcatgtgtactgggaagagttccagaaggaccctgtgggcctgatgagccgggtggcccagcctgccagcaagaagatcgatcagaacaagctgaaacctgagatggacgagaagggcaacctgaccaccgccggctttgcctgctctcagtgtggccagcccctgttcgtgtacaagctggagcaggtgtctgagaagggcaaggcttacaccaactacttcggacggtgcaatgtggccgagcacgaaaagctgatcctgctggcccagctgaagcccgagaaggatagcgacgaagccgtgacatatagcctgggaaagtttgggcagagggccctggatttctacagcattcatgtgaccaaggagtccacccaccccgtgaagcccctggcccagatcgccggaaacagatacgcctccggacctgtgggaaaggccctgagcgacgcatgtatgggcacaatcgcctccttcctgtctaagtaccaggacatcatcatcgaacaccagaaggtggtgaagggcaaccagaagagactggagagcctgcgggagctggccggcaaggaaaacctggaataccctagcgtgaccctgccacctcagcctcacaccaaggagggcgttgatgcctacaacgaagtgatcgcccgggtgcgaatgtgggtgaacctgaacctgtggcagaagctgaagctaagcagagatgatgccaagcctctgctgagactgaagggattcccttcctttcctctggtcgagagacaggccaacgaagtggactggtgggacatggtgtgtaacgtgaagaagctgatcaacgagaaaaaggaggatggcaaggtgttttggcagaatctggctggctacaagagacaggaagccctgagaccatacctgagcagcgaggaagatcggaagaagggaaagaaattcgctcggtaccagctgggcgacctgctgctgcacctggaaaagaagcacggcgaggactggggaaaggtgtacgacgaggcctgggagcggattgacaagaaagtggaaggcctgagcaagcacatcaagctggaagaggaacggagaagcgaggacgcccagagcaaggccgccctgaccgactggctgcgggctaaggccagcttcgtgatcgagggcctgaaggaggccgacaaggacgagttctgcagatgcgagctgaagctgcagaagtggtacggggacctgcggggaaagcccttcgccatcgaagccgagaacagcatcctggacatcagcggcttcagcaagcagtacaactgtgccttcatctggcagaaggacggcgtgaagaagctgaacctgtacctgatcatcaactacttcaagggcggcaagctgcggttcaagaagatcaaacctgaagccttcgaagccaacagattctacaccgtgatcaacaaaaagagcggcgagatcgtgcccatggaggtgaacttcaacttcgacgaccccaacctgatcatcctgcctctggcctttggcaagagacagggcagagaattcatctggaacgacctgctgtccctggaaaccggcagcctgaagctggccaacggaagagtgatcgagaagacactgtacaacagaagaacccggcaggatgagcctgccctgttcgtggccctgaccttcgagcggcgggaggtcctggactcctccaatatcaaaccaatgaacctgatcggcgtggcaagaggcgaaaacatccccgccgtgatcgccctgaccgaccccgagggctgcccactgagccggtttaaggatagcctgggaaacccaacccacatcctgagaatcggcgagagctataaggagaagcagcggaccatccaggccaagaaggaggtggagcagcggagagccggcggctacagccggaagtacgccagcaaagccaagaatctggcagacgatatggtgagaaacaccgctagagatctgctgtactacgccgtgacccaggatgccatgctgatcttcgccaacctgagccggggcttcggccggcagggcaagcggaccttcatggccgagagacagtacacacggatggaggactggctgaccgccaagctggcctacgagggcctgagcaagacctacctgtccaagacactggcccagtacacctccaagacatgcagcaactgtgggtttaccatcaccagcgccgactacgacagggtgctggagaagctgaagaagacagcaacaggctggatgaccacaattaacggcaaggagctgaaggtggagggccagattacctactacaacagatacaagagacagaacgtagtcaaggacctgtccgtcgagctggatagactgagcgaagaatctgtgaacaacgacatctcctcctggacaaagggcagaagcggagaagctctgagcctcctgaagaaaagattctcccatagacccgtgcaggagaagttcgtgtgcctgaactgcggcttcgagacacacgcagccgagcaagccgccctgaacatcgccagatcctggctgttcctgcggagccaggagtacaagaaataccagacaaacaagacaaccggcaacaccgataagagagccttcgtcgagacctggcagtccttttaccggaagaagcttaaggaggtgtggaaacctgccgtgcggtctggcggatctggcggaggctccacaagcgtgtggggccccctgagcttcatggacgtgttcgtggacttcacctgggaggagtggcagctgctggaccccgcccagaagtgcctgtacaggagcgtgatgctggagaactacagcaacctggtgagcctgggctaccagcacaccaagcccgacatcatcttcaagctggagcagggcgaggagctgtgcatggtgcaggcccccatccccaaccagtgctgccccaacaaggtgtggaagaccagccccaagaaaaagagaaaagtctaagctgccttctgcggggcttgccttctggccatgcccttcttctctcccttgcacctgtacctcttggtctttgaataaagcctgagtaggaaggctagcaaaaaaaaaaaaaaaaaaaaaaaaaaaaaaaaaaaaaaaaaaaaaaaaaaaaaaaaaaaaaaaaaaaaaaaaaaaaaaaa

SEQ ID NO: 3047 - RNA, 5419 nt, synthetic construct
  source 1..5419: mol_type = other RNA
aggaaataagagagaaaagaagagtaagaagaaatataagagccaccatggcccctaagaagaagcgtaaagtgagccgggtgaacggcagcggcagcggcggcggcatgaaccacgaccaggagttcgacccccctaaggtgtaccctcccgtccccgccgagaagagaaagcccatccgggtcctgagcctgttcgatggcatcgccaccggtctgctggtgctgaaggacctgggcatccaggtggataggtacattgcctccgaggtgtgcgaggactccatcaccgtgggaatggtgcgtcatcagggcaagatcatgtacgtgggcgacgtgcggagcgtgacacagaagcatatccaggagtggggccctttcgacctggtgatcggcggcagcccttgcaatgacctgagcatcgtgaacccagcccggaagggcctgtacgagggaaccggcagactgttcttcgagttttacagactgctgcacgacgcccggcctaaggaaggcgacgaccggcccttcttttggctgttcgagaatgtggtggccatgggagtcagcgacaagcgggatattagccggttcctggagagcaaccccgtgatgatcgatgccaaggaagtgagcgccgcccaccgggccagatacttctggggcaatctgcctggcatgaacagacccctggccagcaccgtgaacgacaagctggagctgcaggagtgcctggagcacggccggatcgccaagttcagcaaggtgagaaccatcaccacccgaagcaacagcatcaaacaaggcaaggaccagcactttcctgtgttcatgaacgagaaggaggacatcctgtggtgtaccgagatggagagagtgttcgggttcccagtccactacacagatgtcagcaacatgtctagactggccagacagagactgctgggaagaagctggtccgtccctgtgatcagacacctgttcgcccctctgaaggagtacttcgcctgcgtgagcagcggcaacagcaacgccaacagccggggccccagcttctctagcggcctggtgccactgtccctgagagggagccacatgggccccatggagatctacaaaaccgtgagcgcctggaagcggcagcctgtgcgcgtgctgagcctgtttcggaatatcgataaagtcctgaaaagcctgggattcctggagagcggctctggctccggcggtggcaccctgaagtacgtggaggatgtgacaaacgtggtcagacgggatgtggagaagtggggccccttcgatctggtgtacggcagcacccaacccctgggcagctcttgtgaccggtgccctggctggtacatgtttcagttccaccggatcctgcagtacgccctgccgagacaggagtcccagcggccattcttttggattttcatggacaacttgctgctgaccgaggatgaccaggaaactaccactcggttcctgcagaccgaagccgtgaccctgcaggacgtgagaggccgggactaccagaacgccatgcgggtgtggtccaacatccctggactgaaaagcaagcacgcacctctgacccctaaagaagaggagtacctgcaggcccaggtgcggagcagaagcaagctggacgcccctaaggtggatctgctggtgaagaattgcctcctgcccctgagagagtacttcaagtatttcagccagaatagtctgcccctgggcggcccaagcagcggcgcccctcctcccagcggcggcagcccagccggctccccaacctctaccgaggagggcacctctgagtccgccacccccgagagcggccctggcacctccaccgagcccagcgagggcagcgcacccggcagccctgccggcagccccacctccacagaggagggaaccagcaccgagcccagcgaaggcagcgccccaggcaccagcaccgagcctagtgagggcggctctggcggcggcagcgcccaggagattaaacggatcaacaagatcagaagaagacttgtgaaagacagcaacaccaagaaggccggcaagacaggccccatgaaaaccctgctggttagagtgatgacacccgatctgagagagcggctggaaaacctgagaaagaagcctgaaaatatcccccagcccatcagcaatacatctagagccaacctgaataagctgctgaccgattacaccgaaatgaagaaggcgatcctgcatgtgtactgggaagagttccagaaggaccctgtgggcctgatgagccgggtggcccagcctgccagcaagaagatcgatcagaacaagctgaaacctgagatggacgagaagggcaacctgaccaccgccggctttgcctgctctcagtgtggccagcccctgttcgtgtacaagctggagcaggtgtctgagaagggcaaggcttacaccaactacttcggacggtgcaatgtggccgagcacgaaaagctgatcctgctggcccagctgaagcccgagaaggatagcgacgaagccgtgacatatagcctgggaaagtttgggcagagggccctggatttctacagcattcatgtgaccaaggagtccacccaccccgtgaagcccctggcccagatcgccggaaacagatacgcctccggacctgtgggaaaggccctgagcgacgcatgtatgggcacaatcgcctccttcctgtctaagtaccaggacatcatcatcgaacaccagaaggtggtgaagggcaaccagaagagactggagagcctgcgggagctggccggcaaggaaaacctggaataccctagcgtgaccctgccacctcagcctcacaccaaggagggcgttgatgcctacaacgaagtgatcgcccgggtgcgaatgtgggtgaacctgaacctgtggcagaagctgaagctaagcagagatgatgccaagcctctgctgagactgaagggattcccttcctttcctctggtcgagagacaggccaacgaagtggactggtgggacatggtgtgtaacgtgaagaagctgatcaacgagaaaaaggaggatggcaaggtgttttggcagaatctggctggctacaagagacaggaagccctgagaccatacctgagcagcgaggaagatcggaagaagggaaagaaattcgctcggtaccagctgggcgacctgctgctgcacctggaaaagaagcacggcgaggactggggaaaggtgtacgacgaggcctgggagcggattgacaagaaagtggaaggcctgagcaagcacatcaagctggaagaggaacggagaagcgaggacgcccagagcaaggccgccctgaccgactggctgcgggctaaggccagcttcgtgatcgagggcctgaaggaggccgacaaggacgagttctgcagatgcgagctgaagctgcagaagtggtacggggacctgcggggaaagcccttcgccatcgaagccgagaacagcatcctggacatcagcggcttcagcaagcagtacaactgtgccttcatctggcagaaggacggcgtgaagaagctgaacctgtacctgatcatcaactacttcaagggcggcaagctgcggttcaagaagatcaaacctgaagccttcgaagccaacagattctacaccgtgatcaacaaaaagagcggcgagatcgtgcccatggaggtgaacttcaacttcgacgaccccaacctgatcatcctgcctctggcctttggcaagagacagggcagagaattcatctggaacgacctgctgtccctggaaaccggcagcctgaagctggccaacggaagagtgatcgagaagacactgtacaacagaagaacccggcaggatgagcctgccctgttcgtggccctgaccttcgagcggcgggaggtcctggactcctccaatatcaaaccaatgaacctgatcggcgtggcaagaggcgaaaacatccccgccgtgatcgccctgaccgaccccgagggctgcccactgagccggtttaaggatagcctgggaaacccaacccacatcctgagaatcggcgagagctataaggagaagcagcggaccatccaggccaagaaggaggtggagcagcggagagccggcggctacagccggaagtacgccagcaaagccaagaatctggcagacgatatggtgagaaacaccgctagagatctgctgtactacgccgtgacccaggatgccatgctgatcttcgccaacctgagccggggcttcggccggcagggcaagcggaccttcatggccgagagacagtacacacggatggaggactggctgaccgccaagctggcctacgagggcctgagcaagacctacctgtccaagacactggcccagtacacctccaagacatgcagcaactgtgggtttaccatcaccagcgccgactacgacagggtgctggagaagctgaagaagacagcaacaggctggatgaccacaattaacggcaaggagctgaaggtggagggccagattacctactacaacagatacaagagacagaacgtagtcaaggacctgtccgtcgagctggatagactgagcgaagaatctgtgaacaacgacatctcctcctggacaaagggcagaagcggagaagctctgagcctcctgaagaaaagattctcccatagacccgtgcaggagaagttcgtgtgcctgaactgcggcttcgagacacacgcagccgagcaagccgccctgaacatcgccagatcctggctgttcctgcggagccaggagtacaagaaataccagacaaacaagacaaccggcaacaccgataagagagccttcgtcgagacctggcagtccttttaccggaagaagcttaaggaggtgtggaaacctgccgtgcggtctggcggatctggcggaggctccacaagcagctgcgagggcagcgtgagcttcagggacgtggccatcaacttcagcagggaggagtggcagcacctggaccccagccagaggaacctgtacagggacgtgatgctggagacctacagccacctgctgagcgtgggctaccaggtgcccgaggccgaggtggtgatgctggagcagggcaaggagccctgggccctgcagggcgagaggcccaggcagagctgccccggcgagaagctgtggaccagccccaagaaaaagagaaaagtctaagctgccttctgcggggcttgccttctggccatgcccttcttctctcccttgcacctgtacctcttggtctttgaataaagcctgagtaggaaggctagcaaaaaaaaaaaaaaaaaaaaaaaaaaaaaaaaaaaaaaaaaaaaaaaaaaaaaaaaaaaaaaaaaaaaaaaaaaaaaaaa

SEQ ID NO: 3048 - RNA, 5419 nt, synthetic construct
  source 1..5419: mol_type = other RNA
aggaaataagagagaaaagaagagtaagaagaaatataagagccaccatggcccctaagaagaagcgtaaagtgagccgggtgaacggcagcggcagcggcggcggcatgaaccacgaccaggagttcgacccccctaaggtgtaccctcccgtccccgccgagaagagaaagcccatccgggtcctgagcctgttcgatggcatcgccaccggtctgctggtgctgaaggacctgggcatccaggtggataggtacattgcctccgaggtgtgcgaggactccatcaccgtgggaatggtgcgtcatcagggcaagatcatgtacgtgggcgacgtgcggagcgtgacacagaagcatatccaggagtggggccctttcgacctggtgatcggcggcagcccttgcaatgacctgagcatcgtgaacccagcccggaagggcctgtacgagggaaccggcagactgttcttcgagttttacagactgctgcacgacgcccggcctaaggaaggcgacgaccggcccttcttttggctgttcgagaatgtggtggccatgggagtcagcgacaagcgggatattagccggttcctggagagcaaccccgtgatgatcgatgccaaggaagtgagcgccgcccaccgggccagatacttctggggcaatctgcctggcatgaacagacccctggccagcaccgtgaacgacaagctggagctgcaggagtgcctggagcacggccggatcgccaagttcagcaaggtgagaaccatcaccacccgaagcaacagcatcaaacaaggcaaggaccagcactttcctgtgttcatgaacgagaaggaggacatcctgtggtgtaccgagatggagagagtgttcgggttcccagtccactacacagatgtcagcaacatgtctagactggccagacagagactgctgggaagaagctggtccgtccctgtgatcagacacctgttcgcccctctgaaggagtacttcgcctgcgtgagcagcggcaacagcaacgccaacagccggggccccagcttctctagcggcctggtgccactgtccctgagagggagccacatgggccccatggagatctacaaaaccgtgagcgcctggaagcggcagcctgtgcgcgtgctgagcctgtttcggaatatcgataaagtcctgaaaagcctgggattcctggagagcggctctggctccggcggtggcaccctgaagtacgtggaggatgtgacaaacgtggtcagacgggatgtggagaagtggggccccttcgatctggtgtacggcagcacccaacccctgggcagctcttgtgaccggtgccctggctggtacatgtttcagttccaccggatcctgcagtacgccctgccgagacaggagtcccagcggccattcttttggattttcatggacaacttgctgctgaccgaggatgaccaggaaactaccactcggttcctgcagaccgaagccgtgaccctgcaggacgtgagaggccgggactaccagaacgccatgcgggtgtggtccaacatccctggactgaaaagcaagcacgcacctctgacccctaaagaagaggagtacctgcaggcccaggtgcggagcagaagcaagctggacgcccctaaggtggatctgctggtgaagaattgcctcctgcccctgagagagtacttcaagtatttcagccagaatagtctgcccctgggcggcccaagcagcggcgcccctcctcccagcggcggcagcccagccggctccccaacctctaccgaggagggcacctctgagtccgccacccccgagagcggccctggcacctccaccgagcccagcgagggcagcgcacccggcagccctgccggcagccccacctccacagaggagggaaccagcaccgagcccagcgaaggcagcgccccaggcaccagcaccgagcctagtgagggcggctctggcggcggcagcgcccaggagattaaacggatcaacaagatcagaagaagacttgtgaaagacagcaacaccaagaaggccggcaagacaggccccatgaaaaccctgctggttagagtgatgacacccgatctgagagagcggctggaaaacctgagaaagaagcctgaaaatatcccccagcccatcagcaatacatctagagccaacctgaataagctgctgaccgattacaccgaaatgaagaaggcgatcctgcatgtgtactgggaagagttccagaaggaccctgtgggcctgatgagccgggtggcccagcctgccagcaagaagatcgatcagaacaagctgaaacctgagatggacgagaagggcaacctgaccaccgccggctttgcctgctctcagtgtggccagcccctgttcgtgtacaagctggagcaggtgtctgagaagggcaaggcttacaccaactacttcggacggtgcaatgtggccgagcacgaaaagctgatcctgctggcccagctgaagcccgagaaggatagcgacgaagccgtgacatatagcctgggaaagtttgggcagagggccctggatttctacagcattcatgtgaccaaggagtccacccaccccgtgaagcccctggcccagatcgccggaaacagatacgcctccggacctgtgggaaaggccctgagcgacgcatgtatgggcacaatcgcctccttcctgtctaagtaccaggacatcatcatcgaacaccagaaggtggtgaagggcaaccagaagagactggagagcctgcgggagctggccggcaaggaaaacctggaataccctagcgtgaccctgccacctcagcctcacaccaaggagggcgttgatgcctacaacgaagtgatcgcccgggtgcgaatgtgggtgaacctgaacctgtggcagaagctgaagctaagcagagatgatgccaagcctctgctgagactgaagggattcccttcctttcctctggtcgagagacaggccaacgaagtggactggtgggacatggtgtgtaacgtgaagaagctgatcaacgagaaaaaggaggatggcaaggtgttttggcagaatctggctggctacaagagacaggaagccctgagaccatacctgagcagcgaggaagatcggaagaagggaaagaaattcgctcggtaccagctgggcgacctgctgctgcacctggaaaagaagcacggcgaggactggggaaaggtgtacgacgaggcctgggagcggattgacaagaaagtggaaggcctgagcaagcacatcaagctggaagaggaacggagaagcgaggacgcccagagcaaggccgccctgaccgactggctgcgggctaaggccagcttcgtgatcgagggcctgaaggaggccgacaaggacgagttctgcagatgcgagctgaagctgcagaagtggtacggggacctgcggggaaagcccttcgccatcgaagccgagaacagcatcctggacatcagcggcttcagcaagcagtacaactgtgccttcatctggcagaaggacggcgtgaagaagctgaacctgtacctgatcatcaactacttcaagggcggcaagctgcggttcaagaagatcaaacctgaagccttcgaagccaacagattctacaccgtgatcaacaaaaagagcggcgagatcgtgcccatggaggtgaacttcaacttcgacgaccccaacctgatcatcctgcctctggcctttggcaagagacagggcagagaattcatctggaacgacctgctgtccctggaaaccggcagcctgaagctggccaacggaagagtgatcgagaagacactgtacaacagaagaacccggcaggatgagcctgccctgttcgtggccctgaccttcgagcggcgggaggtcctggactcctccaatatcaaaccaatgaacctgatcggcgtggcaagaggcgaaaacatccccgccgtgatcgccctgaccgaccccgagggctgcccactgagccggtttaaggatagcctgggaaacccaacccacatcctgagaatcggcgagagctataaggagaagcagcggaccatccaggccaagaaggaggtggagcagcggagagccggcggctacagccggaagtacgccagcaaagccaagaatctggcagacgatatggtgagaaacaccgctagagatctgctgtactacgccgtgacccaggatgccatgctgatcttcgccaacctgagccggggcttcggccggcagggcaagcggaccttcatggccgagagacagtacacacggatggaggactggctgaccgccaagctggcctacgagggcctgagcaagacctacctgtccaagacactggcccagtacacctccaagacatgcagcaactgtgggtttaccatcaccagcgccgactacgacagggtgctggagaagctgaagaagacagcaacaggctggatgaccacaattaacggcaaggagctgaaggtggagggccagattacctactacaacagatacaagagacagaacgtagtcaaggacctgtccgtcgagctggatagactgagcgaagaatctgtgaacaacgacatctcctcctggacaaagggcagaagcggagaagctctgagcctcctgaagaaaagattctcccatagacccgtgcaggagaagttcgtgtgcctgaactgcggcttcgagacacacgcagccgagcaagccgccctgaacatcgccagatcctggctgttcctgcggagccaggagtacaagaaataccagacaaacaagacaaccggcaacaccgataagagagccttcgtcgagacctggcagtccttttaccggaagaagcttaaggaggtgtggaaacctgccgtgcggtctggcggatctggcggaggctccacaagctacaccctggagagcctgaccctggaggacgtggccgtggacttcacccaggaggagtggaggctgctggcccccgcccagaaggacctgtactgggacgtgatgctggagaacttcaggaacctggtgagcgtgggctacgtggccagcatgcccgccgccctgagcaggctggagaggggcggccagtggatgaccgaggacgagaccaggcactggatctgccccgagatcaagaaggacaccagccccaagaaaaagagaaaagtctaagctgccttctgcggggcttgccttctggccatgcccttcttctctcccttgcacctgtacctcttggtctttgaataaagcctgagtaggaaggctagcaaaaaaaaaaaaaaaaaaaaaaaaaaaaaaaaaaaaaaaaaaaaaaaaaaaaaaaaaaaaaaaaaaaaaaaaaaaaaaaa

SEQ ID NO: 3049 - RNA, 5419 nt, synthetic construct
  source 1..5419: mol_type = other RNA
aggaaataagagagaaaagaagagtaagaagaaatataagagccaccatggcccctaagaagaagcgtaaagtgagccgggtgaacggcagcggcagcggcggcggcatgaaccacgaccaggagttcgacccccctaaggtgtaccctcccgtccccgccgagaagagaaagcccatccgggtcctgagcctgttcgatggcatcgccaccggtctgctggtgctgaaggacctgggcatccaggtggataggtacattgcctccgaggtgtgcgaggactccatcaccgtgggaatggtgcgtcatcagggcaagatcatgtacgtgggcgacgtgcggagcgtgacacagaagcatatccaggagtggggccctttcgacctggtgatcggcggcagcccttgcaatgacctgagcatcgtgaacccagcccggaagggcctgtacgagggaaccggcagactgttcttcgagttttacagactgctgcacgacgcccggcctaaggaaggcgacgaccggcccttcttttggctgttcgagaatgtggtggccatgggagtcagcgacaagcgggatattagccggttcctggagagcaaccccgtgatgatcgatgccaaggaagtgagcgccgcccaccgggccagatacttctggggcaatctgcctggcatgaacagacccctggccagcaccgtgaacgacaagctggagctgcaggagtgcctggagcacggccggatcgccaagttcagcaaggtgagaaccatcaccacccgaagcaacagcatcaaacaaggcaaggaccagcactttcctgtgttcatgaacgagaaggaggacatcctgtggtgtaccgagatggagagagtgttcgggttcccagtccactacacagatgtcagcaacatgtctagactggccagacagagactgctgggaagaagctggtccgtccctgtgatcagacacctgttcgcccctctgaaggagtacttcgcctgcgtgagcagcggcaacagcaacgccaacagccggggccccagcttctctagcggcctggtgccactgtccctgagagggagccacatgggccccatggagatctacaaaaccgtgagcgcctggaagcggcagcctgtgcgcgtgctgagcctgtttcggaatatcgataaagtcctgaaaagcctgggattcctggagagcggctctggctccggcggtggcaccctgaagtacgtggaggatgtgacaaacgtggtcagacgggatgtggagaagtggggccccttcgatctggtgtacggcagcacccaacccctgggcagctcttgtgaccggtgccctggctggtacatgtttcagttccaccggatcctgcagtacgccctgccgagacaggagtcccagcggccattcttttggattttcatggacaacttgctgctgaccgaggatgaccaggaaactaccactcggttcctgcagaccgaagccgtgaccctgcaggacgtgagaggccgggactaccagaacgccatgcgggtgtggtccaacatccctggactgaaaagcaagcacgcacctctgacccctaaagaagaggagtacctgcaggcccaggtgcggagcagaagcaagctggacgcccctaaggtggatctgctggtgaagaattgcctcctgcccctgagagagtacttcaagtatttcagccagaatagtctgcccctgggcggcccaagcagcggcgcccctcctcccagcggcggcagcccagccggctccccaacctctaccgaggagggcacctctgagtccgccacccccgagagcggccctggcacctccaccgagcccagcgagggcagcgcacccggcagccctgccggcagccccacctccacagaggagggaaccagcaccgagcccagcgaaggcagcgccccaggcaccagcaccgagcctagtgagggcggctctggcggcggcagcgcccaggagattaaacggatcaacaagatcagaagaagacttgtgaaagacagcaacaccaagaaggccggcaagacaggccccatgaaaaccctgctggttagagtgatgacacccgatctgagagagcggctggaaaacctgagaaagaagcctgaaaatatcccccagcccatcagcaatacatctagagccaacctgaataagctgctgaccgattacaccgaaatgaagaaggcgatcctgcatgtgtactgggaagagttccagaaggaccctgtgggcctgatgagccgggtggcccagcctgccagcaagaagatcgatcagaacaagctgaaacctgagatggacgagaagggcaacctgaccaccgccggctttgcctgctctcagtgtggccagcccctgttcgtgtacaagctggagcaggtgtctgagaagggcaaggcttacaccaactacttcggacggtgcaatgtggccgagcacgaaaagctgatcctgctggcccagctgaagcccgagaaggatagcgacgaagccgtgacatatagcctgggaaagtttgggcagagggccctggatttctacagcattcatgtgaccaaggagtccacccaccccgtgaagcccctggcccagatcgccggaaacagatacgcctccggacctgtgggaaaggccctgagcgacgcatgtatgggcacaatcgcctccttcctgtctaagtaccaggacatcatcatcgaacaccagaaggtggtgaagggcaaccagaagagactggagagcctgcgggagctggccggcaaggaaaacctggaataccctagcgtgaccctgccacctcagcctcacaccaaggagggcgttgatgcctacaacgaagtgatcgcccgggtgcgaatgtgggtgaacctgaacctgtggcagaagctgaagctaagcagagatgatgccaagcctctgctgagactgaagggattcccttcctttcctctggtcgagagacaggccaacgaagtggactggtgggacatggtgtgtaacgtgaagaagctgatcaacgagaaaaaggaggatggcaaggtgttttggcagaatctggctggctacaagagacaggaagccctgagaccatacctgagcagcgaggaagatcggaagaagggaaagaaattcgctcggtaccagctgggcgacctgctgctgcacctggaaaagaagcacggcgaggactggggaaaggtgtacgacgaggcctgggagcggattgacaagaaagtggaaggcctgagcaagcacatcaagctggaagaggaacggagaagcgaggacgcccagagcaaggccgccctgaccgactggctgcgggctaaggccagcttcgtgatcgagggcctgaaggaggccgacaaggacgagttctgcagatgcgagctgaagctgcagaagtggtacggggacctgcggggaaagcccttcgccatcgaagccgagaacagcatcctggacatcagcggcttcagcaagcagtacaactgtgccttcatctggcagaaggacggcgtgaagaagctgaacctgtacctgatcatcaactacttcaagggcggcaagctgcggttcaagaagatcaaacctgaagccttcgaagccaacagattctacaccgtgatcaacaaaaagagcggcgagatcgtgcccatggaggtgaacttcaacttcgacgaccccaacctgatcatcctgcctctggcctttggcaagagacagggcagagaattcatctggaacgacctgctgtccctggaaaccggcagcctgaagctggccaacggaagagtgatcgagaagacactgtacaacagaagaacccggcaggatgagcctgccctgttcgtggccctgaccttcgagcggcgggaggtcctggactcctccaatatcaaaccaatgaacctgatcggcgtggcaagaggcgaaaacatccccgccgtgatcgccctgaccgaccccgagggctgcccactgagccggtttaaggatagcctgggaaacccaacccacatcctgagaatcggcgagagctataaggagaagcagcggaccatccaggccaagaaggaggtggagcagcggagagccggcggctacagccggaagtacgccagcaaagccaagaatctggcagacgatatggtgagaaacaccgctagagatctgctgtactacgccgtgacccaggatgccatgctgatcttcgccaacctgagccggggcttcggccggcagggcaagcggaccttcatggccgagagacagtacacacggatggaggactggctgaccgccaagctggcctacgagggcctgagcaagacctacctgtccaagacactggcccagtacacctccaagacatgcagcaactgtgggtttaccatcaccagcgccgactacgacagggtgctggagaagctgaagaagacagcaacaggctggatgaccacaattaacggcaaggagctgaaggtggagggccagattacctactacaacagatacaagagacagaacgtagtcaaggacctgtccgtcgagctggatagactgagcgaagaatctgtgaacaacgacatctcctcctggacaaagggcagaagcggagaagctctgagcctcctgaagaaaagattctcccatagacccgtgcaggagaagttcgtgtgcctgaactgcggcttcgagacacacgcagccgagcaagccgccctgaacatcgccagatcctggctgttcctgcggagccaggagtacaagaaataccagacaaacaagacaaccggcaacaccgataagagagccttcgtcgagacctggcagtccttttaccggaagaagcttaaggaggtgtggaaacctgccgtgcggtctggcggatctggcggaggctccacaagcctgcaggtgagcgtgagcttcgaggacgtgaccgtggacttcagcagggaggagtggcagcacctggaccccgcccagaggaggctgtacagggacgtgaccctggagaactacagccacctgtgcagcgtgggctaccaggtgcccaagcccgaggtgatcttcaagctggagcagggcgagggcccctggatgctggagggcgaggccccccaccagagctgcagcgacgacgacatcggcaccagccccaagaaaaagagaaaagtctaagctgccttctgcggggcttgccttctggccatgcccttcttctctcccttgcacctgtacctcttggtctttgaataaagcctgagtaggaaggctagcaaaaaaaaaaaaaaaaaaaaaaaaaaaaaaaaaaaaaaaaaaaaaaaaaaaaaaaaaaaaaaaaaaaaaaaaaaaaaaaa

SEQ ID NO: 3050 - RNA, 5419 nt, synthetic construct
  source 1..5419: mol_type = other RNA
aggaaataagagagaaaagaagagtaagaagaaatataagagccaccatggcccctaagaagaagcgtaaagtgagccgggtgaacggcagcggcagcggcggcggcatgaaccacgaccaggagttcgacccccctaaggtgtaccctcccgtccccgccgagaagagaaagcccatccgggtcctgagcctgttcgatggcatcgccaccggtctgctggtgctgaaggacctgggcatccaggtggataggtacattgcctccgaggtgtgcgaggactccatcaccgtgggaatggtgcgtcatcagggcaagatcatgtacgtgggcgacgtgcggagcgtgacacagaagcatatccaggagtggggccctttcgacctggtgatcggcggcagcccttgcaatgacctgagcatcgtgaacccagcccggaagggcctgtacgagggaaccggcagactgttcttcgagttttacagactgctgcacgacgcccggcctaaggaaggcgacgaccggcccttcttttggctgttcgagaatgtggtggccatgggagtcagcgacaagcgggatattagccggttcctggagagcaaccccgtgatgatcgatgccaaggaagtgagcgccgcccaccgggccagatacttctggggcaatctgcctggcatgaacagacccctggccagcaccgtgaacgacaagctggagctgcaggagtgcctggagcacggccggatcgccaagttcagcaaggtgagaaccatcaccacccgaagcaacagcatcaaacaaggcaaggaccagcactttcctgtgttcatgaacgagaaggaggacatcctgtggtgtaccgagatggagagagtgttcgggttcccagtccactacacagatgtcagcaacatgtctagactggccagacagagactgctgggaagaagctggtccgtccctgtgatcagacacctgttcgcccctctgaaggagtacttcgcctgcgtgagcagcggcaacagcaacgccaacagccggggccccagcttctctagcggcctggtgccactgtccctgagagggagccacatgggccccatggagatctacaaaaccgtgagcgcctggaagcggcagcctgtgcgcgtgctgagcctgtttcggaatatcgataaagtcctgaaaagcctgggattcctggagagcggctctggctccggcggtggcaccctgaagtacgtggaggatgtgacaaacgtggtcagacgggatgtggagaagtggggccccttcgatctggtgtacggcagcacccaacccctgggcagctcttgtgaccggtgccctggctggtacatgtttcagttccaccggatcctgcagtacgccctgccgagacaggagtcccagcggccattcttttggattttcatggacaacttgctgctgaccgaggatgaccaggaaactaccactcggttcctgcagaccgaagccgtgaccctgcaggacgtgagaggccgggactaccagaacgccatgcgggtgtggtccaacatccctggactgaaaagcaagcacgcacctctgacccctaaagaagaggagtacctgcaggcccaggtgcggagcagaagcaagctggacgcccctaaggtggatctgctggtgaagaattgcctcctgcccctgagagagtacttcaagtatttcagccagaatagtctgcccctgggcggcccaagcagcggcgcccctcctcccagcggcggcagcccagccggctccccaacctctaccgaggagggcacctctgagtccgccacccccgagagcggccctggcacctccaccgagcccagcgagggcagcgcacccggcagccctgccggcagccccacctccacagaggagggaaccagcaccgagcccagcgaaggcagcgccccaggcaccagcaccgagcctagtgagggcggctctggcggcggcagcgcccaggagattaaacggatcaacaagatcagaagaagacttgtgaaagacagcaacaccaagaaggccggcaagacaggccccatgaaaaccctgctggttagagtgatgacacccgatctgagagagcggctggaaaacctgagaaagaagcctgaaaatatcccccagcccatcagcaatacatctagagccaacctgaataagctgctgaccgattacaccgaaatgaagaaggcgatcctgcatgtgtactgggaagagttccagaaggaccctgtgggcctgatgagccgggtggcccagcctgccagcaagaagatcgatcagaacaagctgaaacctgagatggacgagaagggcaacctgaccaccgccggctttgcctgctctcagtgtggccagcccctgttcgtgtacaagctggagcaggtgtctgagaagggcaaggcttacaccaactacttcggacggtgcaatgtggccgagcacgaaaagctgatcctgctggcccagctgaagcccgagaaggatagcgacgaagccgtgacatatagcctgggaaagtttgggcagagggccctggatttctacagcattcatgtgaccaaggagtccacccaccccgtgaagcccctggcccagatcgccggaaacagatacgcctccggacctgtgggaaaggccctgagcgacgcatgtatgggcacaatcgcctccttcctgtctaagtaccaggacatcatcatcgaacaccagaaggtggtgaagggcaaccagaagagactggagagcctgcgggagctggccggcaaggaaaacctggaataccctagcgtgaccctgccacctcagcctcacaccaaggagggcgttgatgcctacaacgaagtgatcgcccgggtgcgaatgtgggtgaacctgaacctgtggcagaagctgaagctaagcagagatgatgccaagcctctgctgagactgaagggattcccttcctttcctctggtcgagagacaggccaacgaagtggactggtgggacatggtgtgtaacgtgaagaagctgatcaacgagaaaaaggaggatggcaaggtgttttggcagaatctggctggctacaagagacaggaagccctgagaccatacctgagcagcgaggaagatcggaagaagggaaagaaattcgctcggtaccagctgggcgacctgctgctgcacctggaaaagaagcacggcgaggactggggaaaggtgtacgacgaggcctgggagcggattgacaagaaagtggaaggcctgagcaagcacatcaagctggaagaggaacggagaagcgaggacgcccagagcaaggccgccctgaccgactggctgcgggctaaggccagcttcgtgatcgagggcctgaaggaggccgacaaggacgagttctgcagatgcgagctgaagctgcagaagtggtacggggacctgcggggaaagcccttcgccatcgaagccgagaacagcatcctggacatcagcggcttcagcaagcagtacaactgtgccttcatctggcagaaggacggcgtgaagaagctgaacctgtacctgatcatcaactacttcaagggcggcaagctgcggttcaagaagatcaaacctgaagccttcgaagccaacagattctacaccgtgatcaacaaaaagagcggcgagatcgtgcccatggaggtgaacttcaacttcgacgaccccaacctgatcatcctgcctctggcctttggcaagagacagggcagagaattcatctggaacgacctgctgtccctggaaaccggcagcctgaagctggccaacggaagagtgatcgagaagacactgtacaacagaagaacccggcaggatgagcctgccctgttcgtggccctgaccttcgagcggcgggaggtcctggactcctccaatatcaaaccaatgaacctgatcggcgtggcaagaggcgaaaacatccccgccgtgatcgccctgaccgaccccgagggctgcccactgagccggtttaaggatagcctgggaaacccaacccacatcctgagaatcggcgagagctataaggagaagcagcggaccatccaggccaagaaggaggtggagcagcggagagccggcggctacagccggaagtacgccagcaaagccaagaatctggcagacgatatggtgagaaacaccgctagagatctgctgtactacgccgtgacccaggatgccatgctgatcttcgccaacctgagccggggcttcggccggcagggcaagcggaccttcatggccgagagacagtacacacggatggaggactggctgaccgccaagctggcctacgagggcctgagcaagacctacctgtccaagacactggcccagtacacctccaagacatgcagcaactgtgggtttaccatcaccagcgccgactacgacagggtgctggagaagctgaagaagacagcaacaggctggatgaccacaattaacggcaaggagctgaaggtggagggccagattacctactacaacagatacaagagacagaacgtagtcaaggacctgtccgtcgagctggatagactgagcgaagaatctgtgaacaacgacatctcctcctggacaaagggcagaagcggagaagctctgagcctcctgaagaaaagattctcccatagacccgtgcaggagaagttcgtgtgcctgaactgcggcttcgagacacacgcagccgagcaagccgccctgaacatcgccagatcctggctgttcctgcggagccaggagtacaagaaataccagacaaacaagacaaccggcaacaccgataagagagccttcgtcgagacctggcagtccttttaccggaagaagcttaaggaggtgtggaaacctgccgtgcggtctggcggatctggcggaggctccacaagcggcagcctgaccttcagggacgtggccatcgagttcagcctggaggagtggcagtgcctggacaccgcccagcagaacctgtacaggaacgtgatgctggagaactacaggaacctggtgttcctgggcatcgccgcccccaagcccgacctgatcatcttcctggagcagggcaaggagccctggaacgtgaagaggcacgagatggtggaggagccccccgtgatctgcagccacttcgccaccagccccaagaaaaagagaaaagtctaagctgccttctgcggggcttgccttctggccatgcccttcttctctcccttgcacctgtacctcttggtctttgaataaagcctgagtaggaaggctagcaaaaaaaaaaaaaaaaaaaaaaaaaaaaaaaaaaaaaaaaaaaaaaaaaaaaaaaaaaaaaaaaaaaaaaaaaaaaaaaa

SEQ ID NO: 3051 - RNA, 5419 nt, synthetic construct
  source 1..5419: mol_type = other RNA
aggaaataagagagaaaagaagagtaagaagaaatataagagccaccatggcccctaagaagaagcgtaaagtgagccgggtgaacggcagcggcagcggcggcggcatgaaccacgaccaggagttcgacccccctaaggtgtaccctcccgtccccgccgagaagagaaagcccatccgggtcctgagcctgttcgatggcatcgccaccggtctgctggtgctgaaggacctgggcatccaggtggataggtacattgcctccgaggtgtgcgaggactccatcaccgtgggaatggtgcgtcatcagggcaagatcatgtacgtgggcgacgtgcggagcgtgacacagaagcatatccaggagtggggccctttcgacctggtgatcggcggcagcccttgcaatgacctgagcatcgtgaacccagcccggaagggcctgtacgagggaaccggcagactgttcttcgagttttacagactgctgcacgacgcccggcctaaggaaggcgacgaccggcccttcttttggctgttcgagaatgtggtggccatgggagtcagcgacaagcgggatattagccggttcctggagagcaaccccgtgatgatcgatgccaaggaagtgagcgccgcccaccgggccagatacttctggggcaatctgcctggcatgaacagacccctggccagcaccgtgaacgacaagctggagctgcaggagtgcctggagcacggccggatcgccaagttcagcaaggtgagaaccatcaccacccgaagcaacagcatcaaacaaggcaaggaccagcactttcctgtgttcatgaacgagaaggaggacatcctgtggtgtaccgagatggagagagtgttcgggttcccagtccactacacagatgtcagcaacatgtctagactggccagacagagactgctgggaagaagctggtccgtccctgtgatcagacacctgttcgcccctctgaaggagtacttcgcctgcgtgagcagcggcaacagcaacgccaacagccggggccccagcttctctagcggcctggtgccactgtccctgagagggagccacatgggccccatggagatctacaaaaccgtgagcgcctggaagcggcagcctgtgcgcgtgctgagcctgtttcggaatatcgataaagtcctgaaaagcctgggattcctggagagcggctctggctccggcggtggcaccctgaagtacgtggaggatgtgacaaacgtggtcagacgggatgtggagaagtggggccccttcgatctggtgtacggcagcacccaacccctgggcagctcttgtgaccggtgccctggctggtacatgtttcagttccaccggatcctgcagtacgccctgccgagacaggagtcccagcggccattcttttggattttcatggacaacttgctgctgaccgaggatgaccaggaaactaccactcggttcctgcagaccgaagccgtgaccctgcaggacgtgagaggccgggactaccagaacgccatgcgggtgtggtccaacatccctggactgaaaagcaagcacgcacctctgacccctaaagaagaggagtacctgcaggcccaggtgcggagcagaagcaagctggacgcccctaaggtggatctgctggtgaagaattgcctcctgcccctgagagagtacttcaagtatttcagccagaatagtctgcccctgggcggcccaagcagcggcgcccctcctcccagcggcggcagcccagccggctccccaacctctaccgaggagggcacctctgagtccgccacccccgagagcggccctggcacctccaccgagcccagcgagggcagcgcacccggcagccctgccggcagccccacctccacagaggagggaaccagcaccgagcccagcgaaggcagcgccccaggcaccagcaccgagcctagtgagggcggctctggcggcggcagcgcccaggagattaaacggatcaacaagatcagaagaagacttgtgaaagacagcaacaccaagaaggccggcaagacaggccccatgaaaaccctgctggttagagtgatgacacccgatctgagagagcggctggaaaacctgagaaagaagcctgaaaatatcccccagcccatcagcaatacatctagagccaacctgaataagctgctgaccgattacaccgaaatgaagaaggcgatcctgcatgtgtactgggaagagttccagaaggaccctgtgggcctgatgagccgggtggcccagcctgccagcaagaagatcgatcagaacaagctgaaacctgagatggacgagaagggcaacctgaccaccgccggctttgcctgctctcagtgtggccagcccctgttcgtgtacaagctggagcaggtgtctgagaagggcaaggcttacaccaactacttcggacggtgcaatgtggccgagcacgaaaagctgatcctgctggcccagctgaagcccgagaaggatagcgacgaagccgtgacatatagcctgggaaagtttgggcagagggccctggatttctacagcattcatgtgaccaaggagtccacccaccccgtgaagcccctggcccagatcgccggaaacagatacgcctccggacctgtgggaaaggccctgagcgacgcatgtatgggcacaatcgcctccttcctgtctaagtaccaggacatcatcatcgaacaccagaaggtggtgaagggcaaccagaagagactggagagcctgcgggagctggccggcaaggaaaacctggaataccctagcgtgaccctgccacctcagcctcacaccaaggagggcgttgatgcctacaacgaagtgatcgcccgggtgcgaatgtgggtgaacctgaacctgtggcagaagctgaagctaagcagagatgatgccaagcctctgctgagactgaagggattcccttcctttcctctggtcgagagacaggccaacgaagtggactggtgggacatggtgtgtaacgtgaagaagctgatcaacgagaaaaaggaggatggcaaggtgttttggcagaatctggctggctacaagagacaggaagccctgagaccatacctgagcagcgaggaagatcggaagaagggaaagaaattcgctcggtaccagctgggcgacctgctgctgcacctggaaaagaagcacggcgaggactggggaaaggtgtacgacgaggcctgggagcggattgacaagaaagtggaaggcctgagcaagcacatcaagctggaagaggaacggagaagcgaggacgcccagagcaaggccgccctgaccgactggctgcgggctaaggccagcttcgtgatcgagggcctgaaggaggccgacaaggacgagttctgcagatgcgagctgaagctgcagaagtggtacggggacctgcggggaaagcccttcgccatcgaagccgagaacagcatcctggacatcagcggcttcagcaagcagtacaactgtgccttcatctggcagaaggacggcgtgaagaagctgaacctgtacctgatcatcaactacttcaagggcggcaagctgcggttcaagaagatcaaacctgaagccttcgaagccaacagattctacaccgtgatcaacaaaaagagcggcgagatcgtgcccatggaggtgaacttcaacttcgacgaccccaacctgatcatcctgcctctggcctttggcaagagacagggcagagaattcatctggaacgacctgctgtccctggaaaccggcagcctgaagctggccaacggaagagtgatcgagaagacactgtacaacagaagaacccggcaggatgagcctgccctgttcgtggccctgaccttcgagcggcgggaggtcctggactcctccaatatcaaaccaatgaacctgatcggcgtggcaagaggcgaaaacatccccgccgtgatcgccctgaccgaccccgagggctgcccactgagccggtttaaggatagcctgggaaacccaacccacatcctgagaatcggcgagagctataaggagaagcagcggaccatccaggccaagaaggaggtggagcagcggagagccggcggctacagccggaagtacgccagcaaagccaagaatctggcagacgatatggtgagaaacaccgctagagatctgctgtactacgccgtgacccaggatgccatgctgatcttcgccaacctgagccggggcttcggccggcagggcaagcggaccttcatggccgagagacagtacacacggatggaggactggctgaccgccaagctggcctacgagggcctgagcaagacctacctgtccaagacactggcccagtacacctccaagacatgcagcaactgtgggtttaccatcaccagcgccgactacgacagggtgctggagaagctgaagaagacagcaacaggctggatgaccacaattaacggcaaggagctgaaggtggagggccagattacctactacaacagatacaagagacagaacgtagtcaaggacctgtccgtcgagctggatagactgagcgaagaatctgtgaacaacgacatctcctcctggacaaagggcagaagcggagaagctctgagcctcctgaagaaaagattctcccatagacccgtgcaggagaagttcgtgtgcctgaactgcggcttcgagacacacgcagccgagcaagccgccctgaacatcgccagatcctggctgttcctgcggagccaggagtacaagaaataccagacaaacaagacaaccggcaacaccgataagagagccttcgtcgagacctggcagtccttttaccggaagaagcttaaggaggtgtggaaacctgccgtgcggtctggcggatctggcggaggctccacaagcatggccgccgccgccctgagggaccccgcccagcagggctacgtgaccttcgaggacgtggccgtgtacttcagccaggaggagtggaggctgctggacgaggcccagaagctgctgtacaggaacgtgatgctggagaacttcagcctgctggccagcctgggcctggccagcagcaagacccacgagatcacccagctggagagctgggaggagcccttcatgcccgcctgggaggccgtgaccagccccaagaaaaagagaaaagtctaagctgccttctgcggggcttgccttctggccatgcccttcttctctcccttgcacctgtacctcttggtctttgaataaagcctgagtaggaaggctagcaaaaaaaaaaaaaaaaaaaaaaaaaaaaaaaaaaaaaaaaaaaaaaaaaaaaaaaaaaaaaaaaaaaaaaaaaaaaaaaa

SEQ ID NO: 3052 - RNA, 5419 nt, synthetic construct
  source 1..5419: mol_type = other RNA
aggaaataagagagaaaagaagagtaagaagaaatataagagccaccatggcccctaagaagaagcgtaaagtgagccgggtgaacggcagcggcagcggcggcggcatgaaccacgaccaggagttcgacccccctaaggtgtaccctcccgtccccgccgagaagagaaagcccatccgggtcctgagcctgttcgatggcatcgccaccggtctgctggtgctgaaggacctgggcatccaggtggataggtacattgcctccgaggtgtgcgaggactccatcaccgtgggaatggtgcgtcatcagggcaagatcatgtacgtgggcgacgtgcggagcgtgacacagaagcatatccaggagtggggccctttcgacctggtgatcggcggcagcccttgcaatgacctgagcatcgtgaacccagcccggaagggcctgtacgagggaaccggcagactgttcttcgagttttacagactgctgcacgacgcccggcctaaggaaggcgacgaccggcccttcttttggctgttcgagaatgtggtggccatgggagtcagcgacaagcgggatattagccggttcctggagagcaaccccgtgatgatcgatgccaaggaagtgagcgccgcccaccgggccagatacttctggggcaatctgcctggcatgaacagacccctggccagcaccgtgaacgacaagctggagctgcaggagtgcctggagcacggccggatcgccaagttcagcaaggtgagaaccatcaccacccgaagcaacagcatcaaacaaggcaaggaccagcactttcctgtgttcatgaacgagaaggaggacatcctgtggtgtaccgagatggagagagtgttcgggttcccagtccactacacagatgtcagcaacatgtctagactggccagacagagactgctgggaagaagctggtccgtccctgtgatcagacacctgttcgcccctctgaaggagtacttcgcctgcgtgagcagcggcaacagcaacgccaacagccggggccccagcttctctagcggcctggtgccactgtccctgagagggagccacatgggccccatggagatctacaaaaccgtgagcgcctggaagcggcagcctgtgcgcgtgctgagcctgtttcggaatatcgataaagtcctgaaaagcctgggattcctggagagcggctctggctccggcggtggcaccctgaagtacgtggaggatgtgacaaacgtggtcagacgggatgtggagaagtggggccccttcgatctggtgtacggcagcacccaacccctgggcagctcttgtgaccggtgccctggctggtacatgtttcagttccaccggatcctgcagtacgccctgccgagacaggagtcccagcggccattcttttggattttcatggacaacttgctgctgaccgaggatgaccaggaaactaccactcggttcctgcagaccgaagccgtgaccctgcaggacgtgagaggccgggactaccagaacgccatgcgggtgtggtccaacatccctggactgaaaagcaagcacgcacctctgacccctaaagaagaggagtacctgcaggcccaggtgcggagcagaagcaagctggacgcccctaaggtggatctgctggtgaagaattgcctcctgcccctgagagagtacttcaagtatttcagccagaatagtctgcccctgggcggcccaagcagcggcgcccctcctcccagcggcggcagcccagccggctccccaacctctaccgaggagggcacctctgagtccgccacccccgagagcggccctggcacctccaccgagcccagcgagggcagcgcacccggcagccctgccggcagccccacctccacagaggagggaaccagcaccgagcccagcgaaggcagcgccccaggcaccagcaccgagcctagtgagggcggctctggcggcggcagcgcccaggagattaaacggatcaacaagatcagaagaagacttgtgaaagacagcaacaccaagaaggccggcaagacaggccccatgaaaaccctgctggttagagtgatgacacccgatctgagagagcggctggaaaacctgagaaagaagcctgaaaatatcccccagcccatcagcaatacatctagagccaacctgaataagctgctgaccgattacaccgaaatgaagaaggcgatcctgcatgtgtactgggaagagttccagaaggaccctgtgggcctgatgagccgggtggcccagcctgccagcaagaagatcgatcagaacaagctgaaacctgagatggacgagaagggcaacctgaccaccgccggctttgcctgctctcagtgtggccagcccctgttcgtgtacaagctggagcaggtgtctgagaagggcaaggcttacaccaactacttcggacggtgcaatgtggccgagcacgaaaagctgatcctgctggcccagctgaagcccgagaaggatagcgacgaagccgtgacatatagcctgggaaagtttgggcagagggccctggatttctacagcattcatgtgaccaaggagtccacccaccccgtgaagcccctggcccagatcgccggaaacagatacgcctccggacctgtgggaaaggccctgagcgacgcatgtatgggcacaatcgcctccttcctgtctaagtaccaggacatcatcatcgaacaccagaaggtggtgaagggcaaccagaagagactggagagcctgcgggagctggccggcaaggaaaacctggaataccctagcgtgaccctgccacctcagcctcacaccaaggagggcgttgatgcctacaacgaagtgatcgcccgggtgcgaatgtgggtgaacctgaacctgtggcagaagctgaagctaagcagagatgatgccaagcctctgctgagactgaagggattcccttcctttcctctggtcgagagacaggccaacgaagtggactggtgggacatggtgtgtaacgtgaagaagctgatcaacgagaaaaaggaggatggcaaggtgttttggcagaatctggctggctacaagagacaggaagccctgagaccatacctgagcagcgaggaagatcggaagaagggaaagaaattcgctcggtaccagctgggcgacctgctgctgcacctggaaaagaagcacggcgaggactggggaaaggtgtacgacgaggcctgggagcggattgacaagaaagtggaaggcctgagcaagcacatcaagctggaagaggaacggagaagcgaggacgcccagagcaaggccgccctgaccgactggctgcgggctaaggccagcttcgtgatcgagggcctgaaggaggccgacaaggacgagttctgcagatgcgagctgaagctgcagaagtggtacggggacctgcggggaaagcccttcgccatcgaagccgagaacagcatcctggacatcagcggcttcagcaagcagtacaactgtgccttcatctggcagaaggacggcgtgaagaagctgaacctgtacctgatcatcaactacttcaagggcggcaagctgcggttcaagaagatcaaacctgaagccttcgaagccaacagattctacaccgtgatcaacaaaaagagcggcgagatcgtgcccatggaggtgaacttcaacttcgacgaccccaacctgatcatcctgcctctggcctttggcaagagacagggcagagaattcatctggaacgacctgctgtccctggaaaccggcagcctgaagctggccaacggaagagtgatcgagaagacactgtacaacagaagaacccggcaggatgagcctgccctgttcgtggccctgaccttcgagcggcgggaggtcctggactcctccaatatcaaaccaatgaacctgatcggcgtggcaagaggcgaaaacatccccgccgtgatcgccctgaccgaccccgagggctgcccactgagccggtttaaggatagcctgggaaacccaacccacatcctgagaatcggcgagagctataaggagaagcagcggaccatccaggccaagaaggaggtggagcagcggagagccggcggctacagccggaagtacgccagcaaagccaagaatctggcagacgatatggtgagaaacaccgctagagatctgctgtactacgccgtgacccaggatgccatgctgatcttcgccaacctgagccggggcttcggccggcagggcaagcggaccttcatggccgagagacagtacacacggatggaggactggctgaccgccaagctggcctacgagggcctgagcaagacctacctgtccaagacactggcccagtacacctccaagacatgcagcaactgtgggtttaccatcaccagcgccgactacgacagggtgctggagaagctgaagaagacagcaacaggctggatgaccacaattaacggcaaggagctgaaggtggagggccagattacctactacaacagatacaagagacagaacgtagtcaaggacctgtccgtcgagctggatagactgagcgaagaatctgtgaacaacgacatctcctcctggacaaagggcagaagcggagaagctctgagcctcctgaagaaaagattctcccatagacccgtgcaggagaagttcgtgtgcctgaactgcggcttcgagacacacgcagccgagcaagccgccctgaacatcgccagatcctggctgttcctgcggagccaggagtacaagaaataccagacaaacaagacaaccggcaacaccgataagagagccttcgtcgagacctggcagtccttttaccggaagaagcttaaggaggtgtggaaacctgccgtgcggtctggcggatctggcggaggctccacaagcttccaggagagcgtgaccttcgaggacgtggccgtgtacttcagcgagaacgagtggaccggcctggcccccgcccagagggtgctgtacagggacgtgatgctggagaactacggcgccgtggccagcctggccgccttccccttccccaagcccgccctgatcagccagctggagaggggcgaggccccctggtgcaaggccccccagggcgccctggacggcgagggccccaggggcgtgaccagccccaagaaaaagagaaaagtctaagctgccttctgcggggcttgccttctggccatgcccttcttctctcccttgcacctgtacctcttggtctttgaataaagcctgagtaggaaggctagcaaaaaaaaaaaaaaaaaaaaaaaaaaaaaaaaaaaaaaaaaaaaaaaaaaaaaaaaaaaaaaaaaaaaaaaaaaaaaaaa

SEQ ID NO: 3053 - RNA, 5419 nt, synthetic construct
  source 1..5419: mol_type = other RNA
aggaaataagagagaaaagaagagtaagaagaaatataagagccaccatggcccctaagaagaagcgtaaagtgagccgggtgaacggcagcggcagcggcggcggcatgaaccacgaccaggagttcgacccccctaaggtgtaccctcccgtccccgccgagaagagaaagcccatccgggtcctgagcctgttcgatggcatcgccaccggtctgctggtgctgaaggacctgggcatccaggtggataggtacattgcctccgaggtgtgcgaggactccatcaccgtgggaatggtgcgtcatcagggcaagatcatgtacgtgggcgacgtgcggagcgtgacacagaagcatatccaggagtggggccctttcgacctggtgatcggcggcagcccttgcaatgacctgagcatcgtgaacccagcccggaagggcctgtacgagggaaccggcagactgttcttcgagttttacagactgctgcacgacgcccggcctaaggaaggcgacgaccggcccttcttttggctgttcgagaatgtggtggccatgggagtcagcgacaagcgggatattagccggttcctggagagcaaccccgtgatgatcgatgccaaggaagtgagcgccgcccaccgggccagatacttctggggcaatctgcctggcatgaacagacccctggccagcaccgtgaacgacaagctggagctgcaggagtgcctggagcacggccggatcgccaagttcagcaaggtgagaaccatcaccacccgaagcaacagcatcaaacaaggcaaggaccagcactttcctgtgttcatgaacgagaaggaggacatcctgtggtgtaccgagatggagagagtgttcgggttcccagtccactacacagatgtcagcaacatgtctagactggccagacagagactgctgggaagaagctggtccgtccctgtgatcagacacctgttcgcccctctgaaggagtacttcgcctgcgtgagcagcggcaacagcaacgccaacagccggggccccagcttctctagcggcctggtgccactgtccctgagagggagccacatgggccccatggagatctacaaaaccgtgagcgcctggaagcggcagcctgtgcgcgtgctgagcctgtttcggaatatcgataaagtcctgaaaagcctgggattcctggagagcggctctggctccggcggtggcaccctgaagtacgtggaggatgtgacaaacgtggtcagacgggatgtggagaagtggggccccttcgatctggtgtacggcagcacccaacccctgggcagctcttgtgaccggtgccctggctggtacatgtttcagttccaccggatcctgcagtacgccctgccgagacaggagtcccagcggccattcttttggattttcatggacaacttgctgctgaccgaggatgaccaggaaactaccactcggttcctgcagaccgaagccgtgaccctgcaggacgtgagaggccgggactaccagaacgccatgcgggtgtggtccaacatccctggactgaaaagcaagcacgcacctctgacccctaaagaagaggagtacctgcaggcccaggtgcggagcagaagcaagctggacgcccctaaggtggatctgctggtgaagaattgcctcctgcccctgagagagtacttcaagtatttcagccagaatagtctgcccctgggcggcccaagcagcggcgcccctcctcccagcggcggcagcccagccggctccccaacctctaccgaggagggcacctctgagtccgccacccccgagagcggccctggcacctccaccgagcccagcgagggcagcgcacccggcagccctgccggcagccccacctccacagaggagggaaccagcaccgagcccagcgaaggcagcgccccaggcaccagcaccgagcctagtgagggcggctctggcggcggcagcgcccaggagattaaacggatcaacaagatcagaagaagacttgtgaaagacagcaacaccaagaaggccggcaagacaggccccatgaaaaccctgctggttagagtgatgacacccgatctgagagagcggctggaaaacctgagaaagaagcctgaaaatatcccccagcccatcagcaatacatctagagccaacctgaataagctgctgaccgattacaccgaaatgaagaaggcgatcctgcatgtgtactgggaagagttccagaaggaccctgtgggcctgatgagccgggtggcccagcctgccagcaagaagatcgatcagaacaagctgaaacctgagatggacgagaagggcaacctgaccaccgccggctttgcctgctctcagtgtggccagcccctgttcgtgtacaagctggagcaggtgtctgagaagggcaaggcttacaccaactacttcggacggtgcaatgtggccgagcacgaaaagctgatcctgctggcccagctgaagcccgagaaggatagcgacgaagccgtgacatatagcctgggaaagtttgggcagagggccctggatttctacagcattcatgtgaccaaggagtccacccaccccgtgaagcccctggcccagatcgccggaaacagatacgcctccggacctgtgggaaaggccctgagcgacgcatgtatgggcacaatcgcctccttcctgtctaagtaccaggacatcatcatcgaacaccagaaggtggtgaagggcaaccagaagagactggagagcctgcgggagctggccggcaaggaaaacctggaataccctagcgtgaccctgccacctcagcctcacaccaaggagggcgttgatgcctacaacgaagtgatcgcccgggtgcgaatgtgggtgaacctgaacctgtggcagaagctgaagctaagcagagatgatgccaagcctctgctgagactgaagggattcccttcctttcctctggtcgagagacaggccaacgaagtggactggtgggacatggtgtgtaacgtgaagaagctgatcaacgagaaaaaggaggatggcaaggtgttttggcagaatctggctggctacaagagacaggaagccctgagaccatacctgagcagcgaggaagatcggaagaagggaaagaaattcgctcggtaccagctgggcgacctgctgctgcacctggaaaagaagcacggcgaggactggggaaaggtgtacgacgaggcctgggagcggattgacaagaaagtggaaggcctgagcaagcacatcaagctggaagaggaacggagaagcgaggacgcccagagcaaggccgccctgaccgactggctgcgggctaaggccagcttcgtgatcgagggcctgaaggaggccgacaaggacgagttctgcagatgcgagctgaagctgcagaagtggtacggggacctgcggggaaagcccttcgccatcgaagccgagaacagcatcctggacatcagcggcttcagcaagcagtacaactgtgccttcatctggcagaaggacggcgtgaagaagctgaacctgtacctgatcatcaactacttcaagggcggcaagctgcggttcaagaagatcaaacctgaagccttcgaagccaacagattctacaccgtgatcaacaaaaagagcggcgagatcgtgcccatggaggtgaacttcaacttcgacgaccccaacctgatcatcctgcctctggcctttggcaagagacagggcagagaattcatctggaacgacctgctgtccctggaaaccggcagcctgaagctggccaacggaagagtgatcgagaagacactgtacaacagaagaacccggcaggatgagcctgccctgttcgtggccctgaccttcgagcggcgggaggtcctggactcctccaatatcaaaccaatgaacctgatcggcgtggcaagaggcgaaaacatccccgccgtgatcgccctgaccgaccccgagggctgcccactgagccggtttaaggatagcctgggaaacccaacccacatcctgagaatcggcgagagctataaggagaagcagcggaccatccaggccaagaaggaggtggagcagcggagagccggcggctacagccggaagtacgccagcaaagccaagaatctggcagacgatatggtgagaaacaccgctagagatctgctgtactacgccgtgacccaggatgccatgctgatcttcgccaacctgagccggggcttcggccggcagggcaagcggaccttcatggccgagagacagtacacacggatggaggactggctgaccgccaagctggcctacgagggcctgagcaagacctacctgtccaagacactggcccagtacacctccaagacatgcagcaactgtgggtttaccatcaccagcgccgactacgacagggtgctggagaagctgaagaagacagcaacaggctggatgaccacaattaacggcaaggagctgaaggtggagggccagattacctactacaacagatacaagagacagaacgtagtcaaggacctgtccgtcgagctggatagactgagcgaagaatctgtgaacaacgacatctcctcctggacaaagggcagaagcggagaagctctgagcctcctgaagaaaagattctcccatagacccgtgcaggagaagttcgtgtgcctgaactgcggcttcgagacacacgcagccgagcaagccgccctgaacatcgccagatcctggctgttcctgcggagccaggagtacaagaaataccagacaaacaagacaaccggcaacaccgataagagagccttcgtcgagacctggcagtccttttaccggaagaagcttaaggaggtgtggaaacctgccgtgcggtctggcggatctggcggaggctccacaagcagcaaggcccccgtgaccttcggcgacctggccatctacttcagccaggaggagtgggagtggctgagccccatccagaaggacctgtacgaggacgtgatgctggagaactaccagaacctggtgctgctgggcctggcctgcaggaggcccaacatcatcaccctgctggagaagggcaaggccccctgggtggtggagcccagcaggaggaggaggggccccgagagcggcagcaagtgcaccagccccaagaaaaagagaaaagtctaagctgccttctgcggggcttgccttctggccatgcccttcttctctcccttgcacctgtacctcttggtctttgaataaagcctgagtaggaaggctagcaaaaaaaaaaaaaaaaaaaaaaaaaaaaaaaaaaaaaaaaaaaaaaaaaaaaaaaaaaaaaaaaaaaaaaaaaaaaaaaa

SEQ ID NO: 3054 - RNA, 5419 nt, synthetic construct
  source 1..5419: mol_type = other RNA
aggaaataagagagaaaagaagagtaagaagaaatataagagccaccatggcccctaagaagaagcgtaaagtgagccgggtgaacggcagcggcagcggcggcggcatgaaccacgaccaggagttcgacccccctaaggtgtaccctcccgtccccgccgagaagagaaagcccatccgggtcctgagcctgttcgatggcatcgccaccggtctgctggtgctgaaggacctgggcatccaggtggataggtacattgcctccgaggtgtgcgaggactccatcaccgtgggaatggtgcgtcatcagggcaagatcatgtacgtgggcgacgtgcggagcgtgacacagaagcatatccaggagtggggccctttcgacctggtgatcggcggcagcccttgcaatgacctgagcatcgtgaacccagcccggaagggcctgtacgagggaaccggcagactgttcttcgagttttacagactgctgcacgacgcccggcctaaggaaggcgacgaccggcccttcttttggctgttcgagaatgtggtggccatgggagtcagcgacaagcgggatattagccggttcctggagagcaaccccgtgatgatcgatgccaaggaagtgagcgccgcccaccgggccagatacttctggggcaatctgcctggcatgaacagacccctggccagcaccgtgaacgacaagctggagctgcaggagtgcctggagcacggccggatcgccaagttcagcaaggtgagaaccatcaccacccgaagcaacagcatcaaacaaggcaaggaccagcactttcctgtgttcatgaacgagaaggaggacatcctgtggtgtaccgagatggagagagtgttcgggttcccagtccactacacagatgtcagcaacatgtctagactggccagacagagactgctgggaagaagctggtccgtccctgtgatcagacacctgttcgcccctctgaaggagtacttcgcctgcgtgagcagcggcaacagcaacgccaacagccggggccccagcttctctagcggcctggtgccactgtccctgagagggagccacatgggccccatggagatctacaaaaccgtgagcgcctggaagcggcagcctgtgcgcgtgctgagcctgtttcggaatatcgataaagtcctgaaaagcctgggattcctggagagcggctctggctccggcggtggcaccctgaagtacgtggaggatgtgacaaacgtggtcagacgggatgtggagaagtggggccccttcgatctggtgtacggcagcacccaacccctgggcagctcttgtgaccggtgccctggctggtacatgtttcagttccaccggatcctgcagtacgccctgccgagacaggagtcccagcggccattcttttggattttcatggacaacttgctgctgaccgaggatgaccaggaaactaccactcggttcctgcagaccgaagccgtgaccctgcaggacgtgagaggccgggactaccagaacgccatgcgggtgtggtccaacatccctggactgaaaagcaagcacgcacctctgacccctaaagaagaggagtacctgcaggcccaggtgcggagcagaagcaagctggacgcccctaaggtggatctgctggtgaagaattgcctcctgcccctgagagagtacttcaagtatttcagccagaatagtctgcccctgggcggcccaagcagcggcgcccctcctcccagcggcggcagcccagccggctccccaacctctaccgaggagggcacctctgagtccgccacccccgagagcggccctggcacctccaccgagcccagcgagggcagcgcacccggcagccctgccggcagccccacctccacagaggagggaaccagcaccgagcccagcgaaggcagcgccccaggcaccagcaccgagcctagtgagggcggctctggcggcggcagcgcccaggagattaaacggatcaacaagatcagaagaagacttgtgaaagacagcaacaccaagaaggccggcaagacaggccccatgaaaaccctgctggttagagtgatgacacccgatctgagagagcggctggaaaacctgagaaagaagcctgaaaatatcccccagcccatcagcaatacatctagagccaacctgaataagctgctgaccgattacaccgaaatgaagaaggcgatcctgcatgtgtactgggaagagttccagaaggaccctgtgggcctgatgagccgggtggcccagcctgccagcaagaagatcgatcagaacaagctgaaacctgagatggacgagaagggcaacctgaccaccgccggctttgcctgctctcagtgtggccagcccctgttcgtgtacaagctggagcaggtgtctgagaagggcaaggcttacaccaactacttcggacggtgcaatgtggccgagcacgaaaagctgatcctgctggcccagctgaagcccgagaaggatagcgacgaagccgtgacatatagcctgggaaagtttgggcagagggccctggatttctacagcattcatgtgaccaaggagtccacccaccccgtgaagcccctggcccagatcgccggaaacagatacgcctccggacctgtgggaaaggccctgagcgacgcatgtatgggcacaatcgcctccttcctgtctaagtaccaggacatcatcatcgaacaccagaaggtggtgaagggcaaccagaagagactggagagcctgcgggagctggccggcaaggaaaacctggaataccctagcgtgaccctgccacctcagcctcacaccaaggagggcgttgatgcctacaacgaagtgatcgcccgggtgcgaatgtgggtgaacctgaacctgtggcagaagctgaagctaagcagagatgatgccaagcctctgctgagactgaagggattcccttcctttcctctggtcgagagacaggccaacgaagtggactggtgggacatggtgtgtaacgtgaagaagctgatcaacgagaaaaaggaggatggcaaggtgttttggcagaatctggctggctacaagagacaggaagccctgagaccatacctgagcagcgaggaagatcggaagaagggaaagaaattcgctcggtaccagctgggcgacctgctgctgcacctggaaaagaagcacggcgaggactggggaaaggtgtacgacgaggcctgggagcggattgacaagaaagtggaaggcctgagcaagcacatcaagctggaagaggaacggagaagcgaggacgcccagagcaaggccgccctgaccgactggctgcgggctaaggccagcttcgtgatcgagggcctgaaggaggccgacaaggacgagttctgcagatgcgagctgaagctgcagaagtggtacggggacctgcggggaaagcccttcgccatcgaagccgagaacagcatcctggacatcagcggcttcagcaagcagtacaactgtgccttcatctggcagaaggacggcgtgaagaagctgaacctgtacctgatcatcaactacttcaagggcggcaagctgcggttcaagaagatcaaacctgaagccttcgaagccaacagattctacaccgtgatcaacaaaaagagcggcgagatcgtgcccatggaggtgaacttcaacttcgacgaccccaacctgatcatcctgcctctggcctttggcaagagacagggcagagaattcatctggaacgacctgctgtccctggaaaccggcagcctgaagctggccaacggaagagtgatcgagaagacactgtacaacagaagaacccggcaggatgagcctgccctgttcgtggccctgaccttcgagcggcgggaggtcctggactcctccaatatcaaaccaatgaacctgatcggcgtggcaagaggcgaaaacatccccgccgtgatcgccctgaccgaccccgagggctgcccactgagccggtttaaggatagcctgggaaacccaacccacatcctgagaatcggcgagagctataaggagaagcagcggaccatccaggccaagaaggaggtggagcagcggagagccggcggctacagccggaagtacgccagcaaagccaagaatctggcagacgatatggtgagaaacaccgctagagatctgctgtactacgccgtgacccaggatgccatgctgatcttcgccaacctgagccggggcttcggccggcagggcaagcggaccttcatggccgagagacagtacacacggatggaggactggctgaccgccaagctggcctacgagggcctgagcaagacctacctgtccaagacactggcccagtacacctccaagacatgcagcaactgtgggtttaccatcaccagcgccgactacgacagggtgctggagaagctgaagaagacagcaacaggctggatgaccacaattaacggcaaggagctgaaggtggagggccagattacctactacaacagatacaagagacagaacgtagtcaaggacctgtccgtcgagctggatagactgagcgaagaatctgtgaacaacgacatctcctcctggacaaagggcagaagcggagaagctctgagcctcctgaagaaaagattctcccatagacccgtgcaggagaagttcgtgtgcctgaactgcggcttcgagacacacgcagccgagcaagccgccctgaacatcgccagatcctggctgttcctgcggagccaggagtacaagaaataccagacaaacaagacaaccggcaacaccgataagagagccttcgtcgagacctggcagtccttttaccggaagaagcttaaggaggtgtggaaacctgccgtgcggtctggcggatctggcggaggctccacaagcagcaacaagctggtgagcttcgacgacgtggccgtggagttcagctgggaggagtggcaggagctggacatcagccagaggaccctgtacagggacgtgatgctggagacctacagcatgctggtgagcctgggccacaccggccccaagccccagctgatcgtgaagctggagcaggacgaggagagctacatgagggaggccagcgacaagaacttcagcgacgtgcagaagatgaagcacaccagccccaagaaaaagagaaaagtctaagctgccttctgcggggcttgccttctggccatgcccttcttctctcccttgcacctgtacctcttggtctttgaataaagcctgagtaggaaggctagcaaaaaaaaaaaaaaaaaaaaaaaaaaaaaaaaaaaaaaaaaaaaaaaaaaaaaaaaaaaaaaaaaaaaaaaaaaaaaaaa

SEQ ID NO: 3055 - RNA, 5419 nt, synthetic construct
  source 1..5419: mol_type = other RNA
aggaaataagagagaaaagaagagtaagaagaaatataagagccaccatggcccctaagaagaagcgtaaagtgagccgggtgaacggcagcggcagcggcggcggcatgaaccacgaccaggagttcgacccccctaaggtgtaccctcccgtccccgccgagaagagaaagcccatccgggtcctgagcctgttcgatggcatcgccaccggtctgctggtgctgaaggacctgggcatccaggtggataggtacattgcctccgaggtgtgcgaggactccatcaccgtgggaatggtgcgtcatcagggcaagatcatgtacgtgggcgacgtgcggagcgtgacacagaagcatatccaggagtggggccctttcgacctggtgatcggcggcagcccttgcaatgacctgagcatcgtgaacccagcccggaagggcctgtacgagggaaccggcagactgttcttcgagttttacagactgctgcacgacgcccggcctaaggaaggcgacgaccggcccttcttttggctgttcgagaatgtggtggccatgggagtcagcgacaagcgggatattagccggttcctggagagcaaccccgtgatgatcgatgccaaggaagtgagcgccgcccaccgggccagatacttctggggcaatctgcctggcatgaacagacccctggccagcaccgtgaacgacaagctggagctgcaggagtgcctggagcacggccggatcgccaagttcagcaaggtgagaaccatcaccacccgaagcaacagcatcaaacaaggcaaggaccagcactttcctgtgttcatgaacgagaaggaggacatcctgtggtgtaccgagatggagagagtgttcgggttcccagtccactacacagatgtcagcaacatgtctagactggccagacagagactgctgggaagaagctggtccgtccctgtgatcagacacctgttcgcccctctgaaggagtacttcgcctgcgtgagcagcggcaacagcaacgccaacagccggggccccagcttctctagcggcctggtgccactgtccctgagagggagccacatgggccccatggagatctacaaaaccgtgagcgcctggaagcggcagcctgtgcgcgtgctgagcctgtttcggaatatcgataaagtcctgaaaagcctgggattcctggagagcggctctggctccggcggtggcaccctgaagtacgtggaggatgtgacaaacgtggtcagacgggatgtggagaagtggggccccttcgatctggtgtacggcagcacccaacccctgggcagctcttgtgaccggtgccctggctggtacatgtttcagttccaccggatcctgcagtacgccctgccgagacaggagtcccagcggccattcttttggattttcatggacaacttgctgctgaccgaggatgaccaggaaactaccactcggttcctgcagaccgaagccgtgaccctgcaggacgtgagaggccgggactaccagaacgccatgcgggtgtggtccaacatccctggactgaaaagcaagcacgcacctctgacccctaaagaagaggagtacctgcaggcccaggtgcggagcagaagcaagctggacgcccctaaggtggatctgctggtgaagaattgcctcctgcccctgagagagtacttcaagtatttcagccagaatagtctgcccctgggcggcccaagcagcggcgcccctcctcccagcggcggcagcccagccggctccccaacctctaccgaggagggcacctctgagtccgccacccccgagagcggccctggcacctccaccgagcccagcgagggcagcgcacccggcagccctgccggcagccccacctccacagaggagggaaccagcaccgagcccagcgaaggcagcgccccaggcaccagcaccgagcctagtgagggcggctctggcggcggcagcgcccaggagattaaacggatcaacaagatcagaagaagacttgtgaaagacagcaacaccaagaaggccggcaagacaggccccatgaaaaccctgctggttagagtgatgacacccgatctgagagagcggctggaaaacctgagaaagaagcctgaaaatatcccccagcccatcagcaatacatctagagccaacctgaataagctgctgaccgattacaccgaaatgaagaaggcgatcctgcatgtgtactgggaagagttccagaaggaccctgtgggcctgatgagccgggtggcccagcctgccagcaagaagatcgatcagaacaagctgaaacctgagatggacgagaagggcaacctgaccaccgccggctttgcctgctctcagtgtggccagcccctgttcgtgtacaagctggagcaggtgtctgagaagggcaaggcttacaccaactacttcggacggtgcaatgtggccgagcacgaaaagctgatcctgctggcccagctgaagcccgagaaggatagcgacgaagccgtgacatatagcctgggaaagtttgggcagagggccctggatttctacagcattcatgtgaccaaggagtccacccaccccgtgaagcccctggcccagatcgccggaaacagatacgcctccggacctgtgggaaaggccctgagcgacgcatgtatgggcacaatcgcctccttcctgtctaagtaccaggacatcatcatcgaacaccagaaggtggtgaagggcaaccagaagagactggagagcctgcgggagctggccggcaaggaaaacctggaataccctagcgtgaccctgccacctcagcctcacaccaaggagggcgttgatgcctacaacgaagtgatcgcccgggtgcgaatgtgggtgaacctgaacctgtggcagaagctgaagctaagcagagatgatgccaagcctctgctgagactgaagggattcccttcctttcctctggtcgagagacaggccaacgaagtggactggtgggacatggtgtgtaacgtgaagaagctgatcaacgagaaaaaggaggatggcaaggtgttttggcagaatctggctggctacaagagacaggaagccctgagaccatacctgagcagcgaggaagatcggaagaagggaaagaaattcgctcggtaccagctgggcgacctgctgctgcacctggaaaagaagcacggcgaggactggggaaaggtgtacgacgaggcctgggagcggattgacaagaaagtggaaggcctgagcaagcacatcaagctggaagaggaacggagaagcgaggacgcccagagcaaggccgccctgaccgactggctgcgggctaaggccagcttcgtgatcgagggcctgaaggaggccgacaaggacgagttctgcagatgcgagctgaagctgcagaagtggtacggggacctgcggggaaagcccttcgccatcgaagccgagaacagcatcctggacatcagcggcttcagcaagcagtacaactgtgccttcatctggcagaaggacggcgtgaagaagctgaacctgtacctgatcatcaactacttcaagggcggcaagctgcggttcaagaagatcaaacctgaagccttcgaagccaacagattctacaccgtgatcaacaaaaagagcggcgagatcgtgcccatggaggtgaacttcaacttcgacgaccccaacctgatcatcctgcctctggcctttggcaagagacagggcagagaattcatctggaacgacctgctgtccctggaaaccggcagcctgaagctggccaacggaagagtgatcgagaagacactgtacaacagaagaacccggcaggatgagcctgccctgttcgtggccctgaccttcgagcggcgggaggtcctggactcctccaatatcaaaccaatgaacctgatcggcgtggcaagaggcgaaaacatccccgccgtgatcgccctgaccgaccccgagggctgcccactgagccggtttaaggatagcctgggaaacccaacccacatcctgagaatcggcgagagctataaggagaagcagcggaccatccaggccaagaaggaggtggagcagcggagagccggcggctacagccggaagtacgccagcaaagccaagaatctggcagacgatatggtgagaaacaccgctagagatctgctgtactacgccgtgacccaggatgccatgctgatcttcgccaacctgagccggggcttcggccggcagggcaagcggaccttcatggccgagagacagtacacacggatggaggactggctgaccgccaagctggcctacgagggcctgagcaagacctacctgtccaagacactggcccagtacacctccaagacatgcagcaactgtgggtttaccatcaccagcgccgactacgacagggtgctggagaagctgaagaagacagcaacaggctggatgaccacaattaacggcaaggagctgaaggtggagggccagattacctactacaacagatacaagagacagaacgtagtcaaggacctgtccgtcgagctggatagactgagcgaagaatctgtgaacaacgacatctcctcctggacaaagggcagaagcggagaagctctgagcctcctgaagaaaagattctcccatagacccgtgcaggagaagttcgtgtgcctgaactgcggcttcgagacacacgcagccgagcaagccgccctgaacatcgccagatcctggctgttcctgcggagccaggagtacaagaaataccagacaaacaagacaaccggcaacaccgataagagagccttcgtcgagacctggcagtccttttaccggaagaagcttaaggaggtgtggaaacctgccgtgcggtctggcggatctggcggaggctccacaagcatgaccaagttccaggaggccgtgaccttcaaggacgtggccgtggccttcaccgaggaggagctgggcctgctggacagcgcccagaggaagctgtacagggacgtgatgctggagaacttcaggaacctggtgagcgtgggccaccagagcttcaagcccgacatgatcagccagctggagagggaggagaagctgtggatgaaggagctgcagacccagaggggcaagcacagcggcttcaccagccccaagaaaaagagaaaagtctaagctgccttctgcggggcttgccttctggccatgcccttcttctctcccttgcacctgtacctcttggtctttgaataaagcctgagtaggaaggctagcaaaaaaaaaaaaaaaaaaaaaaaaaaaaaaaaaaaaaaaaaaaaaaaaaaaaaaaaaaaaaaaaaaaaaaaaaaaaaaaa

SEQ ID NO: 3056 - RNA, 5419 nt, synthetic construct
  source 1..5419: mol_type = other RNA
aggaaataagagagaaaagaagagtaagaagaaatataagagccaccatggcccctaagaagaagcgtaaagtgagccgggtgaacggcagcggcagcggcggcggcatgaaccacgaccaggagttcgacccccctaaggtgtaccctcccgtccccgccgagaagagaaagcccatccgggtcctgagcctgttcgatggcatcgccaccggtctgctggtgctgaaggacctgggcatccaggtggataggtacattgcctccgaggtgtgcgaggactccatcaccgtgggaatggtgcgtcatcagggcaagatcatgtacgtgggcgacgtgcggagcgtgacacagaagcatatccaggagtggggccctttcgacctggtgatcggcggcagcccttgcaatgacctgagcatcgtgaacccagcccggaagggcctgtacgagggaaccggcagactgttcttcgagttttacagactgctgcacgacgcccggcctaaggaaggcgacgaccggcccttcttttggctgttcgagaatgtggtggccatgggagtcagcgacaagcgggatattagccggttcctggagagcaaccccgtgatgatcgatgccaaggaagtgagcgccgcccaccgggccagatacttctggggcaatctgcctggcatgaacagacccctggccagcaccgtgaacgacaagctggagctgcaggagtgcctggagcacggccggatcgccaagttcagcaaggtgagaaccatcaccacccgaagcaacagcatcaaacaaggcaaggaccagcactttcctgtgttcatgaacgagaaggaggacatcctgtggtgtaccgagatggagagagtgttcgggttcccagtccactacacagatgtcagcaacatgtctagactggccagacagagactgctgggaagaagctggtccgtccctgtgatcagacacctgttcgcccctctgaaggagtacttcgcctgcgtgagcagcggcaacagcaacgccaacagccggggccccagcttctctagcggcctggtgccactgtccctgagagggagccacatgggccccatggagatctacaaaaccgtgagcgcctggaagcggcagcctgtgcgcgtgctgagcctgtttcggaatatcgataaagtcctgaaaagcctgggattcctggagagcggctctggctccggcggtggcaccctgaagtacgtggaggatgtgacaaacgtggtcagacgggatgtggagaagtggggccccttcgatctggtgtacggcagcacccaacccctgggcagctcttgtgaccggtgccctggctggtacatgtttcagttccaccggatcctgcagtacgccctgccgagacaggagtcccagcggccattcttttggattttcatggacaacttgctgctgaccgaggatgaccaggaaactaccactcggttcctgcagaccgaagccgtgaccctgcaggacgtgagaggccgggactaccagaacgccatgcgggtgtggtccaacatccctggactgaaaagcaagcacgcacctctgacccctaaagaagaggagtacctgcaggcccaggtgcggagcagaagcaagctggacgcccctaaggtggatctgctggtgaagaattgcctcctgcccctgagagagtacttcaagtatttcagccagaatagtctgcccctgggcggcccaagcagcggcgcccctcctcccagcggcggcagcccagccggctccccaacctctaccgaggagggcacctctgagtccgccacccccgagagcggccctggcacctccaccgagcccagcgagggcagcgcacccggcagccctgccggcagccccacctccacagaggagggaaccagcaccgagcccagcgaaggcagcgccccaggcaccagcaccgagcctagtgagggcggctctggcggcggcagcgcccaggagattaaacggatcaacaagatcagaagaagacttgtgaaagacagcaacaccaagaaggccggcaagacaggccccatgaaaaccctgctggttagagtgatgacacccgatctgagagagcggctggaaaacctgagaaagaagcctgaaaatatcccccagcccatcagcaatacatctagagccaacctgaataagctgctgaccgattacaccgaaatgaagaaggcgatcctgcatgtgtactgggaagagttccagaaggaccctgtgggcctgatgagccgggtggcccagcctgccagcaagaagatcgatcagaacaagctgaaacctgagatggacgagaagggcaacctgaccaccgccggctttgcctgctctcagtgtggccagcccctgttcgtgtacaagctggagcaggtgtctgagaagggcaaggcttacaccaactacttcggacggtgcaatgtggccgagcacgaaaagctgatcctgctggcccagctgaagcccgagaaggatagcgacgaagccgtgacatatagcctgggaaagtttgggcagagggccctggatttctacagcattcatgtgaccaaggagtccacccaccccgtgaagcccctggcccagatcgccggaaacagatacgcctccggacctgtgggaaaggccctgagcgacgcatgtatgggcacaatcgcctccttcctgtctaagtaccaggacatcatcatcgaacaccagaaggtggtgaagggcaaccagaagagactggagagcctgcgggagctggccggcaaggaaaacctggaataccctagcgtgaccctgccacctcagcctcacaccaaggagggcgttgatgcctacaacgaagtgatcgcccgggtgcgaatgtgggtgaacctgaacctgtggcagaagctgaagctaagcagagatgatgccaagcctctgctgagactgaagggattcccttcctttcctctggtcgagagacaggccaacgaagtggactggtgggacatggtgtgtaacgtgaagaagctgatcaacgagaaaaaggaggatggcaaggtgttttggcagaatctggctggctacaagagacaggaagccctgagaccatacctgagcagcgaggaagatcggaagaagggaaagaaattcgctcggtaccagctgggcgacctgctgctgcacctggaaaagaagcacggcgaggactggggaaaggtgtacgacgaggcctgggagcggattgacaagaaagtggaaggcctgagcaagcacatcaagctggaagaggaacggagaagcgaggacgcccagagcaaggccgccctgaccgactggctgcgggctaaggccagcttcgtgatcgagggcctgaaggaggccgacaaggacgagttctgcagatgcgagctgaagctgcagaagtggtacggggacctgcggggaaagcccttcgccatcgaagccgagaacagcatcctggacatcagcggcttcagcaagcagtacaactgtgccttcatctggcagaaggacggcgtgaagaagctgaacctgtacctgatcatcaactacttcaagggcggcaagctgcggttcaagaagatcaaacctgaagccttcgaagccaacagattctacaccgtgatcaacaaaaagagcggcgagatcgtgcccatggaggtgaacttcaacttcgacgaccccaacctgatcatcctgcctctggcctttggcaagagacagggcagagaattcatctggaacgacctgctgtccctggaaaccggcagcctgaagctggccaacggaagagtgatcgagaagacactgtacaacagaagaacccggcaggatgagcctgccctgttcgtggccctgaccttcgagcggcgggaggtcctggactcctccaatatcaaaccaatgaacctgatcggcgtggcaagaggcgaaaacatccccgccgtgatcgccctgaccgaccccgagggctgcccactgagccggtttaaggatagcctgggaaacccaacccacatcctgagaatcggcgagagctataaggagaagcagcggaccatccaggccaagaaggaggtggagcagcggagagccggcggctacagccggaagtacgccagcaaagccaagaatctggcagacgatatggtgagaaacaccgctagagatctgctgtactacgccgtgacccaggatgccatgctgatcttcgccaacctgagccggggcttcggccggcagggcaagcggaccttcatggccgagagacagtacacacggatggaggactggctgaccgccaagctggcctacgagggcctgagcaagacctacctgtccaagacactggcccagtacacctccaagacatgcagcaactgtgggtttaccatcaccagcgccgactacgacagggtgctggagaagctgaagaagacagcaacaggctggatgaccacaattaacggcaaggagctgaaggtggagggccagattacctactacaacagatacaagagacagaacgtagtcaaggacctgtccgtcgagctggatagactgagcgaagaatctgtgaacaacgacatctcctcctggacaaagggcagaagcggagaagctctgagcctcctgaagaaaagattctcccatagacccgtgcaggagaagttcgtgtgcctgaactgcggcttcgagacacacgcagccgagcaagccgccctgaacatcgccagatcctggctgttcctgcggagccaggagtacaagaaataccagacaaacaagacaaccggcaacaccgataagagagccttcgtcgagacctggcagtccttttaccggaagaagcttaaggaggtgtggaaacctgccgtgcggtctggcggatctggcggaggctccacaagcttccagggcagcctgagcatcgaggacgtgaccgtgggcttcacccaggaggagtggcagcacctggaccccgcccagaggaccctgtacagggacgtgatgctggagaactacagccacctggtgagcgtgggctactgcatccccaagcccgaggtgatcttcaagctggagaggggcgagcagctgtggatcctggaggaggagagcagcagccagagccaccccgaggtgtgcaaggtgaccagccccaagaaaaagagaaaagtctaagctgccttctgcggggcttgccttctggccatgcccttcttctctcccttgcacctgtacctcttggtctttgaataaagcctgagtaggaaggctagcaaaaaaaaaaaaaaaaaaaaaaaaaaaaaaaaaaaaaaaaaaaaaaaaaaaaaaaaaaaaaaaaaaaaaaaaaaaaaaaa

SEQ ID NO: 3057 - RNA, 5419 nt, synthetic construct
  source 1..5419: mol_type = other RNA
aggaaataagagagaaaagaagagtaagaagaaatataagagccaccatggcccctaagaagaagcgtaaagtgagccgggtgaacggcagcggcagcggcggcggcatgaaccacgaccaggagttcgacccccctaaggtgtaccctcccgtccccgccgagaagagaaagcccatccgggtcctgagcctgttcgatggcatcgccaccggtctgctggtgctgaaggacctgggcatccaggtggataggtacattgcctccgaggtgtgcgaggactccatcaccgtgggaatggtgcgtcatcagggcaagatcatgtacgtgggcgacgtgcggagcgtgacacagaagcatatccaggagtggggccctttcgacctggtgatcggcggcagcccttgcaatgacctgagcatcgtgaacccagcccggaagggcctgtacgagggaaccggcagactgttcttcgagttttacagactgctgcacgacgcccggcctaaggaaggcgacgaccggcccttcttttggctgttcgagaatgtggtggccatgggagtcagcgacaagcgggatattagccggttcctggagagcaaccccgtgatgatcgatgccaaggaagtgagcgccgcccaccgggccagatacttctggggcaatctgcctggcatgaacagacccctggccagcaccgtgaacgacaagctggagctgcaggagtgcctggagcacggccggatcgccaagttcagcaaggtgagaaccatcaccacccgaagcaacagcatcaaacaaggcaaggaccagcactttcctgtgttcatgaacgagaaggaggacatcctgtggtgtaccgagatggagagagtgttcgggttcccagtccactacacagatgtcagcaacatgtctagactggccagacagagactgctgggaagaagctggtccgtccctgtgatcagacacctgttcgcccctctgaaggagtacttcgcctgcgtgagcagcggcaacagcaacgccaacagccggggccccagcttctctagcggcctggtgccactgtccctgagagggagccacatgggccccatggagatctacaaaaccgtgagcgcctggaagcggcagcctgtgcgcgtgctgagcctgtttcggaatatcgataaagtcctgaaaagcctgggattcctggagagcggctctggctccggcggtggcaccctgaagtacgtggaggatgtgacaaacgtggtcagacgggatgtggagaagtggggccccttcgatctggtgtacggcagcacccaacccctgggcagctcttgtgaccggtgccctggctggtacatgtttcagttccaccggatcctgcagtacgccctgccgagacaggagtcccagcggccattcttttggattttcatggacaacttgctgctgaccgaggatgaccaggaaactaccactcggttcctgcagaccgaagccgtgaccctgcaggacgtgagaggccgggactaccagaacgccatgcgggtgtggtccaacatccctggactgaaaagcaagcacgcacctctgacccctaaagaagaggagtacctgcaggcccaggtgcggagcagaagcaagctggacgcccctaaggtggatctgctggtgaagaattgcctcctgcccctgagagagtacttcaagtatttcagccagaatagtctgcccctgggcggcccaagcagcggcgcccctcctcccagcggcggcagcccagccggctccccaacctctaccgaggagggcacctctgagtccgccacccccgagagcggccctggcacctccaccgagcccagcgagggcagcgcacccggcagccctgccggcagccccacctccacagaggagggaaccagcaccgagcccagcgaaggcagcgccccaggcaccagcaccgagcctagtgagggcggctctggcggcggcagcgcccaggagattaaacggatcaacaagatcagaagaagacttgtgaaagacagcaacaccaagaaggccggcaagacaggccccatgaaaaccctgctggttagagtgatgacacccgatctgagagagcggctggaaaacctgagaaagaagcctgaaaatatcccccagcccatcagcaatacatctagagccaacctgaataagctgctgaccgattacaccgaaatgaagaaggcgatcctgcatgtgtactgggaagagttccagaaggaccctgtgggcctgatgagccgggtggcccagcctgccagcaagaagatcgatcagaacaagctgaaacctgagatggacgagaagggcaacctgaccaccgccggctttgcctgctctcagtgtggccagcccctgttcgtgtacaagctggagcaggtgtctgagaagggcaaggcttacaccaactacttcggacggtgcaatgtggccgagcacgaaaagctgatcctgctggcccagctgaagcccgagaaggatagcgacgaagccgtgacatatagcctgggaaagtttgggcagagggccctggatttctacagcattcatgtgaccaaggagtccacccaccccgtgaagcccctggcccagatcgccggaaacagatacgcctccggacctgtgggaaaggccctgagcgacgcatgtatgggcacaatcgcctccttcctgtctaagtaccaggacatcatcatcgaacaccagaaggtggtgaagggcaaccagaagagactggagagcctgcgggagctggccggcaaggaaaacctggaataccctagcgtgaccctgccacctcagcctcacaccaaggagggcgttgatgcctacaacgaagtgatcgcccgggtgcgaatgtgggtgaacctgaacctgtggcagaagctgaagctaagcagagatgatgccaagcctctgctgagactgaagggattcccttcctttcctctggtcgagagacaggccaacgaagtggactggtgggacatggtgtgtaacgtgaagaagctgatcaacgagaaaaaggaggatggcaaggtgttttggcagaatctggctggctacaagagacaggaagccctgagaccatacctgagcagcgaggaagatcggaagaagggaaagaaattcgctcggtaccagctgggcgacctgctgctgcacctggaaaagaagcacggcgaggactggggaaaggtgtacgacgaggcctgggagcggattgacaagaaagtggaaggcctgagcaagcacatcaagctggaagaggaacggagaagcgaggacgcccagagcaaggccgccctgaccgactggctgcgggctaaggccagcttcgtgatcgagggcctgaaggaggccgacaaggacgagttctgcagatgcgagctgaagctgcagaagtggtacggggacctgcggggaaagcccttcgccatcgaagccgagaacagcatcctggacatcagcggcttcagcaagcagtacaactgtgccttcatctggcagaaggacggcgtgaagaagctgaacctgtacctgatcatcaactacttcaagggcggcaagctgcggttcaagaagatcaaacctgaagccttcgaagccaacagattctacaccgtgatcaacaaaaagagcggcgagatcgtgcccatggaggtgaacttcaacttcgacgaccccaacctgatcatcctgcctctggcctttggcaagagacagggcagagaattcatctggaacgacctgctgtccctggaaaccggcagcctgaagctggccaacggaagagtgatcgagaagacactgtacaacagaagaacccggcaggatgagcctgccctgttcgtggccctgaccttcgagcggcgggaggtcctggactcctccaatatcaaaccaatgaacctgatcggcgtggcaagaggcgaaaacatccccgccgtgatcgccctgaccgaccccgagggctgcccactgagccggtttaaggatagcctgggaaacccaacccacatcctgagaatcggcgagagctataaggagaagcagcggaccatccaggccaagaaggaggtggagcagcggagagccggcggctacagccggaagtacgccagcaaagccaagaatctggcagacgatatggtgagaaacaccgctagagatctgctgtactacgccgtgacccaggatgccatgctgatcttcgccaacctgagccggggcttcggccggcagggcaagcggaccttcatggccgagagacagtacacacggatggaggactggctgaccgccaagctggcctacgagggcctgagcaagacctacctgtccaagacactggcccagtacacctccaagacatgcagcaactgtgggtttaccatcaccagcgccgactacgacagggtgctggagaagctgaagaagacagcaacaggctggatgaccacaattaacggcaaggagctgaaggtggagggccagattacctactacaacagatacaagagacagaacgtagtcaaggacctgtccgtcgagctggatagactgagcgaagaatctgtgaacaacgacatctcctcctggacaaagggcagaagcggagaagctctgagcctcctgaagaaaagattctcccatagacccgtgcaggagaagttcgtgtgcctgaactgcggcttcgagacacacgcagccgagcaagccgccctgaacatcgccagatcctggctgttcctgcggagccaggagtacaagaaataccagacaaacaagacaaccggcaacaccgataagagagccttcgtcgagacctggcagtccttttaccggaagaagcttaaggaggtgtggaaacctgccgtgcggtctggcggatctggcggaggctccacaagcagccagggcagcatcaccttcaaggacgtggccgtggacttcacccaggaggagtggtgcctgctggaccacagccagaaggccctgcacctggaggtgatgctggagaacgtgcagaacctgctgagcgtgggcctgcccgtgcccagggagaacttcatcagctgcttccagcagggcaaggccccctacctgctgcagcagaacgaccccaagagcagcagccccgaggccgagaccaacaccagccccaagaaaaagagaaaagtctaagctgccttctgcggggcttgccttctggccatgcccttcttctctcccttgcacctgtacctcttggtctttgaataaagcctgagtaggaaggctagcaaaaaaaaaaaaaaaaaaaaaaaaaaaaaaaaaaaaaaaaaaaaaaaaaaaaaaaaaaaaaaaaaaaaaaaaaaaaaaaa

SEQ ID NO: 3058 - RNA, 5419 nt, synthetic construct
  source 1..5419: mol_type = other RNA
aggaaataagagagaaaagaagagtaagaagaaatataagagccaccatggcccctaagaagaagcgtaaagtgagccgggtgaacggcagcggcagcggcggcggcatgaaccacgaccaggagttcgacccccctaaggtgtaccctcccgtccccgccgagaagagaaagcccatccgggtcctgagcctgttcgatggcatcgccaccggtctgctggtgctgaaggacctgggcatccaggtggataggtacattgcctccgaggtgtgcgaggactccatcaccgtgggaatggtgcgtcatcagggcaagatcatgtacgtgggcgacgtgcggagcgtgacacagaagcatatccaggagtggggccctttcgacctggtgatcggcggcagcccttgcaatgacctgagcatcgtgaacccagcccggaagggcctgtacgagggaaccggcagactgttcttcgagttttacagactgctgcacgacgcccggcctaaggaaggcgacgaccggcccttcttttggctgttcgagaatgtggtggccatgggagtcagcgacaagcgggatattagccggttcctggagagcaaccccgtgatgatcgatgccaaggaagtgagcgccgcccaccgggccagatacttctggggcaatctgcctggcatgaacagacccctggccagcaccgtgaacgacaagctggagctgcaggagtgcctggagcacggccggatcgccaagttcagcaaggtgagaaccatcaccacccgaagcaacagcatcaaacaaggcaaggaccagcactttcctgtgttcatgaacgagaaggaggacatcctgtggtgtaccgagatggagagagtgttcgggttcccagtccactacacagatgtcagcaacatgtctagactggccagacagagactgctgggaagaagctggtccgtccctgtgatcagacacctgttcgcccctctgaaggagtacttcgcctgcgtgagcagcggcaacagcaacgccaacagccggggccccagcttctctagcggcctggtgccactgtccctgagagggagccacatgggccccatggagatctacaaaaccgtgagcgcctggaagcggcagcctgtgcgcgtgctgagcctgtttcggaatatcgataaagtcctgaaaagcctgggattcctggagagcggctctggctccggcggtggcaccctgaagtacgtggaggatgtgacaaacgtggtcagacgggatgtggagaagtggggccccttcgatctggtgtacggcagcacccaacccctgggcagctcttgtgaccggtgccctggctggtacatgtttcagttccaccggatcctgcagtacgccctgccgagacaggagtcccagcggccattcttttggattttcatggacaacttgctgctgaccgaggatgaccaggaaactaccactcggttcctgcagaccgaagccgtgaccctgcaggacgtgagaggccgggactaccagaacgccatgcgggtgtggtccaacatccctggactgaaaagcaagcacgcacctctgacccctaaagaagaggagtacctgcaggcccaggtgcggagcagaagcaagctggacgcccctaaggtggatctgctggtgaagaattgcctcctgcccctgagagagtacttcaagtatttcagccagaatagtctgcccctgggcggcccaagcagcggcgcccctcctcccagcggcggcagcccagccggctccccaacctctaccgaggagggcacctctgagtccgccacccccgagagcggccctggcacctccaccgagcccagcgagggcagcgcacccggcagccctgccggcagccccacctccacagaggagggaaccagcaccgagcccagcgaaggcagcgccccaggcaccagcaccgagcctagtgagggcggctctggcggcggcagcgcccaggagattaaacggatcaacaagatcagaagaagacttgtgaaagacagcaacaccaagaaggccggcaagacaggccccatgaaaaccctgctggttagagtgatgacacccgatctgagagagcggctggaaaacctgagaaagaagcctgaaaatatcccccagcccatcagcaatacatctagagccaacctgaataagctgctgaccgattacaccgaaatgaagaaggcgatcctgcatgtgtactgggaagagttccagaaggaccctgtgggcctgatgagccgggtggcccagcctgccagcaagaagatcgatcagaacaagctgaaacctgagatggacgagaagggcaacctgaccaccgccggctttgcctgctctcagtgtggccagcccctgttcgtgtacaagctggagcaggtgtctgagaagggcaaggcttacaccaactacttcggacggtgcaatgtggccgagcacgaaaagctgatcctgctggcccagctgaagcccgagaaggatagcgacgaagccgtgacatatagcctgggaaagtttgggcagagggccctggatttctacagcattcatgtgaccaaggagtccacccaccccgtgaagcccctggcccagatcgccggaaacagatacgcctccggacctgtgggaaaggccctgagcgacgcatgtatgggcacaatcgcctccttcctgtctaagtaccaggacatcatcatcgaacaccagaaggtggtgaagggcaaccagaagagactggagagcctgcgggagctggccggcaaggaaaacctggaataccctagcgtgaccctgccacctcagcctcacaccaaggagggcgttgatgcctacaacgaagtgatcgcccgggtgcgaatgtgggtgaacctgaacctgtggcagaagctgaagctaagcagagatgatgccaagcctctgctgagactgaagggattcccttcctttcctctggtcgagagacaggccaacgaagtggactggtgggacatggtgtgtaacgtgaagaagctgatcaacgagaaaaaggaggatggcaaggtgttttggcagaatctggctggctacaagagacaggaagccctgagaccatacctgagcagcgaggaagatcggaagaagggaaagaaattcgctcggtaccagctgggcgacctgctgctgcacctggaaaagaagcacggcgaggactggggaaaggtgtacgacgaggcctgggagcggattgacaagaaagtggaaggcctgagcaagcacatcaagctggaagaggaacggagaagcgaggacgcccagagcaaggccgccctgaccgactggctgcgggctaaggccagcttcgtgatcgagggcctgaaggaggccgacaaggacgagttctgcagatgcgagctgaagctgcagaagtggtacggggacctgcggggaaagcccttcgccatcgaagccgagaacagcatcctggacatcagcggcttcagcaagcagtacaactgtgccttcatctggcagaaggacggcgtgaagaagctgaacctgtacctgatcatcaactacttcaagggcggcaagctgcggttcaagaagatcaaacctgaagccttcgaagccaacagattctacaccgtgatcaacaaaaagagcggcgagatcgtgcccatggaggtgaacttcaacttcgacgaccccaacctgatcatcctgcctctggcctttggcaagagacagggcagagaattcatctggaacgacctgctgtccctggaaaccggcagcctgaagctggccaacggaagagtgatcgagaagacactgtacaacagaagaacccggcaggatgagcctgccctgttcgtggccctgaccttcgagcggcgggaggtcctggactcctccaatatcaaaccaatgaacctgatcggcgtggcaagaggcgaaaacatccccgccgtgatcgccctgaccgaccccgagggctgcccactgagccggtttaaggatagcctgggaaacccaacccacatcctgagaatcggcgagagctataaggagaagcagcggaccatccaggccaagaaggaggtggagcagcggagagccggcggctacagccggaagtacgccagcaaagccaagaatctggcagacgatatggtgagaaacaccgctagagatctgctgtactacgccgtgacccaggatgccatgctgatcttcgccaacctgagccggggcttcggccggcagggcaagcggaccttcatggccgagagacagtacacacggatggaggactggctgaccgccaagctggcctacgagggcctgagcaagacctacctgtccaagacactggcccagtacacctccaagacatgcagcaactgtgggtttaccatcaccagcgccgactacgacagggtgctggagaagctgaagaagacagcaacaggctggatgaccacaattaacggcaaggagctgaaggtggagggccagattacctactacaacagatacaagagacagaacgtagtcaaggacctgtccgtcgagctggatagactgagcgaagaatctgtgaacaacgacatctcctcctggacaaagggcagaagcggagaagctctgagcctcctgaagaaaagattctcccatagacccgtgcaggagaagttcgtgtgcctgaactgcggcttcgagacacacgcagccgagcaagccgccctgaacatcgccagatcctggctgttcctgcggagccaggagtacaagaaataccagacaaacaagacaaccggcaacaccgataagagagccttcgtcgagacctggcagtccttttaccggaagaagcttaaggaggtgtggaaacctgccgtgcggtctggcggatctggcggaggctccacaagcgcccaggagagcgtgaccttcagggacgtggccgtggtgttcagcagggacgagtggctgtgcctggaccccgcccagaggagcctgtacagggaggtgatgctggagaactacggcaccctggtgagcctgggcatcctgttcagcaagcccaaggtgatcttccagctgcagcagggcgaggacccctggatggtggagagcggcgtgagccagggcccctgcgtgggctgggagagcatgaccagccccaagaaaaagagaaaagtctaagctgccttctgcggggcttgccttctggccatgcccttcttctctcccttgcacctgtacctcttggtctttgaataaagcctgagtaggaaggctagcaaaaaaaaaaaaaaaaaaaaaaaaaaaaaaaaaaaaaaaaaaaaaaaaaaaaaaaaaaaaaaaaaaaaaaaaaaaaaaaa

SEQ ID NO: 3059 - RNA, 5419 nt, synthetic construct
  source 1..5419: mol_type = other RNA
aggaaataagagagaaaagaagagtaagaagaaatataagagccaccatggcccctaagaagaagcgtaaagtgagccgggtgaacggcagcggcagcggcggcggcatgaaccacgaccaggagttcgacccccctaaggtgtaccctcccgtccccgccgagaagagaaagcccatccgggtcctgagcctgttcgatggcatcgccaccggtctgctggtgctgaaggacctgggcatccaggtggataggtacattgcctccgaggtgtgcgaggactccatcaccgtgggaatggtgcgtcatcagggcaagatcatgtacgtgggcgacgtgcggagcgtgacacagaagcatatccaggagtggggccctttcgacctggtgatcggcggcagcccttgcaatgacctgagcatcgtgaacccagcccggaagggcctgtacgagggaaccggcagactgttcttcgagttttacagactgctgcacgacgcccggcctaaggaaggcgacgaccggcccttcttttggctgttcgagaatgtggtggccatgggagtcagcgacaagcgggatattagccggttcctggagagcaaccccgtgatgatcgatgccaaggaagtgagcgccgcccaccgggccagatacttctggggcaatctgcctggcatgaacagacccctggccagcaccgtgaacgacaagctggagctgcaggagtgcctggagcacggccggatcgccaagttcagcaaggtgagaaccatcaccacccgaagcaacagcatcaaacaaggcaaggaccagcactttcctgtgttcatgaacgagaaggaggacatcctgtggtgtaccgagatggagagagtgttcgggttcccagtccactacacagatgtcagcaacatgtctagactggccagacagagactgctgggaagaagctggtccgtccctgtgatcagacacctgttcgcccctctgaaggagtacttcgcctgcgtgagcagcggcaacagcaacgccaacagccggggccccagcttctctagcggcctggtgccactgtccctgagagggagccacatgggccccatggagatctacaaaaccgtgagcgcctggaagcggcagcctgtgcgcgtgctgagcctgtttcggaatatcgataaagtcctgaaaagcctgggattcctggagagcggctctggctccggcggtggcaccctgaagtacgtggaggatgtgacaaacgtggtcagacgggatgtggagaagtggggccccttcgatctggtgtacggcagcacccaacccctgggcagctcttgtgaccggtgccctggctggtacatgtttcagttccaccggatcctgcagtacgccctgccgagacaggagtcccagcggccattcttttggattttcatggacaacttgctgctgaccgaggatgaccaggaaactaccactcggttcctgcagaccgaagccgtgaccctgcaggacgtgagaggccgggactaccagaacgccatgcgggtgtggtccaacatccctggactgaaaagcaagcacgcacctctgacccctaaagaagaggagtacctgcaggcccaggtgcggagcagaagcaagctggacgcccctaaggtggatctgctggtgaagaattgcctcctgcccctgagagagtacttcaagtatttcagccagaatagtctgcccctgggcggcccaagcagcggcgcccctcctcccagcggcggcagcccagccggctccccaacctctaccgaggagggcacctctgagtccgccacccccgagagcggccctggcacctccaccgagcccagcgagggcagcgcacccggcagccctgccggcagccccacctccacagaggagggaaccagcaccgagcccagcgaaggcagcgccccaggcaccagcaccgagcctagtgagggcggctctggcggcggcagcgcccaggagattaaacggatcaacaagatcagaagaagacttgtgaaagacagcaacaccaagaaggccggcaagacaggccccatgaaaaccctgctggttagagtgatgacacccgatctgagagagcggctggaaaacctgagaaagaagcctgaaaatatcccccagcccatcagcaatacatctagagccaacctgaataagctgctgaccgattacaccgaaatgaagaaggcgatcctgcatgtgtactgggaagagttccagaaggaccctgtgggcctgatgagccgggtggcccagcctgccagcaagaagatcgatcagaacaagctgaaacctgagatggacgagaagggcaacctgaccaccgccggctttgcctgctctcagtgtggccagcccctgttcgtgtacaagctggagcaggtgtctgagaagggcaaggcttacaccaactacttcggacggtgcaatgtggccgagcacgaaaagctgatcctgctggcccagctgaagcccgagaaggatagcgacgaagccgtgacatatagcctgggaaagtttgggcagagggccctggatttctacagcattcatgtgaccaaggagtccacccaccccgtgaagcccctggcccagatcgccggaaacagatacgcctccggacctgtgggaaaggccctgagcgacgcatgtatgggcacaatcgcctccttcctgtctaagtaccaggacatcatcatcgaacaccagaaggtggtgaagggcaaccagaagagactggagagcctgcgggagctggccggcaaggaaaacctggaataccctagcgtgaccctgccacctcagcctcacaccaaggagggcgttgatgcctacaacgaagtgatcgcccgggtgcgaatgtgggtgaacctgaacctgtggcagaagctgaagctaagcagagatgatgccaagcctctgctgagactgaagggattcccttcctttcctctggtcgagagacaggccaacgaagtggactggtgggacatggtgtgtaacgtgaagaagctgatcaacgagaaaaaggaggatggcaaggtgttttggcagaatctggctggctacaagagacaggaagccctgagaccatacctgagcagcgaggaagatcggaagaagggaaagaaattcgctcggtaccagctgggcgacctgctgctgcacctggaaaagaagcacggcgaggactggggaaaggtgtacgacgaggcctgggagcggattgacaagaaagtggaaggcctgagcaagcacatcaagctggaagaggaacggagaagcgaggacgcccagagcaaggccgccctgaccgactggctgcgggctaaggccagcttcgtgatcgagggcctgaaggaggccgacaaggacgagttctgcagatgcgagctgaagctgcagaagtggtacggggacctgcggggaaagcccttcgccatcgaagccgagaacagcatcctggacatcagcggcttcagcaagcagtacaactgtgccttcatctggcagaaggacggcgtgaagaagctgaacctgtacctgatcatcaactacttcaagggcggcaagctgcggttcaagaagatcaaacctgaagccttcgaagccaacagattctacaccgtgatcaacaaaaagagcggcgagatcgtgcccatggaggtgaacttcaacttcgacgaccccaacctgatcatcctgcctctggcctttggcaagagacagggcagagaattcatctggaacgacctgctgtccctggaaaccggcagcctgaagctggccaacggaagagtgatcgagaagacactgtacaacagaagaacccggcaggatgagcctgccctgttcgtggccctgaccttcgagcggcgggaggtcctggactcctccaatatcaaaccaatgaacctgatcggcgtggcaagaggcgaaaacatccccgccgtgatcgccctgaccgaccccgagggctgcccactgagccggtttaaggatagcctgggaaacccaacccacatcctgagaatcggcgagagctataaggagaagcagcggaccatccaggccaagaaggaggtggagcagcggagagccggcggctacagccggaagtacgccagcaaagccaagaatctggcagacgatatggtgagaaacaccgctagagatctgctgtactacgccgtgacccaggatgccatgctgatcttcgccaacctgagccggggcttcggccggcagggcaagcggaccttcatggccgagagacagtacacacggatggaggactggctgaccgccaagctggcctacgagggcctgagcaagacctacctgtccaagacactggcccagtacacctccaagacatgcagcaactgtgggtttaccatcaccagcgccgactacgacagggtgctggagaagctgaagaagacagcaacaggctggatgaccacaattaacggcaaggagctgaaggtggagggccagattacctactacaacagatacaagagacagaacgtagtcaaggacctgtccgtcgagctggatagactgagcgaagaatctgtgaacaacgacatctcctcctggacaaagggcagaagcggagaagctctgagcctcctgaagaaaagattctcccatagacccgtgcaggagaagttcgtgtgcctgaactgcggcttcgagacacacgcagccgagcaagccgccctgaacatcgccagatcctggctgttcctgcggagccaggagtacaagaaataccagacaaacaagacaaccggcaacaccgataagagagccttcgtcgagacctggcagtccttttaccggaagaagcttaaggaggtgtggaaacctgccgtgcggtctggcggatctggcggaggctccacaagcatgagggtgctgaccttcagggacgtggccgtggagttcagccccgaggagtgggagtgcctggacagcgcccagcagcacctgtacagggacgtgatgctggagaactacggcaacctgttcagcctgggcctggccatcttcaagcccgacctgatcacctacctggagcagaggaaggagccctggaacgccaggaggcagaagaccgtggccaagcaccccgccggcagcctgcacttcaccagccccaagaaaaagagaaaagtctaagctgccttctgcggggcttgccttctggccatgcccttcttctctcccttgcacctgtacctcttggtctttgaataaagcctgagtaggaaggctagcaaaaaaaaaaaaaaaaaaaaaaaaaaaaaaaaaaaaaaaaaaaaaaaaaaaaaaaaaaaaaaaaaaaaaaaaaaaaaaaa

SEQ ID NO: 3060 - RNA, 5419 nt, synthetic construct
  source 1..5419: mol_type = other RNA
aggaaataagagagaaaagaagagtaagaagaaatataagagccaccatggcccctaagaagaagcgtaaagtgagccgggtgaacggcagcggcagcggcggcggcatgaaccacgaccaggagttcgacccccctaaggtgtaccctcccgtccccgccgagaagagaaagcccatccgggtcctgagcctgttcgatggcatcgccaccggtctgctggtgctgaaggacctgggcatccaggtggataggtacattgcctccgaggtgtgcgaggactccatcaccgtgggaatggtgcgtcatcagggcaagatcatgtacgtgggcgacgtgcggagcgtgacacagaagcatatccaggagtggggccctttcgacctggtgatcggcggcagcccttgcaatgacctgagcatcgtgaacccagcccggaagggcctgtacgagggaaccggcagactgttcttcgagttttacagactgctgcacgacgcccggcctaaggaaggcgacgaccggcccttcttttggctgttcgagaatgtggtggccatgggagtcagcgacaagcgggatattagccggttcctggagagcaaccccgtgatgatcgatgccaaggaagtgagcgccgcccaccgggccagatacttctggggcaatctgcctggcatgaacagacccctggccagcaccgtgaacgacaagctggagctgcaggagtgcctggagcacggccggatcgccaagttcagcaaggtgagaaccatcaccacccgaagcaacagcatcaaacaaggcaaggaccagcactttcctgtgttcatgaacgagaaggaggacatcctgtggtgtaccgagatggagagagtgttcgggttcccagtccactacacagatgtcagcaacatgtctagactggccagacagagactgctgggaagaagctggtccgtccctgtgatcagacacctgttcgcccctctgaaggagtacttcgcctgcgtgagcagcggcaacagcaacgccaacagccggggccccagcttctctagcggcctggtgccactgtccctgagagggagccacatgggccccatggagatctacaaaaccgtgagcgcctggaagcggcagcctgtgcgcgtgctgagcctgtttcggaatatcgataaagtcctgaaaagcctgggattcctggagagcggctctggctccggcggtggcaccctgaagtacgtggaggatgtgacaaacgtggtcagacgggatgtggagaagtggggccccttcgatctggtgtacggcagcacccaacccctgggcagctcttgtgaccggtgccctggctggtacatgtttcagttccaccggatcctgcagtacgccctgccgagacaggagtcccagcggccattcttttggattttcatggacaacttgctgctgaccgaggatgaccaggaaactaccactcggttcctgcagaccgaagccgtgaccctgcaggacgtgagaggccgggactaccagaacgccatgcgggtgtggtccaacatccctggactgaaaagcaagcacgcacctctgacccctaaagaagaggagtacctgcaggcccaggtgcggagcagaagcaagctggacgcccctaaggtggatctgctggtgaagaattgcctcctgcccctgagagagtacttcaagtatttcagccagaatagtctgcccctgggcggcccaagcagcggcgcccctcctcccagcggcggcagcccagccggctccccaacctctaccgaggagggcacctctgagtccgccacccccgagagcggccctggcacctccaccgagcccagcgagggcagcgcacccggcagccctgccggcagccccacctccacagaggagggaaccagcaccgagcccagcgaaggcagcgccccaggcaccagcaccgagcctagtgagggcggctctggcggcggcagcgcccaggagattaaacggatcaacaagatcagaagaagacttgtgaaagacagcaacaccaagaaggccggcaagacaggccccatgaaaaccctgctggttagagtgatgacacccgatctgagagagcggctggaaaacctgagaaagaagcctgaaaatatcccccagcccatcagcaatacatctagagccaacctgaataagctgctgaccgattacaccgaaatgaagaaggcgatcctgcatgtgtactgggaagagttccagaaggaccctgtgggcctgatgagccgggtggcccagcctgccagcaagaagatcgatcagaacaagctgaaacctgagatggacgagaagggcaacctgaccaccgccggctttgcctgctctcagtgtggccagcccctgttcgtgtacaagctggagcaggtgtctgagaagggcaaggcttacaccaactacttcggacggtgcaatgtggccgagcacgaaaagctgatcctgctggcccagctgaagcccgagaaggatagcgacgaagccgtgacatatagcctgggaaagtttgggcagagggccctggatttctacagcattcatgtgaccaaggagtccacccaccccgtgaagcccctggcccagatcgccggaaacagatacgcctccggacctgtgggaaaggccctgagcgacgcatgtatgggcacaatcgcctccttcctgtctaagtaccaggacatcatcatcgaacaccagaaggtggtgaagggcaaccagaagagactggagagcctgcgggagctggccggcaaggaaaacctggaataccctagcgtgaccctgccacctcagcctcacaccaaggagggcgttgatgcctacaacgaagtgatcgcccgggtgcgaatgtgggtgaacctgaacctgtggcagaagctgaagctaagcagagatgatgccaagcctctgctgagactgaagggattcccttcctttcctctggtcgagagacaggccaacgaagtggactggtgggacatggtgtgtaacgtgaagaagctgatcaacgagaaaaaggaggatggcaaggtgttttggcagaatctggctggctacaagagacaggaagccctgagaccatacctgagcagcgaggaagatcggaagaagggaaagaaattcgctcggtaccagctgggcgacctgctgctgcacctggaaaagaagcacggcgaggactggggaaaggtgtacgacgaggcctgggagcggattgacaagaaagtggaaggcctgagcaagcacatcaagctggaagaggaacggagaagcgaggacgcccagagcaaggccgccctgaccgactggctgcgggctaaggccagcttcgtgatcgagggcctgaaggaggccgacaaggacgagttctgcagatgcgagctgaagctgcagaagtggtacggggacctgcggggaaagcccttcgccatcgaagccgagaacagcatcctggacatcagcggcttcagcaagcagtacaactgtgccttcatctggcagaaggacggcgtgaagaagctgaacctgtacctgatcatcaactacttcaagggcggcaagctgcggttcaagaagatcaaacctgaagccttcgaagccaacagattctacaccgtgatcaacaaaaagagcggcgagatcgtgcccatggaggtgaacttcaacttcgacgaccccaacctgatcatcctgcctctggcctttggcaagagacagggcagagaattcatctggaacgacctgctgtccctggaaaccggcagcctgaagctggccaacggaagagtgatcgagaagacactgtacaacagaagaacccggcaggatgagcctgccctgttcgtggccctgaccttcgagcggcgggaggtcctggactcctccaatatcaaaccaatgaacctgatcggcgtggcaagaggcgaaaacatccccgccgtgatcgccctgaccgaccccgagggctgcccactgagccggtttaaggatagcctgggaaacccaacccacatcctgagaatcggcgagagctataaggagaagcagcggaccatccaggccaagaaggaggtggagcagcggagagccggcggctacagccggaagtacgccagcaaagccaagaatctggcagacgatatggtgagaaacaccgctagagatctgctgtactacgccgtgacccaggatgccatgctgatcttcgccaacctgagccggggcttcggccggcagggcaagcggaccttcatggccgagagacagtacacacggatggaggactggctgaccgccaagctggcctacgagggcctgagcaagacctacctgtccaagacactggcccagtacacctccaagacatgcagcaactgtgggtttaccatcaccagcgccgactacgacagggtgctggagaagctgaagaagacagcaacaggctggatgaccacaattaacggcaaggagctgaaggtggagggccagattacctactacaacagatacaagagacagaacgtagtcaaggacctgtccgtcgagctggatagactgagcgaagaatctgtgaacaacgacatctcctcctggacaaagggcagaagcggagaagctctgagcctcctgaagaaaagattctcccatagacccgtgcaggagaagttcgtgtgcctgaactgcggcttcgagacacacgcagccgagcaagccgccctgaacatcgccagatcctggctgttcctgcggagccaggagtacaagaaataccagacaaacaagacaaccggcaacaccgataagagagccttcgtcgagacctggcagtccttttaccggaagaagcttaaggaggtgtggaaacctgccgtgcggtctggcggatctggcggaggctccacaagcagccaggagagcctgaccttcaaggacgtggccgtggacttcacccccgaggagtggggccagctgtaccccgcccagagggacctgtacagggaggtgatgctggagaactacaggaacctggtgagcctgggccaccaggtgagcaagccccacctgatcagccagctggagcagaggaaggagccctggatgatggagaggaagatccccaggggcaacttccccgactgggagaccaggaccagccccaagaaaaagagaaaagtctaagctgccttctgcggggcttgccttctggccatgcccttcttctctcccttgcacctgtacctcttggtctttgaataaagcctgagtaggaaggctagcaaaaaaaaaaaaaaaaaaaaaaaaaaaaaaaaaaaaaaaaaaaaaaaaaaaaaaaaaaaaaaaaaaaaaaaaaaaaaaaa

SEQ ID NO: 3061 - RNA, 5419 nt, synthetic construct
  source 1..5419: mol_type = other RNA
aggaaataagagagaaaagaagagtaagaagaaatataagagccaccatggcccctaagaagaagcgtaaagtgagccgggtgaacggcagcggcagcggcggcggcatgaaccacgaccaggagttcgacccccctaaggtgtaccctcccgtccccgccgagaagagaaagcccatccgggtcctgagcctgttcgatggcatcgccaccggtctgctggtgctgaaggacctgggcatccaggtggataggtacattgcctccgaggtgtgcgaggactccatcaccgtgggaatggtgcgtcatcagggcaagatcatgtacgtgggcgacgtgcggagcgtgacacagaagcatatccaggagtggggccctttcgacctggtgatcggcggcagcccttgcaatgacctgagcatcgtgaacccagcccggaagggcctgtacgagggaaccggcagactgttcttcgagttttacagactgctgcacgacgcccggcctaaggaaggcgacgaccggcccttcttttggctgttcgagaatgtggtggccatgggagtcagcgacaagcgggatattagccggttcctggagagcaaccccgtgatgatcgatgccaaggaagtgagcgccgcccaccgggccagatacttctggggcaatctgcctggcatgaacagacccctggccagcaccgtgaacgacaagctggagctgcaggagtgcctggagcacggccggatcgccaagttcagcaaggtgagaaccatcaccacccgaagcaacagcatcaaacaaggcaaggaccagcactttcctgtgttcatgaacgagaaggaggacatcctgtggtgtaccgagatggagagagtgttcgggttcccagtccactacacagatgtcagcaacatgtctagactggccagacagagactgctgggaagaagctggtccgtccctgtgatcagacacctgttcgcccctctgaaggagtacttcgcctgcgtgagcagcggcaacagcaacgccaacagccggggccccagcttctctagcggcctggtgccactgtccctgagagggagccacatgggccccatggagatctacaaaaccgtgagcgcctggaagcggcagcctgtgcgcgtgctgagcctgtttcggaatatcgataaagtcctgaaaagcctgggattcctggagagcggctctggctccggcggtggcaccctgaagtacgtggaggatgtgacaaacgtggtcagacgggatgtggagaagtggggccccttcgatctggtgtacggcagcacccaacccctgggcagctcttgtgaccggtgccctggctggtacatgtttcagttccaccggatcctgcagtacgccctgccgagacaggagtcccagcggccattcttttggattttcatggacaacttgctgctgaccgaggatgaccaggaaactaccactcggttcctgcagaccgaagccgtgaccctgcaggacgtgagaggccgggactaccagaacgccatgcgggtgtggtccaacatccctggactgaaaagcaagcacgcacctctgacccctaaagaagaggagtacctgcaggcccaggtgcggagcagaagcaagctggacgcccctaaggtggatctgctggtgaagaattgcctcctgcccctgagagagtacttcaagtatttcagccagaatagtctgcccctgggcggcccaagcagcggcgcccctcctcccagcggcggcagcccagccggctccccaacctctaccgaggagggcacctctgagtccgccacccccgagagcggccctggcacctccaccgagcccagcgagggcagcgcacccggcagccctgccggcagccccacctccacagaggagggaaccagcaccgagcccagcgaaggcagcgccccaggcaccagcaccgagcctagtgagggcggctctggcggcggcagcgcccaggagattaaacggatcaacaagatcagaagaagacttgtgaaagacagcaacaccaagaaggccggcaagacaggccccatgaaaaccctgctggttagagtgatgacacccgatctgagagagcggctggaaaacctgagaaagaagcctgaaaatatcccccagcccatcagcaatacatctagagccaacctgaataagctgctgaccgattacaccgaaatgaagaaggcgatcctgcatgtgtactgggaagagttccagaaggaccctgtgggcctgatgagccgggtggcccagcctgccagcaagaagatcgatcagaacaagctgaaacctgagatggacgagaagggcaacctgaccaccgccggctttgcctgctctcagtgtggccagcccctgttcgtgtacaagctggagcaggtgtctgagaagggcaaggcttacaccaactacttcggacggtgcaatgtggccgagcacgaaaagctgatcctgctggcccagctgaagcccgagaaggatagcgacgaagccgtgacatatagcctgggaaagtttgggcagagggccctggatttctacagcattcatgtgaccaaggagtccacccaccccgtgaagcccctggcccagatcgccggaaacagatacgcctccggacctgtgggaaaggccctgagcgacgcatgtatgggcacaatcgcctccttcctgtctaagtaccaggacatcatcatcgaacaccagaaggtggtgaagggcaaccagaagagactggagagcctgcgggagctggccggcaaggaaaacctggaataccctagcgtgaccctgccacctcagcctcacaccaaggagggcgttgatgcctacaacgaagtgatcgcccgggtgcgaatgtgggtgaacctgaacctgtggcagaagctgaagctaagcagagatgatgccaagcctctgctgagactgaagggattcccttcctttcctctggtcgagagacaggccaacgaagtggactggtgggacatggtgtgtaacgtgaagaagctgatcaacgagaaaaaggaggatggcaaggtgttttggcagaatctggctggctacaagagacaggaagccctgagaccatacctgagcagcgaggaagatcggaagaagggaaagaaattcgctcggtaccagctgggcgacctgctgctgcacctggaaaagaagcacggcgaggactggggaaaggtgtacgacgaggcctgggagcggattgacaagaaagtggaaggcctgagcaagcacatcaagctggaagaggaacggagaagcgaggacgcccagagcaaggccgccctgaccgactggctgcgggctaaggccagcttcgtgatcgagggcctgaaggaggccgacaaggacgagttctgcagatgcgagctgaagctgcagaagtggtacggggacctgcggggaaagcccttcgccatcgaagccgagaacagcatcctggacatcagcggcttcagcaagcagtacaactgtgccttcatctggcagaaggacggcgtgaagaagctgaacctgtacctgatcatcaactacttcaagggcggcaagctgcggttcaagaagatcaaacctgaagccttcgaagccaacagattctacaccgtgatcaacaaaaagagcggcgagatcgtgcccatggaggtgaacttcaacttcgacgaccccaacctgatcatcctgcctctggcctttggcaagagacagggcagagaattcatctggaacgacctgctgtccctggaaaccggcagcctgaagctggccaacggaagagtgatcgagaagacactgtacaacagaagaacccggcaggatgagcctgccctgttcgtggccctgaccttcgagcggcgggaggtcctggactcctccaatatcaaaccaatgaacctgatcggcgtggcaagaggcgaaaacatccccgccgtgatcgccctgaccgaccccgagggctgcccactgagccggtttaaggatagcctgggaaacccaacccacatcctgagaatcggcgagagctataaggagaagcagcggaccatccaggccaagaaggaggtggagcagcggagagccggcggctacagccggaagtacgccagcaaagccaagaatctggcagacgatatggtgagaaacaccgctagagatctgctgtactacgccgtgacccaggatgccatgctgatcttcgccaacctgagccggggcttcggccggcagggcaagcggaccttcatggccgagagacagtacacacggatggaggactggctgaccgccaagctggcctacgagggcctgagcaagacctacctgtccaagacactggcccagtacacctccaagacatgcagcaactgtgggtttaccatcaccagcgccgactacgacagggtgctggagaagctgaagaagacagcaacaggctggatgaccacaattaacggcaaggagctgaaggtggagggccagattacctactacaacagatacaagagacagaacgtagtcaaggacctgtccgtcgagctggatagactgagcgaagaatctgtgaacaacgacatctcctcctggacaaagggcagaagcggagaagctctgagcctcctgaagaaaagattctcccatagacccgtgcaggagaagttcgtgtgcctgaactgcggcttcgagacacacgcagccgagcaagccgccctgaacatcgccagatcctggctgttcctgcggagccaggagtacaagaaataccagacaaacaagacaaccggcaacaccgataagagagccttcgtcgagacctggcagtccttttaccggaagaagcttaaggaggtgtggaaacctgccgtgcggtctggcggatctggcggaggctccacaagcccccagggcctggtgaccttcggcgacgtggccgtggacttcagccaggaggagtgggagtggctggactgcgcccagaggaccctgtacaggagcgtgatgctggagaactacaggagcctggtgagcctgggcctgtgcgtgagcaagcccgagatgatcagcagcctggagcagaggaaggagccctggaccgtgaagaggaagtgcaccaggggccagtgccccgacagcgaggccgtgaccagccccaagaaaaagagaaaagtctaagctgccttctgcggggcttgccttctggccatgcccttcttctctcccttgcacctgtacctcttggtctttgaataaagcctgagtaggaaggctagcaaaaaaaaaaaaaaaaaaaaaaaaaaaaaaaaaaaaaaaaaaaaaaaaaaaaaaaaaaaaaaaaaaaaaaaaaaaaaaaa

SEQ ID NO: 3062 - RNA, 5419 nt, synthetic construct
  source 1..5419: mol_type = other RNA
aggaaataagagagaaaagaagagtaagaagaaatataagagccaccatggcccctaagaagaagcgtaaagtgagccgggtgaacggcagcggcagcggcggcggcatgaaccacgaccaggagttcgacccccctaaggtgtaccctcccgtccccgccgagaagagaaagcccatccgggtcctgagcctgttcgatggcatcgccaccggtctgctggtgctgaaggacctgggcatccaggtggataggtacattgcctccgaggtgtgcgaggactccatcaccgtgggaatggtgcgtcatcagggcaagatcatgtacgtgggcgacgtgcggagcgtgacacagaagcatatccaggagtggggccctttcgacctggtgatcggcggcagcccttgcaatgacctgagcatcgtgaacccagcccggaagggcctgtacgagggaaccggcagactgttcttcgagttttacagactgctgcacgacgcccggcctaaggaaggcgacgaccggcccttcttttggctgttcgagaatgtggtggccatgggagtcagcgacaagcgggatattagccggttcctggagagcaaccccgtgatgatcgatgccaaggaagtgagcgccgcccaccgggccagatacttctggggcaatctgcctggcatgaacagacccctggccagcaccgtgaacgacaagctggagctgcaggagtgcctggagcacggccggatcgccaagttcagcaaggtgagaaccatcaccacccgaagcaacagcatcaaacaaggcaaggaccagcactttcctgtgttcatgaacgagaaggaggacatcctgtggtgtaccgagatggagagagtgttcgggttcccagtccactacacagatgtcagcaacatgtctagactggccagacagagactgctgggaagaagctggtccgtccctgtgatcagacacctgttcgcccctctgaaggagtacttcgcctgcgtgagcagcggcaacagcaacgccaacagccggggccccagcttctctagcggcctggtgccactgtccctgagagggagccacatgggccccatggagatctacaaaaccgtgagcgcctggaagcggcagcctgtgcgcgtgctgagcctgtttcggaatatcgataaagtcctgaaaagcctgggattcctggagagcggctctggctccggcggtggcaccctgaagtacgtggaggatgtgacaaacgtggtcagacgggatgtggagaagtggggccccttcgatctggtgtacggcagcacccaacccctgggcagctcttgtgaccggtgccctggctggtacatgtttcagttccaccggatcctgcagtacgccctgccgagacaggagtcccagcggccattcttttggattttcatggacaacttgctgctgaccgaggatgaccaggaaactaccactcggttcctgcagaccgaagccgtgaccctgcaggacgtgagaggccgggactaccagaacgccatgcgggtgtggtccaacatccctggactgaaaagcaagcacgcacctctgacccctaaagaagaggagtacctgcaggcccaggtgcggagcagaagcaagctggacgcccctaaggtggatctgctggtgaagaattgcctcctgcccctgagagagtacttcaagtatttcagccagaatagtctgcccctgggcggcccaagcagcggcgcccctcctcccagcggcggcagcccagccggctccccaacctctaccgaggagggcacctctgagtccgccacccccgagagcggccctggcacctccaccgagcccagcgagggcagcgcacccggcagccctgccggcagccccacctccacagaggagggaaccagcaccgagcccagcgaaggcagcgccccaggcaccagcaccgagcctagtgagggcggctctggcggcggcagcgcccaggagattaaacggatcaacaagatcagaagaagacttgtgaaagacagcaacaccaagaaggccggcaagacaggccccatgaaaaccctgctggttagagtgatgacacccgatctgagagagcggctggaaaacctgagaaagaagcctgaaaatatcccccagcccatcagcaatacatctagagccaacctgaataagctgctgaccgattacaccgaaatgaagaaggcgatcctgcatgtgtactgggaagagttccagaaggaccctgtgggcctgatgagccgggtggcccagcctgccagcaagaagatcgatcagaacaagctgaaacctgagatggacgagaagggcaacctgaccaccgccggctttgcctgctctcagtgtggccagcccctgttcgtgtacaagctggagcaggtgtctgagaagggcaaggcttacaccaactacttcggacggtgcaatgtggccgagcacgaaaagctgatcctgctggcccagctgaagcccgagaaggatagcgacgaagccgtgacatatagcctgggaaagtttgggcagagggccctggatttctacagcattcatgtgaccaaggagtccacccaccccgtgaagcccctggcccagatcgccggaaacagatacgcctccggacctgtgggaaaggccctgagcgacgcatgtatgggcacaatcgcctccttcctgtctaagtaccaggacatcatcatcgaacaccagaaggtggtgaagggcaaccagaagagactggagagcctgcgggagctggccggcaaggaaaacctggaataccctagcgtgaccctgccacctcagcctcacaccaaggagggcgttgatgcctacaacgaagtgatcgcccgggtgcgaatgtgggtgaacctgaacctgtggcagaagctgaagctaagcagagatgatgccaagcctctgctgagactgaagggattcccttcctttcctctggtcgagagacaggccaacgaagtggactggtgggacatggtgtgtaacgtgaagaagctgatcaacgagaaaaaggaggatggcaaggtgttttggcagaatctggctggctacaagagacaggaagccctgagaccatacctgagcagcgaggaagatcggaagaagggaaagaaattcgctcggtaccagctgggcgacctgctgctgcacctggaaaagaagcacggcgaggactggggaaaggtgtacgacgaggcctgggagcggattgacaagaaagtggaaggcctgagcaagcacatcaagctggaagaggaacggagaagcgaggacgcccagagcaaggccgccctgaccgactggctgcgggctaaggccagcttcgtgatcgagggcctgaaggaggccgacaaggacgagttctgcagatgcgagctgaagctgcagaagtggtacggggacctgcggggaaagcccttcgccatcgaagccgagaacagcatcctggacatcagcggcttcagcaagcagtacaactgtgccttcatctggcagaaggacggcgtgaagaagctgaacctgtacctgatcatcaactacttcaagggcggcaagctgcggttcaagaagatcaaacctgaagccttcgaagccaacagattctacaccgtgatcaacaaaaagagcggcgagatcgtgcccatggaggtgaacttcaacttcgacgaccccaacctgatcatcctgcctctggcctttggcaagagacagggcagagaattcatctggaacgacctgctgtccctggaaaccggcagcctgaagctggccaacggaagagtgatcgagaagacactgtacaacagaagaacccggcaggatgagcctgccctgttcgtggccctgaccttcgagcggcgggaggtcctggactcctccaatatcaaaccaatgaacctgatcggcgtggcaagaggcgaaaacatccccgccgtgatcgccctgaccgaccccgagggctgcccactgagccggtttaaggatagcctgggaaacccaacccacatcctgagaatcggcgagagctataaggagaagcagcggaccatccaggccaagaaggaggtggagcagcggagagccggcggctacagccggaagtacgccagcaaagccaagaatctggcagacgatatggtgagaaacaccgctagagatctgctgtactacgccgtgacccaggatgccatgctgatcttcgccaacctgagccggggcttcggccggcagggcaagcggaccttcatggccgagagacagtacacacggatggaggactggctgaccgccaagctggcctacgagggcctgagcaagacctacctgtccaagacactggcccagtacacctccaagacatgcagcaactgtgggtttaccatcaccagcgccgactacgacagggtgctggagaagctgaagaagacagcaacaggctggatgaccacaattaacggcaaggagctgaaggtggagggccagattacctactacaacagatacaagagacagaacgtagtcaaggacctgtccgtcgagctggatagactgagcgaagaatctgtgaacaacgacatctcctcctggacaaagggcagaagcggagaagctctgagcctcctgaagaaaagattctcccatagacccgtgcaggagaagttcgtgtgcctgaactgcggcttcgagacacacgcagccgagcaagccgccctgaacatcgccagatcctggctgttcctgcggagccaggagtacaagaaataccagacaaacaagacaaccggcaacaccgataagagagccttcgtcgagacctggcagtccttttaccggaagaagcttaaggaggtgtggaaacctgccgtgcggtctggcggatctggcggaggctccacaagctgcaacagctggatcagccccagcgacgtggccatcaacttcagcaaggaggagtgggagtgcctgcaccccagccagaaggacctgtacagggacgtgatgctggagaactacagcaacctggtgagcgtgggcctgagcgagagcaagcccgagctggtgacctgcctggaggagaacaaggagccctggatggtgaacatcgacgaggccgagggcctgggccagggcgtgttctgctacaccagccccaagaaaaagagaaaagtctaagctgccttctgcggggcttgccttctggccatgcccttcttctctcccttgcacctgtacctcttggtctttgaataaagcctgagtaggaaggctagcaaaaaaaaaaaaaaaaaaaaaaaaaaaaaaaaaaaaaaaaaaaaaaaaaaaaaaaaaaaaaaaaaaaaaaaaaaaaaaaa

SEQ ID NO: 3063 - RNA, 5419 nt, synthetic construct
  source 1..5419: mol_type = other RNA
aggaaataagagagaaaagaagagtaagaagaaatataagagccaccatggcccctaagaagaagcgtaaagtgagccgggtgaacggcagcggcagcggcggcggcatgaaccacgaccaggagttcgacccccctaaggtgtaccctcccgtccccgccgagaagagaaagcccatccgggtcctgagcctgttcgatggcatcgccaccggtctgctggtgctgaaggacctgggcatccaggtggataggtacattgcctccgaggtgtgcgaggactccatcaccgtgggaatggtgcgtcatcagggcaagatcatgtacgtgggcgacgtgcggagcgtgacacagaagcatatccaggagtggggccctttcgacctggtgatcggcggcagcccttgcaatgacctgagcatcgtgaacccagcccggaagggcctgtacgagggaaccggcagactgttcttcgagttttacagactgctgcacgacgcccggcctaaggaaggcgacgaccggcccttcttttggctgttcgagaatgtggtggccatgggagtcagcgacaagcgggatattagccggttcctggagagcaaccccgtgatgatcgatgccaaggaagtgagcgccgcccaccgggccagatacttctggggcaatctgcctggcatgaacagacccctggccagcaccgtgaacgacaagctggagctgcaggagtgcctggagcacggccggatcgccaagttcagcaaggtgagaaccatcaccacccgaagcaacagcatcaaacaaggcaaggaccagcactttcctgtgttcatgaacgagaaggaggacatcctgtggtgtaccgagatggagagagtgttcgggttcccagtccactacacagatgtcagcaacatgtctagactggccagacagagactgctgggaagaagctggtccgtccctgtgatcagacacctgttcgcccctctgaaggagtacttcgcctgcgtgagcagcggcaacagcaacgccaacagccggggccccagcttctctagcggcctggtgccactgtccctgagagggagccacatgggccccatggagatctacaaaaccgtgagcgcctggaagcggcagcctgtgcgcgtgctgagcctgtttcggaatatcgataaagtcctgaaaagcctgggattcctggagagcggctctggctccggcggtggcaccctgaagtacgtggaggatgtgacaaacgtggtcagacgggatgtggagaagtggggccccttcgatctggtgtacggcagcacccaacccctgggcagctcttgtgaccggtgccctggctggtacatgtttcagttccaccggatcctgcagtacgccctgccgagacaggagtcccagcggccattcttttggattttcatggacaacttgctgctgaccgaggatgaccaggaaactaccactcggttcctgcagaccgaagccgtgaccctgcaggacgtgagaggccgggactaccagaacgccatgcgggtgtggtccaacatccctggactgaaaagcaagcacgcacctctgacccctaaagaagaggagtacctgcaggcccaggtgcggagcagaagcaagctggacgcccctaaggtggatctgctggtgaagaattgcctcctgcccctgagagagtacttcaagtatttcagccagaatagtctgcccctgggcggcccaagcagcggcgcccctcctcccagcggcggcagcccagccggctccccaacctctaccgaggagggcacctctgagtccgccacccccgagagcggccctggcacctccaccgagcccagcgagggcagcgcacccggcagccctgccggcagccccacctccacagaggagggaaccagcaccgagcccagcgaaggcagcgccccaggcaccagcaccgagcctagtgagggcggctctggcggcggcagcgcccaggagattaaacggatcaacaagatcagaagaagacttgtgaaagacagcaacaccaagaaggccggcaagacaggccccatgaaaaccctgctggttagagtgatgacacccgatctgagagagcggctggaaaacctgagaaagaagcctgaaaatatcccccagcccatcagcaatacatctagagccaacctgaataagctgctgaccgattacaccgaaatgaagaaggcgatcctgcatgtgtactgggaagagttccagaaggaccctgtgggcctgatgagccgggtggcccagcctgccagcaagaagatcgatcagaacaagctgaaacctgagatggacgagaagggcaacctgaccaccgccggctttgcctgctctcagtgtggccagcccctgttcgtgtacaagctggagcaggtgtctgagaagggcaaggcttacaccaactacttcggacggtgcaatgtggccgagcacgaaaagctgatcctgctggcccagctgaagcccgagaaggatagcgacgaagccgtgacatatagcctgggaaagtttgggcagagggccctggatttctacagcattcatgtgaccaaggagtccacccaccccgtgaagcccctggcccagatcgccggaaacagatacgcctccggacctgtgggaaaggccctgagcgacgcatgtatgggcacaatcgcctccttcctgtctaagtaccaggacatcatcatcgaacaccagaaggtggtgaagggcaaccagaagagactggagagcctgcgggagctggccggcaaggaaaacctggaataccctagcgtgaccctgccacctcagcctcacaccaaggagggcgttgatgcctacaacgaagtgatcgcccgggtgcgaatgtgggtgaacctgaacctgtggcagaagctgaagctaagcagagatgatgccaagcctctgctgagactgaagggattcccttcctttcctctggtcgagagacaggccaacgaagtggactggtgggacatggtgtgtaacgtgaagaagctgatcaacgagaaaaaggaggatggcaaggtgttttggcagaatctggctggctacaagagacaggaagccctgagaccatacctgagcagcgaggaagatcggaagaagggaaagaaattcgctcggtaccagctgggcgacctgctgctgcacctggaaaagaagcacggcgaggactggggaaaggtgtacgacgaggcctgggagcggattgacaagaaagtggaaggcctgagcaagcacatcaagctggaagaggaacggagaagcgaggacgcccagagcaaggccgccctgaccgactggctgcgggctaaggccagcttcgtgatcgagggcctgaaggaggccgacaaggacgagttctgcagatgcgagctgaagctgcagaagtggtacggggacctgcggggaaagcccttcgccatcgaagccgagaacagcatcctggacatcagcggcttcagcaagcagtacaactgtgccttcatctggcagaaggacggcgtgaagaagctgaacctgtacctgatcatcaactacttcaagggcggcaagctgcggttcaagaagatcaaacctgaagccttcgaagccaacagattctacaccgtgatcaacaaaaagagcggcgagatcgtgcccatggaggtgaacttcaacttcgacgaccccaacctgatcatcctgcctctggcctttggcaagagacagggcagagaattcatctggaacgacctgctgtccctggaaaccggcagcctgaagctggccaacggaagagtgatcgagaagacactgtacaacagaagaacccggcaggatgagcctgccctgttcgtggccctgaccttcgagcggcgggaggtcctggactcctccaatatcaaaccaatgaacctgatcggcgtggcaagaggcgaaaacatccccgccgtgatcgccctgaccgaccccgagggctgcccactgagccggtttaaggatagcctgggaaacccaacccacatcctgagaatcggcgagagctataaggagaagcagcggaccatccaggccaagaaggaggtggagcagcggagagccggcggctacagccggaagtacgccagcaaagccaagaatctggcagacgatatggtgagaaacaccgctagagatctgctgtactacgccgtgacccaggatgccatgctgatcttcgccaacctgagccggggcttcggccggcagggcaagcggaccttcatggccgagagacagtacacacggatggaggactggctgaccgccaagctggcctacgagggcctgagcaagacctacctgtccaagacactggcccagtacacctccaagacatgcagcaactgtgggtttaccatcaccagcgccgactacgacagggtgctggagaagctgaagaagacagcaacaggctggatgaccacaattaacggcaaggagctgaaggtggagggccagattacctactacaacagatacaagagacagaacgtagtcaaggacctgtccgtcgagctggatagactgagcgaagaatctgtgaacaacgacatctcctcctggacaaagggcagaagcggagaagctctgagcctcctgaagaaaagattctcccatagacccgtgcaggagaagttcgtgtgcctgaactgcggcttcgagacacacgcagccgagcaagccgccctgaacatcgccagatcctggctgttcctgcggagccaggagtacaagaaataccagacaaacaagacaaccggcaacaccgataagagagccttcgtcgagacctggcagtccttttaccggaagaagcttaaggaggtgtggaaacctgccgtgcggtctggcggatctggcggaggctccacaagcgcccacgagagcctggccttcagggacgtggccatcgacctgagccaggaggagtgggagtgcctggacaccgcccagagggacctgtacagggaggtgatgctggagaactacagcaacctgatcagcctgggctgcatcatccccaagcccgacgtgatcgtgctgctggagcaggagaaggacccctggctggagaccagggaggagaccaggaggaggagcagcgacttcaccaagaagaccagccccaagaaaaagagaaaagtctaagctgccttctgcggggcttgccttctggccatgcccttcttctctcccttgcacctgtacctcttggtctttgaataaagcctgagtaggaaggctagcaaaaaaaaaaaaaaaaaaaaaaaaaaaaaaaaaaaaaaaaaaaaaaaaaaaaaaaaaaaaaaaaaaaaaaaaaaaaaaaa

SEQ ID NO: 3064 - RNA, 5419 nt, synthetic construct
  source 1..5419: mol_type = other RNA
aggaaataagagagaaaagaagagtaagaagaaatataagagccaccatggcccctaagaagaagcgtaaagtgagccgggtgaacggcagcggcagcggcggcggcatgaaccacgaccaggagttcgacccccctaaggtgtaccctcccgtccccgccgagaagagaaagcccatccgggtcctgagcctgttcgatggcatcgccaccggtctgctggtgctgaaggacctgggcatccaggtggataggtacattgcctccgaggtgtgcgaggactccatcaccgtgggaatggtgcgtcatcagggcaagatcatgtacgtgggcgacgtgcggagcgtgacacagaagcatatccaggagtggggccctttcgacctggtgatcggcggcagcccttgcaatgacctgagcatcgtgaacccagcccggaagggcctgtacgagggaaccggcagactgttcttcgagttttacagactgctgcacgacgcccggcctaaggaaggcgacgaccggcccttcttttggctgttcgagaatgtggtggccatgggagtcagcgacaagcgggatattagccggttcctggagagcaaccccgtgatgatcgatgccaaggaagtgagcgccgcccaccgggccagatacttctggggcaatctgcctggcatgaacagacccctggccagcaccgtgaacgacaagctggagctgcaggagtgcctggagcacggccggatcgccaagttcagcaaggtgagaaccatcaccacccgaagcaacagcatcaaacaaggcaaggaccagcactttcctgtgttcatgaacgagaaggaggacatcctgtggtgtaccgagatggagagagtgttcgggttcccagtccactacacagatgtcagcaacatgtctagactggccagacagagactgctgggaagaagctggtccgtccctgtgatcagacacctgttcgcccctctgaaggagtacttcgcctgcgtgagcagcggcaacagcaacgccaacagccggggccccagcttctctagcggcctggtgccactgtccctgagagggagccacatgggccccatggagatctacaaaaccgtgagcgcctggaagcggcagcctgtgcgcgtgctgagcctgtttcggaatatcgataaagtcctgaaaagcctgggattcctggagagcggctctggctccggcggtggcaccctgaagtacgtggaggatgtgacaaacgtggtcagacgggatgtggagaagtggggccccttcgatctggtgtacggcagcacccaacccctgggcagctcttgtgaccggtgccctggctggtacatgtttcagttccaccggatcctgcagtacgccctgccgagacaggagtcccagcggccattcttttggattttcatggacaacttgctgctgaccgaggatgaccaggaaactaccactcggttcctgcagaccgaagccgtgaccctgcaggacgtgagaggccgggactaccagaacgccatgcgggtgtggtccaacatccctggactgaaaagcaagcacgcacctctgacccctaaagaagaggagtacctgcaggcccaggtgcggagcagaagcaagctggacgcccctaaggtggatctgctggtgaagaattgcctcctgcccctgagagagtacttcaagtatttcagccagaatagtctgcccctgggcggcccaagcagcggcgcccctcctcccagcggcggcagcccagccggctccccaacctctaccgaggagggcacctctgagtccgccacccccgagagcggccctggcacctccaccgagcccagcgagggcagcgcacccggcagccctgccggcagccccacctccacagaggagggaaccagcaccgagcccagcgaaggcagcgccccaggcaccagcaccgagcctagtgagggcggctctggcggcggcagcgcccaggagattaaacggatcaacaagatcagaagaagacttgtgaaagacagcaacaccaagaaggccggcaagacaggccccatgaaaaccctgctggttagagtgatgacacccgatctgagagagcggctggaaaacctgagaaagaagcctgaaaatatcccccagcccatcagcaatacatctagagccaacctgaataagctgctgaccgattacaccgaaatgaagaaggcgatcctgcatgtgtactgggaagagttccagaaggaccctgtgggcctgatgagccgggtggcccagcctgccagcaagaagatcgatcagaacaagctgaaacctgagatggacgagaagggcaacctgaccaccgccggctttgcctgctctcagtgtggccagcccctgttcgtgtacaagctggagcaggtgtctgagaagggcaaggcttacaccaactacttcggacggtgcaatgtggccgagcacgaaaagctgatcctgctggcccagctgaagcccgagaaggatagcgacgaagccgtgacatatagcctgggaaagtttgggcagagggccctggatttctacagcattcatgtgaccaaggagtccacccaccccgtgaagcccctggcccagatcgccggaaacagatacgcctccggacctgtgggaaaggccctgagcgacgcatgtatgggcacaatcgcctccttcctgtctaagtaccaggacatcatcatcgaacaccagaaggtggtgaagggcaaccagaagagactggagagcctgcgggagctggccggcaaggaaaacctggaataccctagcgtgaccctgccacctcagcctcacaccaaggagggcgttgatgcctacaacgaagtgatcgcccgggtgcgaatgtgggtgaacctgaacctgtggcagaagctgaagctaagcagagatgatgccaagcctctgctgagactgaagggattcccttcctttcctctggtcgagagacaggccaacgaagtggactggtgggacatggtgtgtaacgtgaagaagctgatcaacgagaaaaaggaggatggcaaggtgttttggcagaatctggctggctacaagagacaggaagccctgagaccatacctgagcagcgaggaagatcggaagaagggaaagaaattcgctcggtaccagctgggcgacctgctgctgcacctggaaaagaagcacggcgaggactggggaaaggtgtacgacgaggcctgggagcggattgacaagaaagtggaaggcctgagcaagcacatcaagctggaagaggaacggagaagcgaggacgcccagagcaaggccgccctgaccgactggctgcgggctaaggccagcttcgtgatcgagggcctgaaggaggccgacaaggacgagttctgcagatgcgagctgaagctgcagaagtggtacggggacctgcggggaaagcccttcgccatcgaagccgagaacagcatcctggacatcagcggcttcagcaagcagtacaactgtgccttcatctggcagaaggacggcgtgaagaagctgaacctgtacctgatcatcaactacttcaagggcggcaagctgcggttcaagaagatcaaacctgaagccttcgaagccaacagattctacaccgtgatcaacaaaaagagcggcgagatcgtgcccatggaggtgaacttcaacttcgacgaccccaacctgatcatcctgcctctggcctttggcaagagacagggcagagaattcatctggaacgacctgctgtccctggaaaccggcagcctgaagctggccaacggaagagtgatcgagaagacactgtacaacagaagaacccggcaggatgagcctgccctgttcgtggccctgaccttcgagcggcgggaggtcctggactcctccaatatcaaaccaatgaacctgatcggcgtggcaagaggcgaaaacatccccgccgtgatcgccctgaccgaccccgagggctgcccactgagccggtttaaggatagcctgggaaacccaacccacatcctgagaatcggcgagagctataaggagaagcagcggaccatccaggccaagaaggaggtggagcagcggagagccggcggctacagccggaagtacgccagcaaagccaagaatctggcagacgatatggtgagaaacaccgctagagatctgctgtactacgccgtgacccaggatgccatgctgatcttcgccaacctgagccggggcttcggccggcagggcaagcggaccttcatggccgagagacagtacacacggatggaggactggctgaccgccaagctggcctacgagggcctgagcaagacctacctgtccaagacactggcccagtacacctccaagacatgcagcaactgtgggtttaccatcaccagcgccgactacgacagggtgctggagaagctgaagaagacagcaacaggctggatgaccacaattaacggcaaggagctgaaggtggagggccagattacctactacaacagatacaagagacagaacgtagtcaaggacctgtccgtcgagctggatagactgagcgaagaatctgtgaacaacgacatctcctcctggacaaagggcagaagcggagaagctctgagcctcctgaagaaaagattctcccatagacccgtgcaggagaagttcgtgtgcctgaactgcggcttcgagacacacgcagccgagcaagccgccctgaacatcgccagatcctggctgttcctgcggagccaggagtacaagaaataccagacaaacaagacaaccggcaacaccgataagagagccttcgtcgagacctggcagtccttttaccggaagaagcttaaggaggtgtggaaacctgccgtgcggtctggcggatctggcggaggctccacaagcaggcccggcgccgtgagcttcgccgacgtggccgtgtacttcagccccgaggagtggggctgcctgaggcccgcccagagggccctgtacagggaggtgatgagggagacctacggccacctgggcgccctgggcttccccggccccaagcccgccctgatcagctggatggagcaggagagcgaggcctggagccccgacgcccaggaccccgaggagggcgagagcctgggcggcgccctgaccagccccaagaaaaagagaaaagtctaagctgccttctgcggggcttgccttctggccatgcccttcttctctcccttgcacctgtacctcttggtctttgaataaagcctgagtaggaaggctagcaaaaaaaaaaaaaaaaaaaaaaaaaaaaaaaaaaaaaaaaaaaaaaaaaaaaaaaaaaaaaaaaaaaaaaaaaaaaaaaa

SEQ ID NO: 3065 - RNA, 5419 nt, synthetic construct
  source 1..5419: mol_type = other RNA
aggaaataagagagaaaagaagagtaagaagaaatataagagccaccatggcccctaagaagaagcgtaaagtgagccgggtgaacggcagcggcagcggcggcggcatgaaccacgaccaggagttcgacccccctaaggtgtaccctcccgtccccgccgagaagagaaagcccatccgggtcctgagcctgttcgatggcatcgccaccggtctgctggtgctgaaggacctgggcatccaggtggataggtacattgcctccgaggtgtgcgaggactccatcaccgtgggaatggtgcgtcatcagggcaagatcatgtacgtgggcgacgtgcggagcgtgacacagaagcatatccaggagtggggccctttcgacctggtgatcggcggcagcccttgcaatgacctgagcatcgtgaacccagcccggaagggcctgtacgagggaaccggcagactgttcttcgagttttacagactgctgcacgacgcccggcctaaggaaggcgacgaccggcccttcttttggctgttcgagaatgtggtggccatgggagtcagcgacaagcgggatattagccggttcctggagagcaaccccgtgatgatcgatgccaaggaagtgagcgccgcccaccgggccagatacttctggggcaatctgcctggcatgaacagacccctggccagcaccgtgaacgacaagctggagctgcaggagtgcctggagcacggccggatcgccaagttcagcaaggtgagaaccatcaccacccgaagcaacagcatcaaacaaggcaaggaccagcactttcctgtgttcatgaacgagaaggaggacatcctgtggtgtaccgagatggagagagtgttcgggttcccagtccactacacagatgtcagcaacatgtctagactggccagacagagactgctgggaagaagctggtccgtccctgtgatcagacacctgttcgcccctctgaaggagtacttcgcctgcgtgagcagcggcaacagcaacgccaacagccggggccccagcttctctagcggcctggtgccactgtccctgagagggagccacatgggccccatggagatctacaaaaccgtgagcgcctggaagcggcagcctgtgcgcgtgctgagcctgtttcggaatatcgataaagtcctgaaaagcctgggattcctggagagcggctctggctccggcggtggcaccctgaagtacgtggaggatgtgacaaacgtggtcagacgggatgtggagaagtggggccccttcgatctggtgtacggcagcacccaacccctgggcagctcttgtgaccggtgccctggctggtacatgtttcagttccaccggatcctgcagtacgccctgccgagacaggagtcccagcggccattcttttggattttcatggacaacttgctgctgaccgaggatgaccaggaaactaccactcggttcctgcagaccgaagccgtgaccctgcaggacgtgagaggccgggactaccagaacgccatgcgggtgtggtccaacatccctggactgaaaagcaagcacgcacctctgacccctaaagaagaggagtacctgcaggcccaggtgcggagcagaagcaagctggacgcccctaaggtggatctgctggtgaagaattgcctcctgcccctgagagagtacttcaagtatttcagccagaatagtctgcccctgggcggcccaagcagcggcgcccctcctcccagcggcggcagcccagccggctccccaacctctaccgaggagggcacctctgagtccgccacccccgagagcggccctggcacctccaccgagcccagcgagggcagcgcacccggcagccctgccggcagccccacctccacagaggagggaaccagcaccgagcccagcgaaggcagcgccccaggcaccagcaccgagcctagtgagggcggctctggcggcggcagcgcccaggagattaaacggatcaacaagatcagaagaagacttgtgaaagacagcaacaccaagaaggccggcaagacaggccccatgaaaaccctgctggttagagtgatgacacccgatctgagagagcggctggaaaacctgagaaagaagcctgaaaatatcccccagcccatcagcaatacatctagagccaacctgaataagctgctgaccgattacaccgaaatgaagaaggcgatcctgcatgtgtactgggaagagttccagaaggaccctgtgggcctgatgagccgggtggcccagcctgccagcaagaagatcgatcagaacaagctgaaacctgagatggacgagaagggcaacctgaccaccgccggctttgcctgctctcagtgtggccagcccctgttcgtgtacaagctggagcaggtgtctgagaagggcaaggcttacaccaactacttcggacggtgcaatgtggccgagcacgaaaagctgatcctgctggcccagctgaagcccgagaaggatagcgacgaagccgtgacatatagcctgggaaagtttgggcagagggccctggatttctacagcattcatgtgaccaaggagtccacccaccccgtgaagcccctggcccagatcgccggaaacagatacgcctccggacctgtgggaaaggccctgagcgacgcatgtatgggcacaatcgcctccttcctgtctaagtaccaggacatcatcatcgaacaccagaaggtggtgaagggcaaccagaagagactggagagcctgcgggagctggccggcaaggaaaacctggaataccctagcgtgaccctgccacctcagcctcacaccaaggagggcgttgatgcctacaacgaagtgatcgcccgggtgcgaatgtgggtgaacctgaacctgtggcagaagctgaagctaagcagagatgatgccaagcctctgctgagactgaagggattcccttcctttcctctggtcgagagacaggccaacgaagtggactggtgggacatggtgtgtaacgtgaagaagctgatcaacgagaaaaaggaggatggcaaggtgttttggcagaatctggctggctacaagagacaggaagccctgagaccatacctgagcagcgaggaagatcggaagaagggaaagaaattcgctcggtaccagctgggcgacctgctgctgcacctggaaaagaagcacggcgaggactggggaaaggtgtacgacgaggcctgggagcggattgacaagaaagtggaaggcctgagcaagcacatcaagctggaagaggaacggagaagcgaggacgcccagagcaaggccgccctgaccgactggctgcgggctaaggccagcttcgtgatcgagggcctgaaggaggccgacaaggacgagttctgcagatgcgagctgaagctgcagaagtggtacggggacctgcggggaaagcccttcgccatcgaagccgagaacagcatcctggacatcagcggcttcagcaagcagtacaactgtgccttcatctggcagaaggacggcgtgaagaagctgaacctgtacctgatcatcaactacttcaagggcggcaagctgcggttcaagaagatcaaacctgaagccttcgaagccaacagattctacaccgtgatcaacaaaaagagcggcgagatcgtgcccatggaggtgaacttcaacttcgacgaccccaacctgatcatcctgcctctggcctttggcaagagacagggcagagaattcatctggaacgacctgctgtccctggaaaccggcagcctgaagctggccaacggaagagtgatcgagaagacactgtacaacagaagaacccggcaggatgagcctgccctgttcgtggccctgaccttcgagcggcgggaggtcctggactcctccaatatcaaaccaatgaacctgatcggcgtggcaagaggcgaaaacatccccgccgtgatcgccctgaccgaccccgagggctgcccactgagccggtttaaggatagcctgggaaacccaacccacatcctgagaatcggcgagagctataaggagaagcagcggaccatccaggccaagaaggaggtggagcagcggagagccggcggctacagccggaagtacgccagcaaagccaagaatctggcagacgatatggtgagaaacaccgctagagatctgctgtactacgccgtgacccaggatgccatgctgatcttcgccaacctgagccggggcttcggccggcagggcaagcggaccttcatggccgagagacagtacacacggatggaggactggctgaccgccaagctggcctacgagggcctgagcaagacctacctgtccaagacactggcccagtacacctccaagacatgcagcaactgtgggtttaccatcaccagcgccgactacgacagggtgctggagaagctgaagaagacagcaacaggctggatgaccacaattaacggcaaggagctgaaggtggagggccagattacctactacaacagatacaagagacagaacgtagtcaaggacctgtccgtcgagctggatagactgagcgaagaatctgtgaacaacgacatctcctcctggacaaagggcagaagcggagaagctctgagcctcctgaagaaaagattctcccatagacccgtgcaggagaagttcgtgtgcctgaactgcggcttcgagacacacgcagccgagcaagccgccctgaacatcgccagatcctggctgttcctgcggagccaggagtacaagaaataccagacaaacaagacaaccggcaacaccgataagagagccttcgtcgagacctggcagtccttttaccggaagaagcttaaggaggtgtggaaacctgccgtgcggtctggcggatctggcggaggctccacaagcttccagggcagcgtgaccttccaggacgtggccgtggtgttcacccccgaggagtggggccacctggagcccagccagaaggagctgtacagggaggtgatgctggagaacttcaggaacctggtgtgcctgggcctggtggtgtacaagcccagcgtgatctaccagctggagaggggcggcgccccctggaagcccggcggcggcggcaggaggagcggcagcagcgactgggagaccctgaccagccccaagaaaaagagaaaagtctaagctgccttctgcggggcttgccttctggccatgcccttcttctctcccttgcacctgtacctcttggtctttgaataaagcctgagtaggaaggctagcaaaaaaaaaaaaaaaaaaaaaaaaaaaaaaaaaaaaaaaaaaaaaaaaaaaaaaaaaaaaaaaaaaaaaaaaaaaaaaaa

SEQ ID NO: 3066 - RNA, 5419 nt, synthetic construct
  source 1..5419: mol_type = other RNA
aggaaataagagagaaaagaagagtaagaagaaatataagagccaccatggcccctaagaagaagcgtaaagtgagccgggtgaacggcagcggcagcggcggcggcatgaaccacgaccaggagttcgacccccctaaggtgtaccctcccgtccccgccgagaagagaaagcccatccgggtcctgagcctgttcgatggcatcgccaccggtctgctggtgctgaaggacctgggcatccaggtggataggtacattgcctccgaggtgtgcgaggactccatcaccgtgggaatggtgcgtcatcagggcaagatcatgtacgtgggcgacgtgcggagcgtgacacagaagcatatccaggagtggggccctttcgacctggtgatcggcggcagcccttgcaatgacctgagcatcgtgaacccagcccggaagggcctgtacgagggaaccggcagactgttcttcgagttttacagactgctgcacgacgcccggcctaaggaaggcgacgaccggcccttcttttggctgttcgagaatgtggtggccatgggagtcagcgacaagcgggatattagccggttcctggagagcaaccccgtgatgatcgatgccaaggaagtgagcgccgcccaccgggccagatacttctggggcaatctgcctggcatgaacagacccctggccagcaccgtgaacgacaagctggagctgcaggagtgcctggagcacggccggatcgccaagttcagcaaggtgagaaccatcaccacccgaagcaacagcatcaaacaaggcaaggaccagcactttcctgtgttcatgaacgagaaggaggacatcctgtggtgtaccgagatggagagagtgttcgggttcccagtccactacacagatgtcagcaacatgtctagactggccagacagagactgctgggaagaagctggtccgtccctgtgatcagacacctgttcgcccctctgaaggagtacttcgcctgcgtgagcagcggcaacagcaacgccaacagccggggccccagcttctctagcggcctggtgccactgtccctgagagggagccacatgggccccatggagatctacaaaaccgtgagcgcctggaagcggcagcctgtgcgcgtgctgagcctgtttcggaatatcgataaagtcctgaaaagcctgggattcctggagagcggctctggctccggcggtggcaccctgaagtacgtggaggatgtgacaaacgtggtcagacgggatgtggagaagtggggccccttcgatctggtgtacggcagcacccaacccctgggcagctcttgtgaccggtgccctggctggtacatgtttcagttccaccggatcctgcagtacgccctgccgagacaggagtcccagcggccattcttttggattttcatggacaacttgctgctgaccgaggatgaccaggaaactaccactcggttcctgcagaccgaagccgtgaccctgcaggacgtgagaggccgggactaccagaacgccatgcgggtgtggtccaacatccctggactgaaaagcaagcacgcacctctgacccctaaagaagaggagtacctgcaggcccaggtgcggagcagaagcaagctggacgcccctaaggtggatctgctggtgaagaattgcctcctgcccctgagagagtacttcaagtatttcagccagaatagtctgcccctgggcggcccaagcagcggcgcccctcctcccagcggcggcagcccagccggctccccaacctctaccgaggagggcacctctgagtccgccacccccgagagcggccctggcacctccaccgagcccagcgagggcagcgcacccggcagccctgccggcagccccacctccacagaggagggaaccagcaccgagcccagcgaaggcagcgccccaggcaccagcaccgagcctagtgagggcggctctggcggcggcagcgcccaggagattaaacggatcaacaagatcagaagaagacttgtgaaagacagcaacaccaagaaggccggcaagacaggccccatgaaaaccctgctggttagagtgatgacacccgatctgagagagcggctggaaaacctgagaaagaagcctgaaaatatcccccagcccatcagcaatacatctagagccaacctgaataagctgctgaccgattacaccgaaatgaagaaggcgatcctgcatgtgtactgggaagagttccagaaggaccctgtgggcctgatgagccgggtggcccagcctgccagcaagaagatcgatcagaacaagctgaaacctgagatggacgagaagggcaacctgaccaccgccggctttgcctgctctcagtgtggccagcccctgttcgtgtacaagctggagcaggtgtctgagaagggcaaggcttacaccaactacttcggacggtgcaatgtggccgagcacgaaaagctgatcctgctggcccagctgaagcccgagaaggatagcgacgaagccgtgacatatagcctgggaaagtttgggcagagggccctggatttctacagcattcatgtgaccaaggagtccacccaccccgtgaagcccctggcccagatcgccggaaacagatacgcctccggacctgtgggaaaggccctgagcgacgcatgtatgggcacaatcgcctccttcctgtctaagtaccaggacatcatcatcgaacaccagaaggtggtgaagggcaaccagaagagactggagagcctgcgggagctggccggcaaggaaaacctggaataccctagcgtgaccctgccacctcagcctcacaccaaggagggcgttgatgcctacaacgaagtgatcgcccgggtgcgaatgtgggtgaacctgaacctgtggcagaagctgaagctaagcagagatgatgccaagcctctgctgagactgaagggattcccttcctttcctctggtcgagagacaggccaacgaagtggactggtgggacatggtgtgtaacgtgaagaagctgatcaacgagaaaaaggaggatggcaaggtgttttggcagaatctggctggctacaagagacaggaagccctgagaccatacctgagcagcgaggaagatcggaagaagggaaagaaattcgctcggtaccagctgggcgacctgctgctgcacctggaaaagaagcacggcgaggactggggaaaggtgtacgacgaggcctgggagcggattgacaagaaagtggaaggcctgagcaagcacatcaagctggaagaggaacggagaagcgaggacgcccagagcaaggccgccctgaccgactggctgcgggctaaggccagcttcgtgatcgagggcctgaaggaggccgacaaggacgagttctgcagatgcgagctgaagctgcagaagtggtacggggacctgcggggaaagcccttcgccatcgaagccgagaacagcatcctggacatcagcggcttcagcaagcagtacaactgtgccttcatctggcagaaggacggcgtgaagaagctgaacctgtacctgatcatcaactacttcaagggcggcaagctgcggttcaagaagatcaaacctgaagccttcgaagccaacagattctacaccgtgatcaacaaaaagagcggcgagatcgtgcccatggaggtgaacttcaacttcgacgaccccaacctgatcatcctgcctctggcctttggcaagagacagggcagagaattcatctggaacgacctgctgtccctggaaaccggcagcctgaagctggccaacggaagagtgatcgagaagacactgtacaacagaagaacccggcaggatgagcctgccctgttcgtggccctgaccttcgagcggcgggaggtcctggactcctccaatatcaaaccaatgaacctgatcggcgtggcaagaggcgaaaacatccccgccgtgatcgccctgaccgaccccgagggctgcccactgagccggtttaaggatagcctgggaaacccaacccacatcctgagaatcggcgagagctataaggagaagcagcggaccatccaggccaagaaggaggtggagcagcggagagccggcggctacagccggaagtacgccagcaaagccaagaatctggcagacgatatggtgagaaacaccgctagagatctgctgtactacgccgtgacccaggatgccatgctgatcttcgccaacctgagccggggcttcggccggcagggcaagcggaccttcatggccgagagacagtacacacggatggaggactggctgaccgccaagctggcctacgagggcctgagcaagacctacctgtccaagacactggcccagtacacctccaagacatgcagcaactgtgggtttaccatcaccagcgccgactacgacagggtgctggagaagctgaagaagacagcaacaggctggatgaccacaattaacggcaaggagctgaaggtggagggccagattacctactacaacagatacaagagacagaacgtagtcaaggacctgtccgtcgagctggatagactgagcgaagaatctgtgaacaacgacatctcctcctggacaaagggcagaagcggagaagctctgagcctcctgaagaaaagattctcccatagacccgtgcaggagaagttcgtgtgcctgaactgcggcttcgagacacacgcagccgagcaagccgccctgaacatcgccagatcctggctgttcctgcggagccaggagtacaagaaataccagacaaacaagacaaccggcaacaccgataagagagccttcgtcgagacctggcagtccttttaccggaagaagcttaaggaggtgtggaaacctgccgtgcggtctggcggatctggcggaggctccacaagcagcctgggcagcgacctgttcagggacgtggccgtggtgttcagccaggaggagtgggagcagctggcccccgcccagagggacctgtacagggacgtgatgctggagatctacagcaacctggtgagcctgggcttcgccatcagcaagcccgacgtgatcagcttcctggagcagggcagggagccctggatggtggagaaggtggtgaccggcggccagtgccccgtgctggagagcaggaccagccccaagaaaaagagaaaagtctaagctgccttctgcggggcttgccttctggccatgcccttcttctctcccttgcacctgtacctcttggtctttgaataaagcctgagtaggaaggctagcaaaaaaaaaaaaaaaaaaaaaaaaaaaaaaaaaaaaaaaaaaaaaaaaaaaaaaaaaaaaaaaaaaaaaaaaaaaaaaaa

SEQ ID NO: 3067 - RNA, 5419 nt, synthetic construct
  source 1..5419: mol_type = other RNA
aggaaataagagagaaaagaagagtaagaagaaatataagagccaccatggcccctaagaagaagcgtaaagtgagccgggtgaacggcagcggcagcggcggcggcatgaaccacgaccaggagttcgacccccctaaggtgtaccctcccgtccccgccgagaagagaaagcccatccgggtcctgagcctgttcgatggcatcgccaccggtctgctggtgctgaaggacctgggcatccaggtggataggtacattgcctccgaggtgtgcgaggactccatcaccgtgggaatggtgcgtcatcagggcaagatcatgtacgtgggcgacgtgcggagcgtgacacagaagcatatccaggagtggggccctttcgacctggtgatcggcggcagcccttgcaatgacctgagcatcgtgaacccagcccggaagggcctgtacgagggaaccggcagactgttcttcgagttttacagactgctgcacgacgcccggcctaaggaaggcgacgaccggcccttcttttggctgttcgagaatgtggtggccatgggagtcagcgacaagcgggatattagccggttcctggagagcaaccccgtgatgatcgatgccaaggaagtgagcgccgcccaccgggccagatacttctggggcaatctgcctggcatgaacagacccctggccagcaccgtgaacgacaagctggagctgcaggagtgcctggagcacggccggatcgccaagttcagcaaggtgagaaccatcaccacccgaagcaacagcatcaaacaaggcaaggaccagcactttcctgtgttcatgaacgagaaggaggacatcctgtggtgtaccgagatggagagagtgttcgggttcccagtccactacacagatgtcagcaacatgtctagactggccagacagagactgctgggaagaagctggtccgtccctgtgatcagacacctgttcgcccctctgaaggagtacttcgcctgcgtgagcagcggcaacagcaacgccaacagccggggccccagcttctctagcggcctggtgccactgtccctgagagggagccacatgggccccatggagatctacaaaaccgtgagcgcctggaagcggcagcctgtgcgcgtgctgagcctgtttcggaatatcgataaagtcctgaaaagcctgggattcctggagagcggctctggctccggcggtggcaccctgaagtacgtggaggatgtgacaaacgtggtcagacgggatgtggagaagtggggccccttcgatctggtgtacggcagcacccaacccctgggcagctcttgtgaccggtgccctggctggtacatgtttcagttccaccggatcctgcagtacgccctgccgagacaggagtcccagcggccattcttttggattttcatggacaacttgctgctgaccgaggatgaccaggaaactaccactcggttcctgcagaccgaagccgtgaccctgcaggacgtgagaggccgggactaccagaacgccatgcgggtgtggtccaacatccctggactgaaaagcaagcacgcacctctgacccctaaagaagaggagtacctgcaggcccaggtgcggagcagaagcaagctggacgcccctaaggtggatctgctggtgaagaattgcctcctgcccctgagagagtacttcaagtatttcagccagaatagtctgcccctgggcggcccaagcagcggcgcccctcctcccagcggcggcagcccagccggctccccaacctctaccgaggagggcacctctgagtccgccacccccgagagcggccctggcacctccaccgagcccagcgagggcagcgcacccggcagccctgccggcagccccacctccacagaggagggaaccagcaccgagcccagcgaaggcagcgccccaggcaccagcaccgagcctagtgagggcggctctggcggcggcagcgcccaggagattaaacggatcaacaagatcagaagaagacttgtgaaagacagcaacaccaagaaggccggcaagacaggccccatgaaaaccctgctggttagagtgatgacacccgatctgagagagcggctggaaaacctgagaaagaagcctgaaaatatcccccagcccatcagcaatacatctagagccaacctgaataagctgctgaccgattacaccgaaatgaagaaggcgatcctgcatgtgtactgggaagagttccagaaggaccctgtgggcctgatgagccgggtggcccagcctgccagcaagaagatcgatcagaacaagctgaaacctgagatggacgagaagggcaacctgaccaccgccggctttgcctgctctcagtgtggccagcccctgttcgtgtacaagctggagcaggtgtctgagaagggcaaggcttacaccaactacttcggacggtgcaatgtggccgagcacgaaaagctgatcctgctggcccagctgaagcccgagaaggatagcgacgaagccgtgacatatagcctgggaaagtttgggcagagggccctggatttctacagcattcatgtgaccaaggagtccacccaccccgtgaagcccctggcccagatcgccggaaacagatacgcctccggacctgtgggaaaggccctgagcgacgcatgtatgggcacaatcgcctccttcctgtctaagtaccaggacatcatcatcgaacaccagaaggtggtgaagggcaaccagaagagactggagagcctgcgggagctggccggcaaggaaaacctggaataccctagcgtgaccctgccacctcagcctcacaccaaggagggcgttgatgcctacaacgaagtgatcgcccgggtgcgaatgtgggtgaacctgaacctgtggcagaagctgaagctaagcagagatgatgccaagcctctgctgagactgaagggattcccttcctttcctctggtcgagagacaggccaacgaagtggactggtgggacatggtgtgtaacgtgaagaagctgatcaacgagaaaaaggaggatggcaaggtgttttggcagaatctggctggctacaagagacaggaagccctgagaccatacctgagcagcgaggaagatcggaagaagggaaagaaattcgctcggtaccagctgggcgacctgctgctgcacctggaaaagaagcacggcgaggactggggaaaggtgtacgacgaggcctgggagcggattgacaagaaagtggaaggcctgagcaagcacatcaagctggaagaggaacggagaagcgaggacgcccagagcaaggccgccctgaccgactggctgcgggctaaggccagcttcgtgatcgagggcctgaaggaggccgacaaggacgagttctgcagatgcgagctgaagctgcagaagtggtacggggacctgcggggaaagcccttcgccatcgaagccgagaacagcatcctggacatcagcggcttcagcaagcagtacaactgtgccttcatctggcagaaggacggcgtgaagaagctgaacctgtacctgatcatcaactacttcaagggcggcaagctgcggttcaagaagatcaaacctgaagccttcgaagccaacagattctacaccgtgatcaacaaaaagagcggcgagatcgtgcccatggaggtgaacttcaacttcgacgaccccaacctgatcatcctgcctctggcctttggcaagagacagggcagagaattcatctggaacgacctgctgtccctggaaaccggcagcctgaagctggccaacggaagagtgatcgagaagacactgtacaacagaagaacccggcaggatgagcctgccctgttcgtggccctgaccttcgagcggcgggaggtcctggactcctccaatatcaaaccaatgaacctgatcggcgtggcaagaggcgaaaacatccccgccgtgatcgccctgaccgaccccgagggctgcccactgagccggtttaaggatagcctgggaaacccaacccacatcctgagaatcggcgagagctataaggagaagcagcggaccatccaggccaagaaggaggtggagcagcggagagccggcggctacagccggaagtacgccagcaaagccaagaatctggcagacgatatggtgagaaacaccgctagagatctgctgtactacgccgtgacccaggatgccatgctgatcttcgccaacctgagccggggcttcggccggcagggcaagcggaccttcatggccgagagacagtacacacggatggaggactggctgaccgccaagctggcctacgagggcctgagcaagacctacctgtccaagacactggcccagtacacctccaagacatgcagcaactgtgggtttaccatcaccagcgccgactacgacagggtgctggagaagctgaagaagacagcaacaggctggatgaccacaattaacggcaaggagctgaaggtggagggccagattacctactacaacagatacaagagacagaacgtagtcaaggacctgtccgtcgagctggatagactgagcgaagaatctgtgaacaacgacatctcctcctggacaaagggcagaagcggagaagctctgagcctcctgaagaaaagattctcccatagacccgtgcaggagaagttcgtgtgcctgaactgcggcttcgagacacacgcagccgagcaagccgccctgaacatcgccagatcctggctgttcctgcggagccaggagtacaagaaataccagacaaacaagacaaccggcaacaccgataagagagccttcgtcgagacctggcagtccttttaccggaagaagcttaaggaggtgtggaaacctgccgtgcggtctggcggatctggcggaggctccacaagcctgctgcccgccgccggctgcggcaaggacagcggcacccccgccaccgaggccgtgaccttcgaggacgtggccgtgaacttcagcagggaggagtgggccctgctggaccccccccagaggaagctgtacagggacgtgatgtgggagaccctgaggcacctggccgccgtgggcatgaacagcgacgacaggcagatcgaggacgtgtacaagatctgcaggaagaacctgagcggcgccaccagccccaagaaaaagagaaaagtctaagctgccttctgcggggcttgccttctggccatgcccttcttctctcccttgcacctgtacctcttggtctttgaataaagcctgagtaggaaggctagcaaaaaaaaaaaaaaaaaaaaaaaaaaaaaaaaaaaaaaaaaaaaaaaaaaaaaaaaaaaaaaaaaaaaaaaaaaaaaaaa

SEQ ID NO: 3068 - RNA, 5419 nt, synthetic construct
  source 1..5419: mol_type = other RNA
aggaaataagagagaaaagaagagtaagaagaaatataagagccaccatggcccctaagaagaagcgtaaagtgagccgggtgaacggcagcggcagcggcggcggcatgaaccacgaccaggagttcgacccccctaaggtgtaccctcccgtccccgccgagaagagaaagcccatccgggtcctgagcctgttcgatggcatcgccaccggtctgctggtgctgaaggacctgggcatccaggtggataggtacattgcctccgaggtgtgcgaggactccatcaccgtgggaatggtgcgtcatcagggcaagatcatgtacgtgggcgacgtgcggagcgtgacacagaagcatatccaggagtggggccctttcgacctggtgatcggcggcagcccttgcaatgacctgagcatcgtgaacccagcccggaagggcctgtacgagggaaccggcagactgttcttcgagttttacagactgctgcacgacgcccggcctaaggaaggcgacgaccggcccttcttttggctgttcgagaatgtggtggccatgggagtcagcgacaagcgggatattagccggttcctggagagcaaccccgtgatgatcgatgccaaggaagtgagcgccgcccaccgggccagatacttctggggcaatctgcctggcatgaacagacccctggccagcaccgtgaacgacaagctggagctgcaggagtgcctggagcacggccggatcgccaagttcagcaaggtgagaaccatcaccacccgaagcaacagcatcaaacaaggcaaggaccagcactttcctgtgttcatgaacgagaaggaggacatcctgtggtgtaccgagatggagagagtgttcgggttcccagtccactacacagatgtcagcaacatgtctagactggccagacagagactgctgggaagaagctggtccgtccctgtgatcagacacctgttcgcccctctgaaggagtacttcgcctgcgtgagcagcggcaacagcaacgccaacagccggggccccagcttctctagcggcctggtgccactgtccctgagagggagccacatgggccccatggagatctacaaaaccgtgagcgcctggaagcggcagcctgtgcgcgtgctgagcctgtttcggaatatcgataaagtcctgaaaagcctgggattcctggagagcggctctggctccggcggtggcaccctgaagtacgtggaggatgtgacaaacgtggtcagacgggatgtggagaagtggggccccttcgatctggtgtacggcagcacccaacccctgggcagctcttgtgaccggtgccctggctggtacatgtttcagttccaccggatcctgcagtacgccctgccgagacaggagtcccagcggccattcttttggattttcatggacaacttgctgctgaccgaggatgaccaggaaactaccactcggttcctgcagaccgaagccgtgaccctgcaggacgtgagaggccgggactaccagaacgccatgcgggtgtggtccaacatccctggactgaaaagcaagcacgcacctctgacccctaaagaagaggagtacctgcaggcccaggtgcggagcagaagcaagctggacgcccctaaggtggatctgctggtgaagaattgcctcctgcccctgagagagtacttcaagtatttcagccagaatagtctgcccctgggcggcccaagcagcggcgcccctcctcccagcggcggcagcccagccggctccccaacctctaccgaggagggcacctctgagtccgccacccccgagagcggccctggcacctccaccgagcccagcgagggcagcgcacccggcagccctgccggcagccccacctccacagaggagggaaccagcaccgagcccagcgaaggcagcgccccaggcaccagcaccgagcctagtgagggcggctctggcggcggcagcgcccaggagattaaacggatcaacaagatcagaagaagacttgtgaaagacagcaacaccaagaaggccggcaagacaggccccatgaaaaccctgctggttagagtgatgacacccgatctgagagagcggctggaaaacctgagaaagaagcctgaaaatatcccccagcccatcagcaatacatctagagccaacctgaataagctgctgaccgattacaccgaaatgaagaaggcgatcctgcatgtgtactgggaagagttccagaaggaccctgtgggcctgatgagccgggtggcccagcctgccagcaagaagatcgatcagaacaagctgaaacctgagatggacgagaagggcaacctgaccaccgccggctttgcctgctctcagtgtggccagcccctgttcgtgtacaagctggagcaggtgtctgagaagggcaaggcttacaccaactacttcggacggtgcaatgtggccgagcacgaaaagctgatcctgctggcccagctgaagcccgagaaggatagcgacgaagccgtgacatatagcctgggaaagtttgggcagagggccctggatttctacagcattcatgtgaccaaggagtccacccaccccgtgaagcccctggcccagatcgccggaaacagatacgcctccggacctgtgggaaaggccctgagcgacgcatgtatgggcacaatcgcctccttcctgtctaagtaccaggacatcatcatcgaacaccagaaggtggtgaagggcaaccagaagagactggagagcctgcgggagctggccggcaaggaaaacctggaataccctagcgtgaccctgccacctcagcctcacaccaaggagggcgttgatgcctacaacgaagtgatcgcccgggtgcgaatgtgggtgaacctgaacctgtggcagaagctgaagctaagcagagatgatgccaagcctctgctgagactgaagggattcccttcctttcctctggtcgagagacaggccaacgaagtggactggtgggacatggtgtgtaacgtgaagaagctgatcaacgagaaaaaggaggatggcaaggtgttttggcagaatctggctggctacaagagacaggaagccctgagaccatacctgagcagcgaggaagatcggaagaagggaaagaaattcgctcggtaccagctgggcgacctgctgctgcacctggaaaagaagcacggcgaggactggggaaaggtgtacgacgaggcctgggagcggattgacaagaaagtggaaggcctgagcaagcacatcaagctggaagaggaacggagaagcgaggacgcccagagcaaggccgccctgaccgactggctgcgggctaaggccagcttcgtgatcgagggcctgaaggaggccgacaaggacgagttctgcagatgcgagctgaagctgcagaagtggtacggggacctgcggggaaagcccttcgccatcgaagccgagaacagcatcctggacatcagcggcttcagcaagcagtacaactgtgccttcatctggcagaaggacggcgtgaagaagctgaacctgtacctgatcatcaactacttcaagggcggcaagctgcggttcaagaagatcaaacctgaagccttcgaagccaacagattctacaccgtgatcaacaaaaagagcggcgagatcgtgcccatggaggtgaacttcaacttcgacgaccccaacctgatcatcctgcctctggcctttggcaagagacagggcagagaattcatctggaacgacctgctgtccctggaaaccggcagcctgaagctggccaacggaagagtgatcgagaagacactgtacaacagaagaacccggcaggatgagcctgccctgttcgtggccctgaccttcgagcggcgggaggtcctggactcctccaatatcaaaccaatgaacctgatcggcgtggcaagaggcgaaaacatccccgccgtgatcgccctgaccgaccccgagggctgcccactgagccggtttaaggatagcctgggaaacccaacccacatcctgagaatcggcgagagctataaggagaagcagcggaccatccaggccaagaaggaggtggagcagcggagagccggcggctacagccggaagtacgccagcaaagccaagaatctggcagacgatatggtgagaaacaccgctagagatctgctgtactacgccgtgacccaggatgccatgctgatcttcgccaacctgagccggggcttcggccggcagggcaagcggaccttcatggccgagagacagtacacacggatggaggactggctgaccgccaagctggcctacgagggcctgagcaagacctacctgtccaagacactggcccagtacacctccaagacatgcagcaactgtgggtttaccatcaccagcgccgactacgacagggtgctggagaagctgaagaagacagcaacaggctggatgaccacaattaacggcaaggagctgaaggtggagggccagattacctactacaacagatacaagagacagaacgtagtcaaggacctgtccgtcgagctggatagactgagcgaagaatctgtgaacaacgacatctcctcctggacaaagggcagaagcggagaagctctgagcctcctgaagaaaagattctcccatagacccgtgcaggagaagttcgtgtgcctgaactgcggcttcgagacacacgcagccgagcaagccgccctgaacatcgccagatcctggctgttcctgcggagccaggagtacaagaaataccagacaaacaagacaaccggcaacaccgataagagagccttcgtcgagacctggcagtccttttaccggaagaagcttaaggaggtgtggaaacctgccgtgcggtctggcggatctggcggaggctccacaagcgaggagctgcccgtggtgttcgaggacgtggccgtgtacttcaccagggaggagtggggcatgctggacaagaggcagaaggagctgtacagggacgtgatgaggatgaactacgagctgctggccagcctgggccccgccgccgccaagcccgacctgatcagcaagctggagaggagggccgccccctggatcaagcaccccaacggccccaagtggggcaagggcaggccccccggcaacaccagccccaagaaaaagagaaaagtctaagctgccttctgcggggcttgccttctggccatgcccttcttctctcccttgcacctgtacctcttggtctttgaataaagcctgagtaggaaggctagcaaaaaaaaaaaaaaaaaaaaaaaaaaaaaaaaaaaaaaaaaaaaaaaaaaaaaaaaaaaaaaaaaaaaaaaaaaaaaaaa

SEQ ID NO: 3069 - RNA, 5419 nt, synthetic construct
  source 1..5419: mol_type = other RNA
aggaaataagagagaaaagaagagtaagaagaaatataagagccaccatggcccctaagaagaagcgtaaagtgagccgggtgaacggcagcggcagcggcggcggcatgaaccacgaccaggagttcgacccccctaaggtgtaccctcccgtccccgccgagaagagaaagcccatccgggtcctgagcctgttcgatggcatcgccaccggtctgctggtgctgaaggacctgggcatccaggtggataggtacattgcctccgaggtgtgcgaggactccatcaccgtgggaatggtgcgtcatcagggcaagatcatgtacgtgggcgacgtgcggagcgtgacacagaagcatatccaggagtggggccctttcgacctggtgatcggcggcagcccttgcaatgacctgagcatcgtgaacccagcccggaagggcctgtacgagggaaccggcagactgttcttcgagttttacagactgctgcacgacgcccggcctaaggaaggcgacgaccggcccttcttttggctgttcgagaatgtggtggccatgggagtcagcgacaagcgggatattagccggttcctggagagcaaccccgtgatgatcgatgccaaggaagtgagcgccgcccaccgggccagatacttctggggcaatctgcctggcatgaacagacccctggccagcaccgtgaacgacaagctggagctgcaggagtgcctggagcacggccggatcgccaagttcagcaaggtgagaaccatcaccacccgaagcaacagcatcaaacaaggcaaggaccagcactttcctgtgttcatgaacgagaaggaggacatcctgtggtgtaccgagatggagagagtgttcgggttcccagtccactacacagatgtcagcaacatgtctagactggccagacagagactgctgggaagaagctggtccgtccctgtgatcagacacctgttcgcccctctgaaggagtacttcgcctgcgtgagcagcggcaacagcaacgccaacagccggggccccagcttctctagcggcctggtgccactgtccctgagagggagccacatgggccccatggagatctacaaaaccgtgagcgcctggaagcggcagcctgtgcgcgtgctgagcctgtttcggaatatcgataaagtcctgaaaagcctgggattcctggagagcggctctggctccggcggtggcaccctgaagtacgtggaggatgtgacaaacgtggtcagacgggatgtggagaagtggggccccttcgatctggtgtacggcagcacccaacccctgggcagctcttgtgaccggtgccctggctggtacatgtttcagttccaccggatcctgcagtacgccctgccgagacaggagtcccagcggccattcttttggattttcatggacaacttgctgctgaccgaggatgaccaggaaactaccactcggttcctgcagaccgaagccgtgaccctgcaggacgtgagaggccgggactaccagaacgccatgcgggtgtggtccaacatccctggactgaaaagcaagcacgcacctctgacccctaaagaagaggagtacctgcaggcccaggtgcggagcagaagcaagctggacgcccctaaggtggatctgctggtgaagaattgcctcctgcccctgagagagtacttcaagtatttcagccagaatagtctgcccctgggcggcccaagcagcggcgcccctcctcccagcggcggcagcccagccggctccccaacctctaccgaggagggcacctctgagtccgccacccccgagagcggccctggcacctccaccgagcccagcgagggcagcgcacccggcagccctgccggcagccccacctccacagaggagggaaccagcaccgagcccagcgaaggcagcgccccaggcaccagcaccgagcctagtgagggcggctctggcggcggcagcgcccaggagattaaacggatcaacaagatcagaagaagacttgtgaaagacagcaacaccaagaaggccggcaagacaggccccatgaaaaccctgctggttagagtgatgacacccgatctgagagagcggctggaaaacctgagaaagaagcctgaaaatatcccccagcccatcagcaatacatctagagccaacctgaataagctgctgaccgattacaccgaaatgaagaaggcgatcctgcatgtgtactgggaagagttccagaaggaccctgtgggcctgatgagccgggtggcccagcctgccagcaagaagatcgatcagaacaagctgaaacctgagatggacgagaagggcaacctgaccaccgccggctttgcctgctctcagtgtggccagcccctgttcgtgtacaagctggagcaggtgtctgagaagggcaaggcttacaccaactacttcggacggtgcaatgtggccgagcacgaaaagctgatcctgctggcccagctgaagcccgagaaggatagcgacgaagccgtgacatatagcctgggaaagtttgggcagagggccctggatttctacagcattcatgtgaccaaggagtccacccaccccgtgaagcccctggcccagatcgccggaaacagatacgcctccggacctgtgggaaaggccctgagcgacgcatgtatgggcacaatcgcctccttcctgtctaagtaccaggacatcatcatcgaacaccagaaggtggtgaagggcaaccagaagagactggagagcctgcgggagctggccggcaaggaaaacctggaataccctagcgtgaccctgccacctcagcctcacaccaaggagggcgttgatgcctacaacgaagtgatcgcccgggtgcgaatgtgggtgaacctgaacctgtggcagaagctgaagctaagcagagatgatgccaagcctctgctgagactgaagggattcccttcctttcctctggtcgagagacaggccaacgaagtggactggtgggacatggtgtgtaacgtgaagaagctgatcaacgagaaaaaggaggatggcaaggtgttttggcagaatctggctggctacaagagacaggaagccctgagaccatacctgagcagcgaggaagatcggaagaagggaaagaaattcgctcggtaccagctgggcgacctgctgctgcacctggaaaagaagcacggcgaggactggggaaaggtgtacgacgaggcctgggagcggattgacaagaaagtggaaggcctgagcaagcacatcaagctggaagaggaacggagaagcgaggacgcccagagcaaggccgccctgaccgactggctgcgggctaaggccagcttcgtgatcgagggcctgaaggaggccgacaaggacgagttctgcagatgcgagctgaagctgcagaagtggtacggggacctgcggggaaagcccttcgccatcgaagccgagaacagcatcctggacatcagcggcttcagcaagcagtacaactgtgccttcatctggcagaaggacggcgtgaagaagctgaacctgtacctgatcatcaactacttcaagggcggcaagctgcggttcaagaagatcaaacctgaagccttcgaagccaacagattctacaccgtgatcaacaaaaagagcggcgagatcgtgcccatggaggtgaacttcaacttcgacgaccccaacctgatcatcctgcctctggcctttggcaagagacagggcagagaattcatctggaacgacctgctgtccctggaaaccggcagcctgaagctggccaacggaagagtgatcgagaagacactgtacaacagaagaacccggcaggatgagcctgccctgttcgtggccctgaccttcgagcggcgggaggtcctggactcctccaatatcaaaccaatgaacctgatcggcgtggcaagaggcgaaaacatccccgccgtgatcgccctgaccgaccccgagggctgcccactgagccggtttaaggatagcctgggaaacccaacccacatcctgagaatcggcgagagctataaggagaagcagcggaccatccaggccaagaaggaggtggagcagcggagagccggcggctacagccggaagtacgccagcaaagccaagaatctggcagacgatatggtgagaaacaccgctagagatctgctgtactacgccgtgacccaggatgccatgctgatcttcgccaacctgagccggggcttcggccggcagggcaagcggaccttcatggccgagagacagtacacacggatggaggactggctgaccgccaagctggcctacgagggcctgagcaagacctacctgtccaagacactggcccagtacacctccaagacatgcagcaactgtgggtttaccatcaccagcgccgactacgacagggtgctggagaagctgaagaagacagcaacaggctggatgaccacaattaacggcaaggagctgaaggtggagggccagattacctactacaacagatacaagagacagaacgtagtcaaggacctgtccgtcgagctggatagactgagcgaagaatctgtgaacaacgacatctcctcctggacaaagggcagaagcggagaagctctgagcctcctgaagaaaagattctcccatagacccgtgcaggagaagttcgtgtgcctgaactgcggcttcgagacacacgcagccgagcaagccgccctgaacatcgccagatcctggctgttcctgcggagccaggagtacaagaaataccagacaaacaagacaaccggcaacaccgataagagagccttcgtcgagacctggcagtccttttaccggaagaagcttaaggaggtgtggaaacctgccgtgcggtctggcggatctggcggaggctccacaagcacccaggtgagcgtgaccttcgacgacgtggccgtgaccttcaccagggaggagtggaggcagctggaccccgcccagaggaccctgtaccaggaggtgatgctggagaactgcaggctgctggtgagcctgggctgccccgtgcccaggcccgagctgatcttccagctggagcagggccagaagctgtggaccgtgaaggaggacctgagcaggagcacctgccccggcaagaggtacaggaccagccccaagaaaaagagaaaagtctaagctgccttctgcggggcttgccttctggccatgcccttcttctctcccttgcacctgtacctcttggtctttgaataaagcctgagtaggaaggctagcaaaaaaaaaaaaaaaaaaaaaaaaaaaaaaaaaaaaaaaaaaaaaaaaaaaaaaaaaaaaaaaaaaaaaaaaaaaaaaaa

SEQ ID NO: 3070 - RNA, 5419 nt, synthetic construct
  source 1..5419: mol_type = other RNA
aggaaataagagagaaaagaagagtaagaagaaatataagagccaccatggcccctaagaagaagcgtaaagtgagccgggtgaacggcagcggcagcggcggcggcatgaaccacgaccaggagttcgacccccctaaggtgtaccctcccgtccccgccgagaagagaaagcccatccgggtcctgagcctgttcgatggcatcgccaccggtctgctggtgctgaaggacctgggcatccaggtggataggtacattgcctccgaggtgtgcgaggactccatcaccgtgggaatggtgcgtcatcagggcaagatcatgtacgtgggcgacgtgcggagcgtgacacagaagcatatccaggagtggggccctttcgacctggtgatcggcggcagcccttgcaatgacctgagcatcgtgaacccagcccggaagggcctgtacgagggaaccggcagactgttcttcgagttttacagactgctgcacgacgcccggcctaaggaaggcgacgaccggcccttcttttggctgttcgagaatgtggtggccatgggagtcagcgacaagcgggatattagccggttcctggagagcaaccccgtgatgatcgatgccaaggaagtgagcgccgcccaccgggccagatacttctggggcaatctgcctggcatgaacagacccctggccagcaccgtgaacgacaagctggagctgcaggagtgcctggagcacggccggatcgccaagttcagcaaggtgagaaccatcaccacccgaagcaacagcatcaaacaaggcaaggaccagcactttcctgtgttcatgaacgagaaggaggacatcctgtggtgtaccgagatggagagagtgttcgggttcccagtccactacacagatgtcagcaacatgtctagactggccagacagagactgctgggaagaagctggtccgtccctgtgatcagacacctgttcgcccctctgaaggagtacttcgcctgcgtgagcagcggcaacagcaacgccaacagccggggccccagcttctctagcggcctggtgccactgtccctgagagggagccacatgggccccatggagatctacaaaaccgtgagcgcctggaagcggcagcctgtgcgcgtgctgagcctgtttcggaatatcgataaagtcctgaaaagcctgggattcctggagagcggctctggctccggcggtggcaccctgaagtacgtggaggatgtgacaaacgtggtcagacgggatgtggagaagtggggccccttcgatctggtgtacggcagcacccaacccctgggcagctcttgtgaccggtgccctggctggtacatgtttcagttccaccggatcctgcagtacgccctgccgagacaggagtcccagcggccattcttttggattttcatggacaacttgctgctgaccgaggatgaccaggaaactaccactcggttcctgcagaccgaagccgtgaccctgcaggacgtgagaggccgggactaccagaacgccatgcgggtgtggtccaacatccctggactgaaaagcaagcacgcacctctgacccctaaagaagaggagtacctgcaggcccaggtgcggagcagaagcaagctggacgcccctaaggtggatctgctggtgaagaattgcctcctgcccctgagagagtacttcaagtatttcagccagaatagtctgcccctgggcggcccaagcagcggcgcccctcctcccagcggcggcagcccagccggctccccaacctctaccgaggagggcacctctgagtccgccacccccgagagcggccctggcacctccaccgagcccagcgagggcagcgcacccggcagccctgccggcagccccacctccacagaggagggaaccagcaccgagcccagcgaaggcagcgccccaggcaccagcaccgagcctagtgagggcggctctggcggcggcagcgcccaggagattaaacggatcaacaagatcagaagaagacttgtgaaagacagcaacaccaagaaggccggcaagacaggccccatgaaaaccctgctggttagagtgatgacacccgatctgagagagcggctggaaaacctgagaaagaagcctgaaaatatcccccagcccatcagcaatacatctagagccaacctgaataagctgctgaccgattacaccgaaatgaagaaggcgatcctgcatgtgtactgggaagagttccagaaggaccctgtgggcctgatgagccgggtggcccagcctgccagcaagaagatcgatcagaacaagctgaaacctgagatggacgagaagggcaacctgaccaccgccggctttgcctgctctcagtgtggccagcccctgttcgtgtacaagctggagcaggtgtctgagaagggcaaggcttacaccaactacttcggacggtgcaatgtggccgagcacgaaaagctgatcctgctggcccagctgaagcccgagaaggatagcgacgaagccgtgacatatagcctgggaaagtttgggcagagggccctggatttctacagcattcatgtgaccaaggagtccacccaccccgtgaagcccctggcccagatcgccggaaacagatacgcctccggacctgtgggaaaggccctgagcgacgcatgtatgggcacaatcgcctccttcctgtctaagtaccaggacatcatcatcgaacaccagaaggtggtgaagggcaaccagaagagactggagagcctgcgggagctggccggcaaggaaaacctggaataccctagcgtgaccctgccacctcagcctcacaccaaggagggcgttgatgcctacaacgaagtgatcgcccgggtgcgaatgtgggtgaacctgaacctgtggcagaagctgaagctaagcagagatgatgccaagcctctgctgagactgaagggattcccttcctttcctctggtcgagagacaggccaacgaagtggactggtgggacatggtgtgtaacgtgaagaagctgatcaacgagaaaaaggaggatggcaaggtgttttggcagaatctggctggctacaagagacaggaagccctgagaccatacctgagcagcgaggaagatcggaagaagggaaagaaattcgctcggtaccagctgggcgacctgctgctgcacctggaaaagaagcacggcgaggactggggaaaggtgtacgacgaggcctgggagcggattgacaagaaagtggaaggcctgagcaagcacatcaagctggaagaggaacggagaagcgaggacgcccagagcaaggccgccctgaccgactggctgcgggctaaggccagcttcgtgatcgagggcctgaaggaggccgacaaggacgagttctgcagatgcgagctgaagctgcagaagtggtacggggacctgcggggaaagcccttcgccatcgaagccgagaacagcatcctggacatcagcggcttcagcaagcagtacaactgtgccttcatctggcagaaggacggcgtgaagaagctgaacctgtacctgatcatcaactacttcaagggcggcaagctgcggttcaagaagatcaaacctgaagccttcgaagccaacagattctacaccgtgatcaacaaaaagagcggcgagatcgtgcccatggaggtgaacttcaacttcgacgaccccaacctgatcatcctgcctctggcctttggcaagagacagggcagagaattcatctggaacgacctgctgtccctggaaaccggcagcctgaagctggccaacggaagagtgatcgagaagacactgtacaacagaagaacccggcaggatgagcctgccctgttcgtggccctgaccttcgagcggcgggaggtcctggactcctccaatatcaaaccaatgaacctgatcggcgtggcaagaggcgaaaacatccccgccgtgatcgccctgaccgaccccgagggctgcccactgagccggtttaaggatagcctgggaaacccaacccacatcctgagaatcggcgagagctataaggagaagcagcggaccatccaggccaagaaggaggtggagcagcggagagccggcggctacagccggaagtacgccagcaaagccaagaatctggcagacgatatggtgagaaacaccgctagagatctgctgtactacgccgtgacccaggatgccatgctgatcttcgccaacctgagccggggcttcggccggcagggcaagcggaccttcatggccgagagacagtacacacggatggaggactggctgaccgccaagctggcctacgagggcctgagcaagacctacctgtccaagacactggcccagtacacctccaagacatgcagcaactgtgggtttaccatcaccagcgccgactacgacagggtgctggagaagctgaagaagacagcaacaggctggatgaccacaattaacggcaaggagctgaaggtggagggccagattacctactacaacagatacaagagacagaacgtagtcaaggacctgtccgtcgagctggatagactgagcgaagaatctgtgaacaacgacatctcctcctggacaaagggcagaagcggagaagctctgagcctcctgaagaaaagattctcccatagacccgtgcaggagaagttcgtgtgcctgaactgcggcttcgagacacacgcagccgagcaagccgccctgaacatcgccagatcctggctgttcctgcggagccaggagtacaagaaataccagacaaacaagacaaccggcaacaccgataagagagccttcgtcgagacctggcagtccttttaccggaagaagcttaaggaggtgtggaaacctgccgtgcggtctggcggatctggcggaggctccacaagcagccagggcctggtggccttcgaggacgtggccgtgtacttcagcctggaggagtgggagaggctggacgccgaccagagggagctgtaccaggaggtgatgcaggagaactacggcatcctggtgagcctgggctaccccatccccaagcccgacctgatcttcaggctggagcagggcgaggagccctgggtgcccgacagccccaggcccgaggagggcgacatcgtgaccggcgtgtacaccagccccaagaaaaagagaaaagtctaagctgccttctgcggggcttgccttctggccatgcccttcttctctcccttgcacctgtacctcttggtctttgaataaagcctgagtaggaaggctagcaaaaaaaaaaaaaaaaaaaaaaaaaaaaaaaaaaaaaaaaaaaaaaaaaaaaaaaaaaaaaaaaaaaaaaaaaaaaaaaa

SEQ ID NO: 3071 - RNA, 5419 nt, synthetic construct
  source 1..5419: mol_type = other RNA
aggaaataagagagaaaagaagagtaagaagaaatataagagccaccatggcccctaagaagaagcgtaaagtgagccgggtgaacggcagcggcagcggcggcggcatgaaccacgaccaggagttcgacccccctaaggtgtaccctcccgtccccgccgagaagagaaagcccatccgggtcctgagcctgttcgatggcatcgccaccggtctgctggtgctgaaggacctgggcatccaggtggataggtacattgcctccgaggtgtgcgaggactccatcaccgtgggaatggtgcgtcatcagggcaagatcatgtacgtgggcgacgtgcggagcgtgacacagaagcatatccaggagtggggccctttcgacctggtgatcggcggcagcccttgcaatgacctgagcatcgtgaacccagcccggaagggcctgtacgagggaaccggcagactgttcttcgagttttacagactgctgcacgacgcccggcctaaggaaggcgacgaccggcccttcttttggctgttcgagaatgtggtggccatgggagtcagcgacaagcgggatattagccggttcctggagagcaaccccgtgatgatcgatgccaaggaagtgagcgccgcccaccgggccagatacttctggggcaatctgcctggcatgaacagacccctggccagcaccgtgaacgacaagctggagctgcaggagtgcctggagcacggccggatcgccaagttcagcaaggtgagaaccatcaccacccgaagcaacagcatcaaacaaggcaaggaccagcactttcctgtgttcatgaacgagaaggaggacatcctgtggtgtaccgagatggagagagtgttcgggttcccagtccactacacagatgtcagcaacatgtctagactggccagacagagactgctgggaagaagctggtccgtccctgtgatcagacacctgttcgcccctctgaaggagtacttcgcctgcgtgagcagcggcaacagcaacgccaacagccggggccccagcttctctagcggcctggtgccactgtccctgagagggagccacatgggccccatggagatctacaaaaccgtgagcgcctggaagcggcagcctgtgcgcgtgctgagcctgtttcggaatatcgataaagtcctgaaaagcctgggattcctggagagcggctctggctccggcggtggcaccctgaagtacgtggaggatgtgacaaacgtggtcagacgggatgtggagaagtggggccccttcgatctggtgtacggcagcacccaacccctgggcagctcttgtgaccggtgccctggctggtacatgtttcagttccaccggatcctgcagtacgccctgccgagacaggagtcccagcggccattcttttggattttcatggacaacttgctgctgaccgaggatgaccaggaaactaccactcggttcctgcagaccgaagccgtgaccctgcaggacgtgagaggccgggactaccagaacgccatgcgggtgtggtccaacatccctggactgaaaagcaagcacgcacctctgacccctaaagaagaggagtacctgcaggcccaggtgcggagcagaagcaagctggacgcccctaaggtggatctgctggtgaagaattgcctcctgcccctgagagagtacttcaagtatttcagccagaatagtctgcccctgggcggcccaagcagcggcgcccctcctcccagcggcggcagcccagccggctccccaacctctaccgaggagggcacctctgagtccgccacccccgagagcggccctggcacctccaccgagcccagcgagggcagcgcacccggcagccctgccggcagccccacctccacagaggagggaaccagcaccgagcccagcgaaggcagcgccccaggcaccagcaccgagcctagtgagggcggctctggcggcggcagcgcccaggagattaaacggatcaacaagatcagaagaagacttgtgaaagacagcaacaccaagaaggccggcaagacaggccccatgaaaaccctgctggttagagtgatgacacccgatctgagagagcggctggaaaacctgagaaagaagcctgaaaatatcccccagcccatcagcaatacatctagagccaacctgaataagctgctgaccgattacaccgaaatgaagaaggcgatcctgcatgtgtactgggaagagttccagaaggaccctgtgggcctgatgagccgggtggcccagcctgccagcaagaagatcgatcagaacaagctgaaacctgagatggacgagaagggcaacctgaccaccgccggctttgcctgctctcagtgtggccagcccctgttcgtgtacaagctggagcaggtgtctgagaagggcaaggcttacaccaactacttcggacggtgcaatgtggccgagcacgaaaagctgatcctgctggcccagctgaagcccgagaaggatagcgacgaagccgtgacatatagcctgggaaagtttgggcagagggccctggatttctacagcattcatgtgaccaaggagtccacccaccccgtgaagcccctggcccagatcgccggaaacagatacgcctccggacctgtgggaaaggccctgagcgacgcatgtatgggcacaatcgcctccttcctgtctaagtaccaggacatcatcatcgaacaccagaaggtggtgaagggcaaccagaagagactggagagcctgcgggagctggccggcaaggaaaacctggaataccctagcgtgaccctgccacctcagcctcacaccaaggagggcgttgatgcctacaacgaagtgatcgcccgggtgcgaatgtgggtgaacctgaacctgtggcagaagctgaagctaagcagagatgatgccaagcctctgctgagactgaagggattcccttcctttcctctggtcgagagacaggccaacgaagtggactggtgggacatggtgtgtaacgtgaagaagctgatcaacgagaaaaaggaggatggcaaggtgttttggcagaatctggctggctacaagagacaggaagccctgagaccatacctgagcagcgaggaagatcggaagaagggaaagaaattcgctcggtaccagctgggcgacctgctgctgcacctggaaaagaagcacggcgaggactggggaaaggtgtacgacgaggcctgggagcggattgacaagaaagtggaaggcctgagcaagcacatcaagctggaagaggaacggagaagcgaggacgcccagagcaaggccgccctgaccgactggctgcgggctaaggccagcttcgtgatcgagggcctgaaggaggccgacaaggacgagttctgcagatgcgagctgaagctgcagaagtggtacggggacctgcggggaaagcccttcgccatcgaagccgagaacagcatcctggacatcagcggcttcagcaagcagtacaactgtgccttcatctggcagaaggacggcgtgaagaagctgaacctgtacctgatcatcaactacttcaagggcggcaagctgcggttcaagaagatcaaacctgaagccttcgaagccaacagattctacaccgtgatcaacaaaaagagcggcgagatcgtgcccatggaggtgaacttcaacttcgacgaccccaacctgatcatcctgcctctggcctttggcaagagacagggcagagaattcatctggaacgacctgctgtccctggaaaccggcagcctgaagctggccaacggaagagtgatcgagaagacactgtacaacagaagaacccggcaggatgagcctgccctgttcgtggccctgaccttcgagcggcgggaggtcctggactcctccaatatcaaaccaatgaacctgatcggcgtggcaagaggcgaaaacatccccgccgtgatcgccctgaccgaccccgagggctgcccactgagccggtttaaggatagcctgggaaacccaacccacatcctgagaatcggcgagagctataaggagaagcagcggaccatccaggccaagaaggaggtggagcagcggagagccggcggctacagccggaagtacgccagcaaagccaagaatctggcagacgatatggtgagaaacaccgctagagatctgctgtactacgccgtgacccaggatgccatgctgatcttcgccaacctgagccggggcttcggccggcagggcaagcggaccttcatggccgagagacagtacacacggatggaggactggctgaccgccaagctggcctacgagggcctgagcaagacctacctgtccaagacactggcccagtacacctccaagacatgcagcaactgtgggtttaccatcaccagcgccgactacgacagggtgctggagaagctgaagaagacagcaacaggctggatgaccacaattaacggcaaggagctgaaggtggagggccagattacctactacaacagatacaagagacagaacgtagtcaaggacctgtccgtcgagctggatagactgagcgaagaatctgtgaacaacgacatctcctcctggacaaagggcagaagcggagaagctctgagcctcctgaagaaaagattctcccatagacccgtgcaggagaagttcgtgtgcctgaactgcggcttcgagacacacgcagccgagcaagccgccctgaacatcgccagatcctggctgttcctgcggagccaggagtacaagaaataccagacaaacaagacaaccggcaacaccgataagagagccttcgtcgagacctggcagtccttttaccggaagaagcttaaggaggtgtggaaacctgccgtgcggtctggcggatctggcggaggctccacaagcttccaggagcccgtgaccttcgaggacgtggccgtgtacttcacccagaaccagtgggccagcctggacagcgcccagagggccctgtacagggaggtgatgctggagaactacgccaacgtggccagcctggtgagccccttccccaggcccgacctgatcagccagctggagaggggcgaggccccctgggaccccgacccctgggaggccgaggacctgaggggcatctgccccggcggcaccagccccaagaaaaagagaaaagtctaagctgccttctgcggggcttgccttctggccatgcccttcttctctcccttgcacctgtacctcttggtctttgaataaagcctgagtaggaaggctagcaaaaaaaaaaaaaaaaaaaaaaaaaaaaaaaaaaaaaaaaaaaaaaaaaaaaaaaaaaaaaaaaaaaaaaaaaaaaaaaa

SEQ ID NO: 3072 - RNA, 5419 nt, synthetic construct
  source 1..5419: mol_type = other RNA
aggaaataagagagaaaagaagagtaagaagaaatataagagccaccatggcccctaagaagaagcgtaaagtgagccgggtgaacggcagcggcagcggcggcggcatgaaccacgaccaggagttcgacccccctaaggtgtaccctcccgtccccgccgagaagagaaagcccatccgggtcctgagcctgttcgatggcatcgccaccggtctgctggtgctgaaggacctgggcatccaggtggataggtacattgcctccgaggtgtgcgaggactccatcaccgtgggaatggtgcgtcatcagggcaagatcatgtacgtgggcgacgtgcggagcgtgacacagaagcatatccaggagtggggccctttcgacctggtgatcggcggcagcccttgcaatgacctgagcatcgtgaacccagcccggaagggcctgtacgagggaaccggcagactgttcttcgagttttacagactgctgcacgacgcccggcctaaggaaggcgacgaccggcccttcttttggctgttcgagaatgtggtggccatgggagtcagcgacaagcgggatattagccggttcctggagagcaaccccgtgatgatcgatgccaaggaagtgagcgccgcccaccgggccagatacttctggggcaatctgcctggcatgaacagacccctggccagcaccgtgaacgacaagctggagctgcaggagtgcctggagcacggccggatcgccaagttcagcaaggtgagaaccatcaccacccgaagcaacagcatcaaacaaggcaaggaccagcactttcctgtgttcatgaacgagaaggaggacatcctgtggtgtaccgagatggagagagtgttcgggttcccagtccactacacagatgtcagcaacatgtctagactggccagacagagactgctgggaagaagctggtccgtccctgtgatcagacacctgttcgcccctctgaaggagtacttcgcctgcgtgagcagcggcaacagcaacgccaacagccggggccccagcttctctagcggcctggtgccactgtccctgagagggagccacatgggccccatggagatctacaaaaccgtgagcgcctggaagcggcagcctgtgcgcgtgctgagcctgtttcggaatatcgataaagtcctgaaaagcctgggattcctggagagcggctctggctccggcggtggcaccctgaagtacgtggaggatgtgacaaacgtggtcagacgggatgtggagaagtggggccccttcgatctggtgtacggcagcacccaacccctgggcagctcttgtgaccggtgccctggctggtacatgtttcagttccaccggatcctgcagtacgccctgccgagacaggagtcccagcggccattcttttggattttcatggacaacttgctgctgaccgaggatgaccaggaaactaccactcggttcctgcagaccgaagccgtgaccctgcaggacgtgagaggccgggactaccagaacgccatgcgggtgtggtccaacatccctggactgaaaagcaagcacgcacctctgacccctaaagaagaggagtacctgcaggcccaggtgcggagcagaagcaagctggacgcccctaaggtggatctgctggtgaagaattgcctcctgcccctgagagagtacttcaagtatttcagccagaatagtctgcccctgggcggcccaagcagcggcgcccctcctcccagcggcggcagcccagccggctccccaacctctaccgaggagggcacctctgagtccgccacccccgagagcggccctggcacctccaccgagcccagcgagggcagcgcacccggcagccctgccggcagccccacctccacagaggagggaaccagcaccgagcccagcgaaggcagcgccccaggcaccagcaccgagcctagtgagggcggctctggcggcggcagcgcccaggagattaaacggatcaacaagatcagaagaagacttgtgaaagacagcaacaccaagaaggccggcaagacaggccccatgaaaaccctgctggttagagtgatgacacccgatctgagagagcggctggaaaacctgagaaagaagcctgaaaatatcccccagcccatcagcaatacatctagagccaacctgaataagctgctgaccgattacaccgaaatgaagaaggcgatcctgcatgtgtactgggaagagttccagaaggaccctgtgggcctgatgagccgggtggcccagcctgccagcaagaagatcgatcagaacaagctgaaacctgagatggacgagaagggcaacctgaccaccgccggctttgcctgctctcagtgtggccagcccctgttcgtgtacaagctggagcaggtgtctgagaagggcaaggcttacaccaactacttcggacggtgcaatgtggccgagcacgaaaagctgatcctgctggcccagctgaagcccgagaaggatagcgacgaagccgtgacatatagcctgggaaagtttgggcagagggccctggatttctacagcattcatgtgaccaaggagtccacccaccccgtgaagcccctggcccagatcgccggaaacagatacgcctccggacctgtgggaaaggccctgagcgacgcatgtatgggcacaatcgcctccttcctgtctaagtaccaggacatcatcatcgaacaccagaaggtggtgaagggcaaccagaagagactggagagcctgcgggagctggccggcaaggaaaacctggaataccctagcgtgaccctgccacctcagcctcacaccaaggagggcgttgatgcctacaacgaagtgatcgcccgggtgcgaatgtgggtgaacctgaacctgtggcagaagctgaagctaagcagagatgatgccaagcctctgctgagactgaagggattcccttcctttcctctggtcgagagacaggccaacgaagtggactggtgggacatggtgtgtaacgtgaagaagctgatcaacgagaaaaaggaggatggcaaggtgttttggcagaatctggctggctacaagagacaggaagccctgagaccatacctgagcagcgaggaagatcggaagaagggaaagaaattcgctcggtaccagctgggcgacctgctgctgcacctggaaaagaagcacggcgaggactggggaaaggtgtacgacgaggcctgggagcggattgacaagaaagtggaaggcctgagcaagcacatcaagctggaagaggaacggagaagcgaggacgcccagagcaaggccgccctgaccgactggctgcgggctaaggccagcttcgtgatcgagggcctgaaggaggccgacaaggacgagttctgcagatgcgagctgaagctgcagaagtggtacggggacctgcggggaaagcccttcgccatcgaagccgagaacagcatcctggacatcagcggcttcagcaagcagtacaactgtgccttcatctggcagaaggacggcgtgaagaagctgaacctgtacctgatcatcaactacttcaagggcggcaagctgcggttcaagaagatcaaacctgaagccttcgaagccaacagattctacaccgtgatcaacaaaaagagcggcgagatcgtgcccatggaggtgaacttcaacttcgacgaccccaacctgatcatcctgcctctggcctttggcaagagacagggcagagaattcatctggaacgacctgctgtccctggaaaccggcagcctgaagctggccaacggaagagtgatcgagaagacactgtacaacagaagaacccggcaggatgagcctgccctgttcgtggccctgaccttcgagcggcgggaggtcctggactcctccaatatcaaaccaatgaacctgatcggcgtggcaagaggcgaaaacatccccgccgtgatcgccctgaccgaccccgagggctgcccactgagccggtttaaggatagcctgggaaacccaacccacatcctgagaatcggcgagagctataaggagaagcagcggaccatccaggccaagaaggaggtggagcagcggagagccggcggctacagccggaagtacgccagcaaagccaagaatctggcagacgatatggtgagaaacaccgctagagatctgctgtactacgccgtgacccaggatgccatgctgatcttcgccaacctgagccggggcttcggccggcagggcaagcggaccttcatggccgagagacagtacacacggatggaggactggctgaccgccaagctggcctacgagggcctgagcaagacctacctgtccaagacactggcccagtacacctccaagacatgcagcaactgtgggtttaccatcaccagcgccgactacgacagggtgctggagaagctgaagaagacagcaacaggctggatgaccacaattaacggcaaggagctgaaggtggagggccagattacctactacaacagatacaagagacagaacgtagtcaaggacctgtccgtcgagctggatagactgagcgaagaatctgtgaacaacgacatctcctcctggacaaagggcagaagcggagaagctctgagcctcctgaagaaaagattctcccatagacccgtgcaggagaagttcgtgtgcctgaactgcggcttcgagacacacgcagccgagcaagccgccctgaacatcgccagatcctggctgttcctgcggagccaggagtacaagaaataccagacaaacaagacaaccggcaacaccgataagagagccttcgtcgagacctggcagtccttttaccggaagaagcttaaggaggtgtggaaacctgccgtgcggtctggcggatctggcggaggctccacaagcgtgaccttcgacgacgtggccgtgaacttcaccatggaggagtgggccctgctggaccccagccagaagaagctgtacagggacgtgatgtgggagaacttcaggaacgtgaccgccatcggcaggaactgggacaaccagcagatcgaggaccagtacaagaactacaggaacaacctgaggaagaccagcgccgacttccagagcctgcagaagcacgccatgaccaaccccgaggagaagaccagccccaagaaaaagagaaaagtctaagctgccttctgcggggcttgccttctggccatgcccttcttctctcccttgcacctgtacctcttggtctttgaataaagcctgagtaggaaggctagcaaaaaaaaaaaaaaaaaaaaaaaaaaaaaaaaaaaaaaaaaaaaaaaaaaaaaaaaaaaaaaaaaaaaaaaaaaaaaaaa

SEQ ID NO: 3073 - RNA, 5419 nt, synthetic construct
  source 1..5419: mol_type = other RNA
aggaaataagagagaaaagaagagtaagaagaaatataagagccaccatggcccctaagaagaagcgtaaagtgagccgggtgaacggcagcggcagcggcggcggcatgaaccacgaccaggagttcgacccccctaaggtgtaccctcccgtccccgccgagaagagaaagcccatccgggtcctgagcctgttcgatggcatcgccaccggtctgctggtgctgaaggacctgggcatccaggtggataggtacattgcctccgaggtgtgcgaggactccatcaccgtgggaatggtgcgtcatcagggcaagatcatgtacgtgggcgacgtgcggagcgtgacacagaagcatatccaggagtggggccctttcgacctggtgatcggcggcagcccttgcaatgacctgagcatcgtgaacccagcccggaagggcctgtacgagggaaccggcagactgttcttcgagttttacagactgctgcacgacgcccggcctaaggaaggcgacgaccggcccttcttttggctgttcgagaatgtggtggccatgggagtcagcgacaagcgggatattagccggttcctggagagcaaccccgtgatgatcgatgccaaggaagtgagcgccgcccaccgggccagatacttctggggcaatctgcctggcatgaacagacccctggccagcaccgtgaacgacaagctggagctgcaggagtgcctggagcacggccggatcgccaagttcagcaaggtgagaaccatcaccacccgaagcaacagcatcaaacaaggcaaggaccagcactttcctgtgttcatgaacgagaaggaggacatcctgtggtgtaccgagatggagagagtgttcgggttcccagtccactacacagatgtcagcaacatgtctagactggccagacagagactgctgggaagaagctggtccgtccctgtgatcagacacctgttcgcccctctgaaggagtacttcgcctgcgtgagcagcggcaacagcaacgccaacagccggggccccagcttctctagcggcctggtgccactgtccctgagagggagccacatgggccccatggagatctacaaaaccgtgagcgcctggaagcggcagcctgtgcgcgtgctgagcctgtttcggaatatcgataaagtcctgaaaagcctgggattcctggagagcggctctggctccggcggtggcaccctgaagtacgtggaggatgtgacaaacgtggtcagacgggatgtggagaagtggggccccttcgatctggtgtacggcagcacccaacccctgggcagctcttgtgaccggtgccctggctggtacatgtttcagttccaccggatcctgcagtacgccctgccgagacaggagtcccagcggccattcttttggattttcatggacaacttgctgctgaccgaggatgaccaggaaactaccactcggttcctgcagaccgaagccgtgaccctgcaggacgtgagaggccgggactaccagaacgccatgcgggtgtggtccaacatccctggactgaaaagcaagcacgcacctctgacccctaaagaagaggagtacctgcaggcccaggtgcggagcagaagcaagctggacgcccctaaggtggatctgctggtgaagaattgcctcctgcccctgagagagtacttcaagtatttcagccagaatagtctgcccctgggcggcccaagcagcggcgcccctcctcccagcggcggcagcccagccggctccccaacctctaccgaggagggcacctctgagtccgccacccccgagagcggccctggcacctccaccgagcccagcgagggcagcgcacccggcagccctgccggcagccccacctccacagaggagggaaccagcaccgagcccagcgaaggcagcgccccaggcaccagcaccgagcctagtgagggcggctctggcggcggcagcgcccaggagattaaacggatcaacaagatcagaagaagacttgtgaaagacagcaacaccaagaaggccggcaagacaggccccatgaaaaccctgctggttagagtgatgacacccgatctgagagagcggctggaaaacctgagaaagaagcctgaaaatatcccccagcccatcagcaatacatctagagccaacctgaataagctgctgaccgattacaccgaaatgaagaaggcgatcctgcatgtgtactgggaagagttccagaaggaccctgtgggcctgatgagccgggtggcccagcctgccagcaagaagatcgatcagaacaagctgaaacctgagatggacgagaagggcaacctgaccaccgccggctttgcctgctctcagtgtggccagcccctgttcgtgtacaagctggagcaggtgtctgagaagggcaaggcttacaccaactacttcggacggtgcaatgtggccgagcacgaaaagctgatcctgctggcccagctgaagcccgagaaggatagcgacgaagccgtgacatatagcctgggaaagtttgggcagagggccctggatttctacagcattcatgtgaccaaggagtccacccaccccgtgaagcccctggcccagatcgccggaaacagatacgcctccggacctgtgggaaaggccctgagcgacgcatgtatgggcacaatcgcctccttcctgtctaagtaccaggacatcatcatcgaacaccagaaggtggtgaagggcaaccagaagagactggagagcctgcgggagctggccggcaaggaaaacctggaataccctagcgtgaccctgccacctcagcctcacaccaaggagggcgttgatgcctacaacgaagtgatcgcccgggtgcgaatgtgggtgaacctgaacctgtggcagaagctgaagctaagcagagatgatgccaagcctctgctgagactgaagggattcccttcctttcctctggtcgagagacaggccaacgaagtggactggtgggacatggtgtgtaacgtgaagaagctgatcaacgagaaaaaggaggatggcaaggtgttttggcagaatctggctggctacaagagacaggaagccctgagaccatacctgagcagcgaggaagatcggaagaagggaaagaaattcgctcggtaccagctgggcgacctgctgctgcacctggaaaagaagcacggcgaggactggggaaaggtgtacgacgaggcctgggagcggattgacaagaaagtggaaggcctgagcaagcacatcaagctggaagaggaacggagaagcgaggacgcccagagcaaggccgccctgaccgactggctgcgggctaaggccagcttcgtgatcgagggcctgaaggaggccgacaaggacgagttctgcagatgcgagctgaagctgcagaagtggtacggggacctgcggggaaagcccttcgccatcgaagccgagaacagcatcctggacatcagcggcttcagcaagcagtacaactgtgccttcatctggcagaaggacggcgtgaagaagctgaacctgtacctgatcatcaactacttcaagggcggcaagctgcggttcaagaagatcaaacctgaagccttcgaagccaacagattctacaccgtgatcaacaaaaagagcggcgagatcgtgcccatggaggtgaacttcaacttcgacgaccccaacctgatcatcctgcctctggcctttggcaagagacagggcagagaattcatctggaacgacctgctgtccctggaaaccggcagcctgaagctggccaacggaagagtgatcgagaagacactgtacaacagaagaacccggcaggatgagcctgccctgttcgtggccctgaccttcgagcggcgggaggtcctggactcctccaatatcaaaccaatgaacctgatcggcgtggcaagaggcgaaaacatccccgccgtgatcgccctgaccgaccccgagggctgcccactgagccggtttaaggatagcctgggaaacccaacccacatcctgagaatcggcgagagctataaggagaagcagcggaccatccaggccaagaaggaggtggagcagcggagagccggcggctacagccggaagtacgccagcaaagccaagaatctggcagacgatatggtgagaaacaccgctagagatctgctgtactacgccgtgacccaggatgccatgctgatcttcgccaacctgagccggggcttcggccggcagggcaagcggaccttcatggccgagagacagtacacacggatggaggactggctgaccgccaagctggcctacgagggcctgagcaagacctacctgtccaagacactggcccagtacacctccaagacatgcagcaactgtgggtttaccatcaccagcgccgactacgacagggtgctggagaagctgaagaagacagcaacaggctggatgaccacaattaacggcaaggagctgaaggtggagggccagattacctactacaacagatacaagagacagaacgtagtcaaggacctgtccgtcgagctggatagactgagcgaagaatctgtgaacaacgacatctcctcctggacaaagggcagaagcggagaagctctgagcctcctgaagaaaagattctcccatagacccgtgcaggagaagttcgtgtgcctgaactgcggcttcgagacacacgcagccgagcaagccgccctgaacatcgccagatcctggctgttcctgcggagccaggagtacaagaaataccagacaaacaagacaaccggcaacaccgataagagagccttcgtcgagacctggcagtccttttaccggaagaagcttaaggaggtgtggaaacctgccgtgcggtctggcggatctggcggaggctccacaagccccaaggtgcccgtgagcttcgaggacgtggccatgtacttcaccaagaccgagtggaagctgctggaccacaggcagaggaagctgtacaagcaggtgatgctggagaactaccaccacctggtgagcctgggcttcagcttcgccaagccccagctggtgatccagctggagcagggccagaagccctgggtggccgacgtgcacaggatgaggatcaccaccggcatgcaggccggcgacaccagccccaagaaaaagagaaaagtctaagctgccttctgcggggcttgccttctggccatgcccttcttctctcccttgcacctgtacctcttggtctttgaataaagcctgagtaggaaggctagcaaaaaaaaaaaaaaaaaaaaaaaaaaaaaaaaaaaaaaaaaaaaaaaaaaaaaaaaaaaaaaaaaaaaaaaaaaaaaaaa

SEQ ID NO: 3074 - RNA, 5419 nt, synthetic construct
  source 1..5419: mol_type = other RNA
aggaaataagagagaaaagaagagtaagaagaaatataagagccaccatggcccctaagaagaagcgtaaagtgagccgggtgaacggcagcggcagcggcggcggcatgaaccacgaccaggagttcgacccccctaaggtgtaccctcccgtccccgccgagaagagaaagcccatccgggtcctgagcctgttcgatggcatcgccaccggtctgctggtgctgaaggacctgggcatccaggtggataggtacattgcctccgaggtgtgcgaggactccatcaccgtgggaatggtgcgtcatcagggcaagatcatgtacgtgggcgacgtgcggagcgtgacacagaagcatatccaggagtggggccctttcgacctggtgatcggcggcagcccttgcaatgacctgagcatcgtgaacccagcccggaagggcctgtacgagggaaccggcagactgttcttcgagttttacagactgctgcacgacgcccggcctaaggaaggcgacgaccggcccttcttttggctgttcgagaatgtggtggccatgggagtcagcgacaagcgggatattagccggttcctggagagcaaccccgtgatgatcgatgccaaggaagtgagcgccgcccaccgggccagatacttctggggcaatctgcctggcatgaacagacccctggccagcaccgtgaacgacaagctggagctgcaggagtgcctggagcacggccggatcgccaagttcagcaaggtgagaaccatcaccacccgaagcaacagcatcaaacaaggcaaggaccagcactttcctgtgttcatgaacgagaaggaggacatcctgtggtgtaccgagatggagagagtgttcgggttcccagtccactacacagatgtcagcaacatgtctagactggccagacagagactgctgggaagaagctggtccgtccctgtgatcagacacctgttcgcccctctgaaggagtacttcgcctgcgtgagcagcggcaacagcaacgccaacagccggggccccagcttctctagcggcctggtgccactgtccctgagagggagccacatgggccccatggagatctacaaaaccgtgagcgcctggaagcggcagcctgtgcgcgtgctgagcctgtttcggaatatcgataaagtcctgaaaagcctgggattcctggagagcggctctggctccggcggtggcaccctgaagtacgtggaggatgtgacaaacgtggtcagacgggatgtggagaagtggggccccttcgatctggtgtacggcagcacccaacccctgggcagctcttgtgaccggtgccctggctggtacatgtttcagttccaccggatcctgcagtacgccctgccgagacaggagtcccagcggccattcttttggattttcatggacaacttgctgctgaccgaggatgaccaggaaactaccactcggttcctgcagaccgaagccgtgaccctgcaggacgtgagaggccgggactaccagaacgccatgcgggtgtggtccaacatccctggactgaaaagcaagcacgcacctctgacccctaaagaagaggagtacctgcaggcccaggtgcggagcagaagcaagctggacgcccctaaggtggatctgctggtgaagaattgcctcctgcccctgagagagtacttcaagtatttcagccagaatagtctgcccctgggcggcccaagcagcggcgcccctcctcccagcggcggcagcccagccggctccccaacctctaccgaggagggcacctctgagtccgccacccccgagagcggccctggcacctccaccgagcccagcgagggcagcgcacccggcagccctgccggcagccccacctccacagaggagggaaccagcaccgagcccagcgaaggcagcgccccaggcaccagcaccgagcctagtgagggcggctctggcggcggcagcgcccaggagattaaacggatcaacaagatcagaagaagacttgtgaaagacagcaacaccaagaaggccggcaagacaggccccatgaaaaccctgctggttagagtgatgacacccgatctgagagagcggctggaaaacctgagaaagaagcctgaaaatatcccccagcccatcagcaatacatctagagccaacctgaataagctgctgaccgattacaccgaaatgaagaaggcgatcctgcatgtgtactgggaagagttccagaaggaccctgtgggcctgatgagccgggtggcccagcctgccagcaagaagatcgatcagaacaagctgaaacctgagatggacgagaagggcaacctgaccaccgccggctttgcctgctctcagtgtggccagcccctgttcgtgtacaagctggagcaggtgtctgagaagggcaaggcttacaccaactacttcggacggtgcaatgtggccgagcacgaaaagctgatcctgctggcccagctgaagcccgagaaggatagcgacgaagccgtgacatatagcctgggaaagtttgggcagagggccctggatttctacagcattcatgtgaccaaggagtccacccaccccgtgaagcccctggcccagatcgccggaaacagatacgcctccggacctgtgggaaaggccctgagcgacgcatgtatgggcacaatcgcctccttcctgtctaagtaccaggacatcatcatcgaacaccagaaggtggtgaagggcaaccagaagagactggagagcctgcgggagctggccggcaaggaaaacctggaataccctagcgtgaccctgccacctcagcctcacaccaaggagggcgttgatgcctacaacgaagtgatcgcccgggtgcgaatgtgggtgaacctgaacctgtggcagaagctgaagctaagcagagatgatgccaagcctctgctgagactgaagggattcccttcctttcctctggtcgagagacaggccaacgaagtggactggtgggacatggtgtgtaacgtgaagaagctgatcaacgagaaaaaggaggatggcaaggtgttttggcagaatctggctggctacaagagacaggaagccctgagaccatacctgagcagcgaggaagatcggaagaagggaaagaaattcgctcggtaccagctgggcgacctgctgctgcacctggaaaagaagcacggcgaggactggggaaaggtgtacgacgaggcctgggagcggattgacaagaaagtggaaggcctgagcaagcacatcaagctggaagaggaacggagaagcgaggacgcccagagcaaggccgccctgaccgactggctgcgggctaaggccagcttcgtgatcgagggcctgaaggaggccgacaaggacgagttctgcagatgcgagctgaagctgcagaagtggtacggggacctgcggggaaagcccttcgccatcgaagccgagaacagcatcctggacatcagcggcttcagcaagcagtacaactgtgccttcatctggcagaaggacggcgtgaagaagctgaacctgtacctgatcatcaactacttcaagggcggcaagctgcggttcaagaagatcaaacctgaagccttcgaagccaacagattctacaccgtgatcaacaaaaagagcggcgagatcgtgcccatggaggtgaacttcaacttcgacgaccccaacctgatcatcctgcctctggcctttggcaagagacagggcagagaattcatctggaacgacctgctgtccctggaaaccggcagcctgaagctggccaacggaagagtgatcgagaagacactgtacaacagaagaacccggcaggatgagcctgccctgttcgtggccctgaccttcgagcggcgggaggtcctggactcctccaatatcaaaccaatgaacctgatcggcgtggcaagaggcgaaaacatccccgccgtgatcgccctgaccgaccccgagggctgcccactgagccggtttaaggatagcctgggaaacccaacccacatcctgagaatcggcgagagctataaggagaagcagcggaccatccaggccaagaaggaggtggagcagcggagagccggcggctacagccggaagtacgccagcaaagccaagaatctggcagacgatatggtgagaaacaccgctagagatctgctgtactacgccgtgacccaggatgccatgctgatcttcgccaacctgagccggggcttcggccggcagggcaagcggaccttcatggccgagagacagtacacacggatggaggactggctgaccgccaagctggcctacgagggcctgagcaagacctacctgtccaagacactggcccagtacacctccaagacatgcagcaactgtgggtttaccatcaccagcgccgactacgacagggtgctggagaagctgaagaagacagcaacaggctggatgaccacaattaacggcaaggagctgaaggtggagggccagattacctactacaacagatacaagagacagaacgtagtcaaggacctgtccgtcgagctggatagactgagcgaagaatctgtgaacaacgacatctcctcctggacaaagggcagaagcggagaagctctgagcctcctgaagaaaagattctcccatagacccgtgcaggagaagttcgtgtgcctgaactgcggcttcgagacacacgcagccgagcaagccgccctgaacatcgccagatcctggctgttcctgcggagccaggagtacaagaaataccagacaaacaagacaaccggcaacaccgataagagagccttcgtcgagacctggcagtccttttaccggaagaagcttaaggaggtgtggaaacctgccgtgcggtctggcggatctggcggaggctccacaagcagccagggcagcatcaccttcaaggacgtggccgtggacttcacccaggaggagtggtgcctgctggaccacagccagaaggagctgtacctggaggtgatgctggagaacgtgcagaacctgctgagcgtgggcctgcccgtgcccagggagaacttcatcagctgcctgcagcagggcaaggccccctggctgctggcccagaaggacagcaggaacagctgcctggaggccaagaccaacaccagccccaagaaaaagagaaaagtctaagctgccttctgcggggcttgccttctggccatgcccttcttctctcccttgcacctgtacctcttggtctttgaataaagcctgagtaggaaggctagcaaaaaaaaaaaaaaaaaaaaaaaaaaaaaaaaaaaaaaaaaaaaaaaaaaaaaaaaaaaaaaaaaaaaaaaaaaaaaaaa

SEQ ID NO: 3075 - RNA, 5419 nt, synthetic construct
  source 1..5419: mol_type = other RNA
aggaaataagagagaaaagaagagtaagaagaaatataagagccaccatggcccctaagaagaagcgtaaagtgagccgggtgaacggcagcggcagcggcggcggcatgaaccacgaccaggagttcgacccccctaaggtgtaccctcccgtccccgccgagaagagaaagcccatccgggtcctgagcctgttcgatggcatcgccaccggtctgctggtgctgaaggacctgggcatccaggtggataggtacattgcctccgaggtgtgcgaggactccatcaccgtgggaatggtgcgtcatcagggcaagatcatgtacgtgggcgacgtgcggagcgtgacacagaagcatatccaggagtggggccctttcgacctggtgatcggcggcagcccttgcaatgacctgagcatcgtgaacccagcccggaagggcctgtacgagggaaccggcagactgttcttcgagttttacagactgctgcacgacgcccggcctaaggaaggcgacgaccggcccttcttttggctgttcgagaatgtggtggccatgggagtcagcgacaagcgggatattagccggttcctggagagcaaccccgtgatgatcgatgccaaggaagtgagcgccgcccaccgggccagatacttctggggcaatctgcctggcatgaacagacccctggccagcaccgtgaacgacaagctggagctgcaggagtgcctggagcacggccggatcgccaagttcagcaaggtgagaaccatcaccacccgaagcaacagcatcaaacaaggcaaggaccagcactttcctgtgttcatgaacgagaaggaggacatcctgtggtgtaccgagatggagagagtgttcgggttcccagtccactacacagatgtcagcaacatgtctagactggccagacagagactgctgggaagaagctggtccgtccctgtgatcagacacctgttcgcccctctgaaggagtacttcgcctgcgtgagcagcggcaacagcaacgccaacagccggggccccagcttctctagcggcctggtgccactgtccctgagagggagccacatgggccccatggagatctacaaaaccgtgagcgcctggaagcggcagcctgtgcgcgtgctgagcctgtttcggaatatcgataaagtcctgaaaagcctgggattcctggagagcggctctggctccggcggtggcaccctgaagtacgtggaggatgtgacaaacgtggtcagacgggatgtggagaagtggggccccttcgatctggtgtacggcagcacccaacccctgggcagctcttgtgaccggtgccctggctggtacatgtttcagttccaccggatcctgcagtacgccctgccgagacaggagtcccagcggccattcttttggattttcatggacaacttgctgctgaccgaggatgaccaggaaactaccactcggttcctgcagaccgaagccgtgaccctgcaggacgtgagaggccgggactaccagaacgccatgcgggtgtggtccaacatccctggactgaaaagcaagcacgcacctctgacccctaaagaagaggagtacctgcaggcccaggtgcggagcagaagcaagctggacgcccctaaggtggatctgctggtgaagaattgcctcctgcccctgagagagtacttcaagtatttcagccagaatagtctgcccctgggcggcccaagcagcggcgcccctcctcccagcggcggcagcccagccggctccccaacctctaccgaggagggcacctctgagtccgccacccccgagagcggccctggcacctccaccgagcccagcgagggcagcgcacccggcagccctgccggcagccccacctccacagaggagggaaccagcaccgagcccagcgaaggcagcgccccaggcaccagcaccgagcctagtgagggcggctctggcggcggcagcgcccaggagattaaacggatcaacaagatcagaagaagacttgtgaaagacagcaacaccaagaaggccggcaagacaggccccatgaaaaccctgctggttagagtgatgacacccgatctgagagagcggctggaaaacctgagaaagaagcctgaaaatatcccccagcccatcagcaatacatctagagccaacctgaataagctgctgaccgattacaccgaaatgaagaaggcgatcctgcatgtgtactgggaagagttccagaaggaccctgtgggcctgatgagccgggtggcccagcctgccagcaagaagatcgatcagaacaagctgaaacctgagatggacgagaagggcaacctgaccaccgccggctttgcctgctctcagtgtggccagcccctgttcgtgtacaagctggagcaggtgtctgagaagggcaaggcttacaccaactacttcggacggtgcaatgtggccgagcacgaaaagctgatcctgctggcccagctgaagcccgagaaggatagcgacgaagccgtgacatatagcctgggaaagtttgggcagagggccctggatttctacagcattcatgtgaccaaggagtccacccaccccgtgaagcccctggcccagatcgccggaaacagatacgcctccggacctgtgggaaaggccctgagcgacgcatgtatgggcacaatcgcctccttcctgtctaagtaccaggacatcatcatcgaacaccagaaggtggtgaagggcaaccagaagagactggagagcctgcgggagctggccggcaaggaaaacctggaataccctagcgtgaccctgccacctcagcctcacaccaaggagggcgttgatgcctacaacgaagtgatcgcccgggtgcgaatgtgggtgaacctgaacctgtggcagaagctgaagctaagcagagatgatgccaagcctctgctgagactgaagggattcccttcctttcctctggtcgagagacaggccaacgaagtggactggtgggacatggtgtgtaacgtgaagaagctgatcaacgagaaaaaggaggatggcaaggtgttttggcagaatctggctggctacaagagacaggaagccctgagaccatacctgagcagcgaggaagatcggaagaagggaaagaaattcgctcggtaccagctgggcgacctgctgctgcacctggaaaagaagcacggcgaggactggggaaaggtgtacgacgaggcctgggagcggattgacaagaaagtggaaggcctgagcaagcacatcaagctggaagaggaacggagaagcgaggacgcccagagcaaggccgccctgaccgactggctgcgggctaaggccagcttcgtgatcgagggcctgaaggaggccgacaaggacgagttctgcagatgcgagctgaagctgcagaagtggtacggggacctgcggggaaagcccttcgccatcgaagccgagaacagcatcctggacatcagcggcttcagcaagcagtacaactgtgccttcatctggcagaaggacggcgtgaagaagctgaacctgtacctgatcatcaactacttcaagggcggcaagctgcggttcaagaagatcaaacctgaagccttcgaagccaacagattctacaccgtgatcaacaaaaagagcggcgagatcgtgcccatggaggtgaacttcaacttcgacgaccccaacctgatcatcctgcctctggcctttggcaagagacagggcagagaattcatctggaacgacctgctgtccctggaaaccggcagcctgaagctggccaacggaagagtgatcgagaagacactgtacaacagaagaacccggcaggatgagcctgccctgttcgtggccctgaccttcgagcggcgggaggtcctggactcctccaatatcaaaccaatgaacctgatcggcgtggcaagaggcgaaaacatccccgccgtgatcgccctgaccgaccccgagggctgcccactgagccggtttaaggatagcctgggaaacccaacccacatcctgagaatcggcgagagctataaggagaagcagcggaccatccaggccaagaaggaggtggagcagcggagagccggcggctacagccggaagtacgccagcaaagccaagaatctggcagacgatatggtgagaaacaccgctagagatctgctgtactacgccgtgacccaggatgccatgctgatcttcgccaacctgagccggggcttcggccggcagggcaagcggaccttcatggccgagagacagtacacacggatggaggactggctgaccgccaagctggcctacgagggcctgagcaagacctacctgtccaagacactggcccagtacacctccaagacatgcagcaactgtgggtttaccatcaccagcgccgactacgacagggtgctggagaagctgaagaagacagcaacaggctggatgaccacaattaacggcaaggagctgaaggtggagggccagattacctactacaacagatacaagagacagaacgtagtcaaggacctgtccgtcgagctggatagactgagcgaagaatctgtgaacaacgacatctcctcctggacaaagggcagaagcggagaagctctgagcctcctgaagaaaagattctcccatagacccgtgcaggagaagttcgtgtgcctgaactgcggcttcgagacacacgcagccgagcaagccgccctgaacatcgccagatcctggctgttcctgcggagccaggagtacaagaaataccagacaaacaagacaaccggcaacaccgataagagagccttcgtcgagacctggcagtccttttaccggaagaagcttaaggaggtgtggaaacctgccgtgcggtctggcggatctggcggaggctccacaagcccccagaagagcgtgaccttcgaggacgtggccgtgtacttcacccaggccgagtgggacggcctgagccccgcccagaggaccctgtacagggacgtgatgctggagaactacggcaacgtggccagcctgggcttccccctgctgaagcccgccgtgatcagccagctggagggcggcagcgagctgggcggcagcagccccctggccgccggcaccggcctgcagggcctgcagaccgtgaccagccccaagaaaaagagaaaagtctaagctgccttctgcggggcttgccttctggccatgcccttcttctctcccttgcacctgtacctcttggtctttgaataaagcctgagtaggaaggctagcaaaaaaaaaaaaaaaaaaaaaaaaaaaaaaaaaaaaaaaaaaaaaaaaaaaaaaaaaaaaaaaaaaaaaaaaaaaaaaaa

SEQ ID NO: 3076 - RNA, 5419 nt, synthetic construct
  source 1..5419: mol_type = other RNA
aggaaataagagagaaaagaagagtaagaagaaatataagagccaccatggcccctaagaagaagcgtaaagtgagccgggtgaacggcagcggcagcggcggcggcatgaaccacgaccaggagttcgacccccctaaggtgtaccctcccgtccccgccgagaagagaaagcccatccgggtcctgagcctgttcgatggcatcgccaccggtctgctggtgctgaaggacctgggcatccaggtggataggtacattgcctccgaggtgtgcgaggactccatcaccgtgggaatggtgcgtcatcagggcaagatcatgtacgtgggcgacgtgcggagcgtgacacagaagcatatccaggagtggggccctttcgacctggtgatcggcggcagcccttgcaatgacctgagcatcgtgaacccagcccggaagggcctgtacgagggaaccggcagactgttcttcgagttttacagactgctgcacgacgcccggcctaaggaaggcgacgaccggcccttcttttggctgttcgagaatgtggtggccatgggagtcagcgacaagcgggatattagccggttcctggagagcaaccccgtgatgatcgatgccaaggaagtgagcgccgcccaccgggccagatacttctggggcaatctgcctggcatgaacagacccctggccagcaccgtgaacgacaagctggagctgcaggagtgcctggagcacggccggatcgccaagttcagcaaggtgagaaccatcaccacccgaagcaacagcatcaaacaaggcaaggaccagcactttcctgtgttcatgaacgagaaggaggacatcctgtggtgtaccgagatggagagagtgttcgggttcccagtccactacacagatgtcagcaacatgtctagactggccagacagagactgctgggaagaagctggtccgtccctgtgatcagacacctgttcgcccctctgaaggagtacttcgcctgcgtgagcagcggcaacagcaacgccaacagccggggccccagcttctctagcggcctggtgccactgtccctgagagggagccacatgggccccatggagatctacaaaaccgtgagcgcctggaagcggcagcctgtgcgcgtgctgagcctgtttcggaatatcgataaagtcctgaaaagcctgggattcctggagagcggctctggctccggcggtggcaccctgaagtacgtggaggatgtgacaaacgtggtcagacgggatgtggagaagtggggccccttcgatctggtgtacggcagcacccaacccctgggcagctcttgtgaccggtgccctggctggtacatgtttcagttccaccggatcctgcagtacgccctgccgagacaggagtcccagcggccattcttttggattttcatggacaacttgctgctgaccgaggatgaccaggaaactaccactcggttcctgcagaccgaagccgtgaccctgcaggacgtgagaggccgggactaccagaacgccatgcgggtgtggtccaacatccctggactgaaaagcaagcacgcacctctgacccctaaagaagaggagtacctgcaggcccaggtgcggagcagaagcaagctggacgcccctaaggtggatctgctggtgaagaattgcctcctgcccctgagagagtacttcaagtatttcagccagaatagtctgcccctgggcggcccaagcagcggcgcccctcctcccagcggcggcagcccagccggctccccaacctctaccgaggagggcacctctgagtccgccacccccgagagcggccctggcacctccaccgagcccagcgagggcagcgcacccggcagccctgccggcagccccacctccacagaggagggaaccagcaccgagcccagcgaaggcagcgccccaggcaccagcaccgagcctagtgagggcggctctggcggcggcagcgcccaggagattaaacggatcaacaagatcagaagaagacttgtgaaagacagcaacaccaagaaggccggcaagacaggccccatgaaaaccctgctggttagagtgatgacacccgatctgagagagcggctggaaaacctgagaaagaagcctgaaaatatcccccagcccatcagcaatacatctagagccaacctgaataagctgctgaccgattacaccgaaatgaagaaggcgatcctgcatgtgtactgggaagagttccagaaggaccctgtgggcctgatgagccgggtggcccagcctgccagcaagaagatcgatcagaacaagctgaaacctgagatggacgagaagggcaacctgaccaccgccggctttgcctgctctcagtgtggccagcccctgttcgtgtacaagctggagcaggtgtctgagaagggcaaggcttacaccaactacttcggacggtgcaatgtggccgagcacgaaaagctgatcctgctggcccagctgaagcccgagaaggatagcgacgaagccgtgacatatagcctgggaaagtttgggcagagggccctggatttctacagcattcatgtgaccaaggagtccacccaccccgtgaagcccctggcccagatcgccggaaacagatacgcctccggacctgtgggaaaggccctgagcgacgcatgtatgggcacaatcgcctccttcctgtctaagtaccaggacatcatcatcgaacaccagaaggtggtgaagggcaaccagaagagactggagagcctgcgggagctggccggcaaggaaaacctggaataccctagcgtgaccctgccacctcagcctcacaccaaggagggcgttgatgcctacaacgaagtgatcgcccgggtgcgaatgtgggtgaacctgaacctgtggcagaagctgaagctaagcagagatgatgccaagcctctgctgagactgaagggattcccttcctttcctctggtcgagagacaggccaacgaagtggactggtgggacatggtgtgtaacgtgaagaagctgatcaacgagaaaaaggaggatggcaaggtgttttggcagaatctggctggctacaagagacaggaagccctgagaccatacctgagcagcgaggaagatcggaagaagggaaagaaattcgctcggtaccagctgggcgacctgctgctgcacctggaaaagaagcacggcgaggactggggaaaggtgtacgacgaggcctgggagcggattgacaagaaagtggaaggcctgagcaagcacatcaagctggaagaggaacggagaagcgaggacgcccagagcaaggccgccctgaccgactggctgcgggctaaggccagcttcgtgatcgagggcctgaaggaggccgacaaggacgagttctgcagatgcgagctgaagctgcagaagtggtacggggacctgcggggaaagcccttcgccatcgaagccgagaacagcatcctggacatcagcggcttcagcaagcagtacaactgtgccttcatctggcagaaggacggcgtgaagaagctgaacctgtacctgatcatcaactacttcaagggcggcaagctgcggttcaagaagatcaaacctgaagccttcgaagccaacagattctacaccgtgatcaacaaaaagagcggcgagatcgtgcccatggaggtgaacttcaacttcgacgaccccaacctgatcatcctgcctctggcctttggcaagagacagggcagagaattcatctggaacgacctgctgtccctggaaaccggcagcctgaagctggccaacggaagagtgatcgagaagacactgtacaacagaagaacccggcaggatgagcctgccctgttcgtggccctgaccttcgagcggcgggaggtcctggactcctccaatatcaaaccaatgaacctgatcggcgtggcaagaggcgaaaacatccccgccgtgatcgccctgaccgaccccgagggctgcccactgagccggtttaaggatagcctgggaaacccaacccacatcctgagaatcggcgagagctataaggagaagcagcggaccatccaggccaagaaggaggtggagcagcggagagccggcggctacagccggaagtacgccagcaaagccaagaatctggcagacgatatggtgagaaacaccgctagagatctgctgtactacgccgtgacccaggatgccatgctgatcttcgccaacctgagccggggcttcggccggcagggcaagcggaccttcatggccgagagacagtacacacggatggaggactggctgaccgccaagctggcctacgagggcctgagcaagacctacctgtccaagacactggcccagtacacctccaagacatgcagcaactgtgggtttaccatcaccagcgccgactacgacagggtgctggagaagctgaagaagacagcaacaggctggatgaccacaattaacggcaaggagctgaaggtggagggccagattacctactacaacagatacaagagacagaacgtagtcaaggacctgtccgtcgagctggatagactgagcgaagaatctgtgaacaacgacatctcctcctggacaaagggcagaagcggagaagctctgagcctcctgaagaaaagattctcccatagacccgtgcaggagaagttcgtgtgcctgaactgcggcttcgagacacacgcagccgagcaagccgccctgaacatcgccagatcctggctgttcctgcggagccaggagtacaagaaataccagacaaacaagacaaccggcaacaccgataagagagccttcgtcgagacctggcagtccttttaccggaagaagcttaaggaggtgtggaaacctgccgtgcggtctggcggatctggcggaggctccacaagcgcccaggtgctggtgaccttccaggacgtggccgtggacttcacccaggaggagtggaggctgctggaccccggccagaaggagctgtacaaggaggtgatgctggagaacgtgcagaacgtgctgagcctgggcctgcccgtgcccagggaggactggttcttccacttccacgagggcggcgacccctggatgctggagggcaagggccccagcatcagcaggctggacgaggagaggcacaccagccccaagaaaaagagaaaagtctaagctgccttctgcggggcttgccttctggccatgcccttcttctctcccttgcacctgtacctcttggtctttgaataaagcctgagtaggaaggctagcaaaaaaaaaaaaaaaaaaaaaaaaaaaaaaaaaaaaaaaaaaaaaaaaaaaaaaaaaaaaaaaaaaaaaaaaaaaaaaaa

SEQ ID NO: 3077 - RNA, 5419 nt, synthetic construct
  source 1..5419: mol_type = other RNA
aggaaataagagagaaaagaagagtaagaagaaatataagagccaccatggcccctaagaagaagcgtaaagtgagccgggtgaacggcagcggcagcggcggcggcatgaaccacgaccaggagttcgacccccctaaggtgtaccctcccgtccccgccgagaagagaaagcccatccgggtcctgagcctgttcgatggcatcgccaccggtctgctggtgctgaaggacctgggcatccaggtggataggtacattgcctccgaggtgtgcgaggactccatcaccgtgggaatggtgcgtcatcagggcaagatcatgtacgtgggcgacgtgcggagcgtgacacagaagcatatccaggagtggggccctttcgacctggtgatcggcggcagcccttgcaatgacctgagcatcgtgaacccagcccggaagggcctgtacgagggaaccggcagactgttcttcgagttttacagactgctgcacgacgcccggcctaaggaaggcgacgaccggcccttcttttggctgttcgagaatgtggtggccatgggagtcagcgacaagcgggatattagccggttcctggagagcaaccccgtgatgatcgatgccaaggaagtgagcgccgcccaccgggccagatacttctggggcaatctgcctggcatgaacagacccctggccagcaccgtgaacgacaagctggagctgcaggagtgcctggagcacggccggatcgccaagttcagcaaggtgagaaccatcaccacccgaagcaacagcatcaaacaaggcaaggaccagcactttcctgtgttcatgaacgagaaggaggacatcctgtggtgtaccgagatggagagagtgttcgggttcccagtccactacacagatgtcagcaacatgtctagactggccagacagagactgctgggaagaagctggtccgtccctgtgatcagacacctgttcgcccctctgaaggagtacttcgcctgcgtgagcagcggcaacagcaacgccaacagccggggccccagcttctctagcggcctggtgccactgtccctgagagggagccacatgggccccatggagatctacaaaaccgtgagcgcctggaagcggcagcctgtgcgcgtgctgagcctgtttcggaatatcgataaagtcctgaaaagcctgggattcctggagagcggctctggctccggcggtggcaccctgaagtacgtggaggatgtgacaaacgtggtcagacgggatgtggagaagtggggccccttcgatctggtgtacggcagcacccaacccctgggcagctcttgtgaccggtgccctggctggtacatgtttcagttccaccggatcctgcagtacgccctgccgagacaggagtcccagcggccattcttttggattttcatggacaacttgctgctgaccgaggatgaccaggaaactaccactcggttcctgcagaccgaagccgtgaccctgcaggacgtgagaggccgggactaccagaacgccatgcgggtgtggtccaacatccctggactgaaaagcaagcacgcacctctgacccctaaagaagaggagtacctgcaggcccaggtgcggagcagaagcaagctggacgcccctaaggtggatctgctggtgaagaattgcctcctgcccctgagagagtacttcaagtatttcagccagaatagtctgcccctgggcggcccaagcagcggcgcccctcctcccagcggcggcagcccagccggctccccaacctctaccgaggagggcacctctgagtccgccacccccgagagcggccctggcacctccaccgagcccagcgagggcagcgcacccggcagccctgccggcagccccacctccacagaggagggaaccagcaccgagcccagcgaaggcagcgccccaggcaccagcaccgagcctagtgagggcggctctggcggcggcagcgcccaggagattaaacggatcaacaagatcagaagaagacttgtgaaagacagcaacaccaagaaggccggcaagacaggccccatgaaaaccctgctggttagagtgatgacacccgatctgagagagcggctggaaaacctgagaaagaagcctgaaaatatcccccagcccatcagcaatacatctagagccaacctgaataagctgctgaccgattacaccgaaatgaagaaggcgatcctgcatgtgtactgggaagagttccagaaggaccctgtgggcctgatgagccgggtggcccagcctgccagcaagaagatcgatcagaacaagctgaaacctgagatggacgagaagggcaacctgaccaccgccggctttgcctgctctcagtgtggccagcccctgttcgtgtacaagctggagcaggtgtctgagaagggcaaggcttacaccaactacttcggacggtgcaatgtggccgagcacgaaaagctgatcctgctggcccagctgaagcccgagaaggatagcgacgaagccgtgacatatagcctgggaaagtttgggcagagggccctggatttctacagcattcatgtgaccaaggagtccacccaccccgtgaagcccctggcccagatcgccggaaacagatacgcctccggacctgtgggaaaggccctgagcgacgcatgtatgggcacaatcgcctccttcctgtctaagtaccaggacatcatcatcgaacaccagaaggtggtgaagggcaaccagaagagactggagagcctgcgggagctggccggcaaggaaaacctggaataccctagcgtgaccctgccacctcagcctcacaccaaggagggcgttgatgcctacaacgaagtgatcgcccgggtgcgaatgtgggtgaacctgaacctgtggcagaagctgaagctaagcagagatgatgccaagcctctgctgagactgaagggattcccttcctttcctctggtcgagagacaggccaacgaagtggactggtgggacatggtgtgtaacgtgaagaagctgatcaacgagaaaaaggaggatggcaaggtgttttggcagaatctggctggctacaagagacaggaagccctgagaccatacctgagcagcgaggaagatcggaagaagggaaagaaattcgctcggtaccagctgggcgacctgctgctgcacctggaaaagaagcacggcgaggactggggaaaggtgtacgacgaggcctgggagcggattgacaagaaagtggaaggcctgagcaagcacatcaagctggaagaggaacggagaagcgaggacgcccagagcaaggccgccctgaccgactggctgcgggctaaggccagcttcgtgatcgagggcctgaaggaggccgacaaggacgagttctgcagatgcgagctgaagctgcagaagtggtacggggacctgcggggaaagcccttcgccatcgaagccgagaacagcatcctggacatcagcggcttcagcaagcagtacaactgtgccttcatctggcagaaggacggcgtgaagaagctgaacctgtacctgatcatcaactacttcaagggcggcaagctgcggttcaagaagatcaaacctgaagccttcgaagccaacagattctacaccgtgatcaacaaaaagagcggcgagatcgtgcccatggaggtgaacttcaacttcgacgaccccaacctgatcatcctgcctctggcctttggcaagagacagggcagagaattcatctggaacgacctgctgtccctggaaaccggcagcctgaagctggccaacggaagagtgatcgagaagacactgtacaacagaagaacccggcaggatgagcctgccctgttcgtggccctgaccttcgagcggcgggaggtcctggactcctccaatatcaaaccaatgaacctgatcggcgtggcaagaggcgaaaacatccccgccgtgatcgccctgaccgaccccgagggctgcccactgagccggtttaaggatagcctgggaaacccaacccacatcctgagaatcggcgagagctataaggagaagcagcggaccatccaggccaagaaggaggtggagcagcggagagccggcggctacagccggaagtacgccagcaaagccaagaatctggcagacgatatggtgagaaacaccgctagagatctgctgtactacgccgtgacccaggatgccatgctgatcttcgccaacctgagccggggcttcggccggcagggcaagcggaccttcatggccgagagacagtacacacggatggaggactggctgaccgccaagctggcctacgagggcctgagcaagacctacctgtccaagacactggcccagtacacctccaagacatgcagcaactgtgggtttaccatcaccagcgccgactacgacagggtgctggagaagctgaagaagacagcaacaggctggatgaccacaattaacggcaaggagctgaaggtggagggccagattacctactacaacagatacaagagacagaacgtagtcaaggacctgtccgtcgagctggatagactgagcgaagaatctgtgaacaacgacatctcctcctggacaaagggcagaagcggagaagctctgagcctcctgaagaaaagattctcccatagacccgtgcaggagaagttcgtgtgcctgaactgcggcttcgagacacacgcagccgagcaagccgccctgaacatcgccagatcctggctgttcctgcggagccaggagtacaagaaataccagacaaacaagacaaccggcaacaccgataagagagccttcgtcgagacctggcagtccttttaccggaagaagcttaaggaggtgtggaaacctgccgtgcggtctggcggatctggcggaggctccacaagcctgcaggagcccgtgagcttcgccgaggtggccgtgtacttcagcagggaggagtgggccctgctggaccccgcccagagggccctgtacagggacgtgatgctggagacctaccagtgcgtggcctggctggcccccctgcccgcccccaagcccggcctgatcagcctgctggagggcggcgaggacccctggatccccgacgtgaggagccccgaggccgtgcccggcgacctgagccccaccagccccaagaaaaagagaaaagtctaagctgccttctgcggggcttgccttctggccatgcccttcttctctcccttgcacctgtacctcttggtctttgaataaagcctgagtaggaaggctagcaaaaaaaaaaaaaaaaaaaaaaaaaaaaaaaaaaaaaaaaaaaaaaaaaaaaaaaaaaaaaaaaaaaaaaaaaaaaaaaa

SEQ ID NO: 3078 - RNA, 5419 nt, synthetic construct
  source 1..5419: mol_type = other RNA
aggaaataagagagaaaagaagagtaagaagaaatataagagccaccatggcccctaagaagaagcgtaaagtgagccgggtgaacggcagcggcagcggcggcggcatgaaccacgaccaggagttcgacccccctaaggtgtaccctcccgtccccgccgagaagagaaagcccatccgggtcctgagcctgttcgatggcatcgccaccggtctgctggtgctgaaggacctgggcatccaggtggataggtacattgcctccgaggtgtgcgaggactccatcaccgtgggaatggtgcgtcatcagggcaagatcatgtacgtgggcgacgtgcggagcgtgacacagaagcatatccaggagtggggccctttcgacctggtgatcggcggcagcccttgcaatgacctgagcatcgtgaacccagcccggaagggcctgtacgagggaaccggcagactgttcttcgagttttacagactgctgcacgacgcccggcctaaggaaggcgacgaccggcccttcttttggctgttcgagaatgtggtggccatgggagtcagcgacaagcgggatattagccggttcctggagagcaaccccgtgatgatcgatgccaaggaagtgagcgccgcccaccgggccagatacttctggggcaatctgcctggcatgaacagacccctggccagcaccgtgaacgacaagctggagctgcaggagtgcctggagcacggccggatcgccaagttcagcaaggtgagaaccatcaccacccgaagcaacagcatcaaacaaggcaaggaccagcactttcctgtgttcatgaacgagaaggaggacatcctgtggtgtaccgagatggagagagtgttcgggttcccagtccactacacagatgtcagcaacatgtctagactggccagacagagactgctgggaagaagctggtccgtccctgtgatcagacacctgttcgcccctctgaaggagtacttcgcctgcgtgagcagcggcaacagcaacgccaacagccggggccccagcttctctagcggcctggtgccactgtccctgagagggagccacatgggccccatggagatctacaaaaccgtgagcgcctggaagcggcagcctgtgcgcgtgctgagcctgtttcggaatatcgataaagtcctgaaaagcctgggattcctggagagcggctctggctccggcggtggcaccctgaagtacgtggaggatgtgacaaacgtggtcagacgggatgtggagaagtggggccccttcgatctggtgtacggcagcacccaacccctgggcagctcttgtgaccggtgccctggctggtacatgtttcagttccaccggatcctgcagtacgccctgccgagacaggagtcccagcggccattcttttggattttcatggacaacttgctgctgaccgaggatgaccaggaaactaccactcggttcctgcagaccgaagccgtgaccctgcaggacgtgagaggccgggactaccagaacgccatgcgggtgtggtccaacatccctggactgaaaagcaagcacgcacctctgacccctaaagaagaggagtacctgcaggcccaggtgcggagcagaagcaagctggacgcccctaaggtggatctgctggtgaagaattgcctcctgcccctgagagagtacttcaagtatttcagccagaatagtctgcccctgggcggcccaagcagcggcgcccctcctcccagcggcggcagcccagccggctccccaacctctaccgaggagggcacctctgagtccgccacccccgagagcggccctggcacctccaccgagcccagcgagggcagcgcacccggcagccctgccggcagccccacctccacagaggagggaaccagcaccgagcccagcgaaggcagcgccccaggcaccagcaccgagcctagtgagggcggctctggcggcggcagcgcccaggagattaaacggatcaacaagatcagaagaagacttgtgaaagacagcaacaccaagaaggccggcaagacaggccccatgaaaaccctgctggttagagtgatgacacccgatctgagagagcggctggaaaacctgagaaagaagcctgaaaatatcccccagcccatcagcaatacatctagagccaacctgaataagctgctgaccgattacaccgaaatgaagaaggcgatcctgcatgtgtactgggaagagttccagaaggaccctgtgggcctgatgagccgggtggcccagcctgccagcaagaagatcgatcagaacaagctgaaacctgagatggacgagaagggcaacctgaccaccgccggctttgcctgctctcagtgtggccagcccctgttcgtgtacaagctggagcaggtgtctgagaagggcaaggcttacaccaactacttcggacggtgcaatgtggccgagcacgaaaagctgatcctgctggcccagctgaagcccgagaaggatagcgacgaagccgtgacatatagcctgggaaagtttgggcagagggccctggatttctacagcattcatgtgaccaaggagtccacccaccccgtgaagcccctggcccagatcgccggaaacagatacgcctccggacctgtgggaaaggccctgagcgacgcatgtatgggcacaatcgcctccttcctgtctaagtaccaggacatcatcatcgaacaccagaaggtggtgaagggcaaccagaagagactggagagcctgcgggagctggccggcaaggaaaacctggaataccctagcgtgaccctgccacctcagcctcacaccaaggagggcgttgatgcctacaacgaagtgatcgcccgggtgcgaatgtgggtgaacctgaacctgtggcagaagctgaagctaagcagagatgatgccaagcctctgctgagactgaagggattcccttcctttcctctggtcgagagacaggccaacgaagtggactggtgggacatggtgtgtaacgtgaagaagctgatcaacgagaaaaaggaggatggcaaggtgttttggcagaatctggctggctacaagagacaggaagccctgagaccatacctgagcagcgaggaagatcggaagaagggaaagaaattcgctcggtaccagctgggcgacctgctgctgcacctggaaaagaagcacggcgaggactggggaaaggtgtacgacgaggcctgggagcggattgacaagaaagtggaaggcctgagcaagcacatcaagctggaagaggaacggagaagcgaggacgcccagagcaaggccgccctgaccgactggctgcgggctaaggccagcttcgtgatcgagggcctgaaggaggccgacaaggacgagttctgcagatgcgagctgaagctgcagaagtggtacggggacctgcggggaaagcccttcgccatcgaagccgagaacagcatcctggacatcagcggcttcagcaagcagtacaactgtgccttcatctggcagaaggacggcgtgaagaagctgaacctgtacctgatcatcaactacttcaagggcggcaagctgcggttcaagaagatcaaacctgaagccttcgaagccaacagattctacaccgtgatcaacaaaaagagcggcgagatcgtgcccatggaggtgaacttcaacttcgacgaccccaacctgatcatcctgcctctggcctttggcaagagacagggcagagaattcatctggaacgacctgctgtccctggaaaccggcagcctgaagctggccaacggaagagtgatcgagaagacactgtacaacagaagaacccggcaggatgagcctgccctgttcgtggccctgaccttcgagcggcgggaggtcctggactcctccaatatcaaaccaatgaacctgatcggcgtggcaagaggcgaaaacatccccgccgtgatcgccctgaccgaccccgagggctgcccactgagccggtttaaggatagcctgggaaacccaacccacatcctgagaatcggcgagagctataaggagaagcagcggaccatccaggccaagaaggaggtggagcagcggagagccggcggctacagccggaagtacgccagcaaagccaagaatctggcagacgatatggtgagaaacaccgctagagatctgctgtactacgccgtgacccaggatgccatgctgatcttcgccaacctgagccggggcttcggccggcagggcaagcggaccttcatggccgagagacagtacacacggatggaggactggctgaccgccaagctggcctacgagggcctgagcaagacctacctgtccaagacactggcccagtacacctccaagacatgcagcaactgtgggtttaccatcaccagcgccgactacgacagggtgctggagaagctgaagaagacagcaacaggctggatgaccacaattaacggcaaggagctgaaggtggagggccagattacctactacaacagatacaagagacagaacgtagtcaaggacctgtccgtcgagctggatagactgagcgaagaatctgtgaacaacgacatctcctcctggacaaagggcagaagcggagaagctctgagcctcctgaagaaaagattctcccatagacccgtgcaggagaagttcgtgtgcctgaactgcggcttcgagacacacgcagccgagcaagccgccctgaacatcgccagatcctggctgttcctgcggagccaggagtacaagaaataccagacaaacaagacaaccggcaacaccgataagagagccttcgtcgagacctggcagtccttttaccggaagaagcttaaggaggtgtggaaacctgccgtgcggtctggcggatctggcggaggctccacaagcatggagctgagggaggccttcgaggacgtggccgtgtacttcaccaggaaggagtgggagctgctggaggacgaggacaaggagctgtacagggacctgatgctgaggaactaccaggccctggtgagcctgggctaccagggccccacccccggcctgatctgcaggatcaagcagagggaggtggagctgtgggtgtgcgacgacgagcaccacggcgagagcagcgtgagcgagaacctgaccagccccaagaaaaagagaaaagtctaagctgccttctgcggggcttgccttctggccatgcccttcttctctcccttgcacctgtacctcttggtctttgaataaagcctgagtaggaaggctagcaaaaaaaaaaaaaaaaaaaaaaaaaaaaaaaaaaaaaaaaaaaaaaaaaaaaaaaaaaaaaaaaaaaaaaaaaaaaaaaa

SEQ ID NO: 3079 - RNA, 5419 nt, synthetic construct
  source 1..5419: mol_type = other RNA
aggaaataagagagaaaagaagagtaagaagaaatataagagccaccatggcccctaagaagaagcgtaaagtgagccgggtgaacggcagcggcagcggcggcggcatgaaccacgaccaggagttcgacccccctaaggtgtaccctcccgtccccgccgagaagagaaagcccatccgggtcctgagcctgttcgatggcatcgccaccggtctgctggtgctgaaggacctgggcatccaggtggataggtacattgcctccgaggtgtgcgaggactccatcaccgtgggaatggtgcgtcatcagggcaagatcatgtacgtgggcgacgtgcggagcgtgacacagaagcatatccaggagtggggccctttcgacctggtgatcggcggcagcccttgcaatgacctgagcatcgtgaacccagcccggaagggcctgtacgagggaaccggcagactgttcttcgagttttacagactgctgcacgacgcccggcctaaggaaggcgacgaccggcccttcttttggctgttcgagaatgtggtggccatgggagtcagcgacaagcgggatattagccggttcctggagagcaaccccgtgatgatcgatgccaaggaagtgagcgccgcccaccgggccagatacttctggggcaatctgcctggcatgaacagacccctggccagcaccgtgaacgacaagctggagctgcaggagtgcctggagcacggccggatcgccaagttcagcaaggtgagaaccatcaccacccgaagcaacagcatcaaacaaggcaaggaccagcactttcctgtgttcatgaacgagaaggaggacatcctgtggtgtaccgagatggagagagtgttcgggttcccagtccactacacagatgtcagcaacatgtctagactggccagacagagactgctgggaagaagctggtccgtccctgtgatcagacacctgttcgcccctctgaaggagtacttcgcctgcgtgagcagcggcaacagcaacgccaacagccggggccccagcttctctagcggcctggtgccactgtccctgagagggagccacatgggccccatggagatctacaaaaccgtgagcgcctggaagcggcagcctgtgcgcgtgctgagcctgtttcggaatatcgataaagtcctgaaaagcctgggattcctggagagcggctctggctccggcggtggcaccctgaagtacgtggaggatgtgacaaacgtggtcagacgggatgtggagaagtggggccccttcgatctggtgtacggcagcacccaacccctgggcagctcttgtgaccggtgccctggctggtacatgtttcagttccaccggatcctgcagtacgccctgccgagacaggagtcccagcggccattcttttggattttcatggacaacttgctgctgaccgaggatgaccaggaaactaccactcggttcctgcagaccgaagccgtgaccctgcaggacgtgagaggccgggactaccagaacgccatgcgggtgtggtccaacatccctggactgaaaagcaagcacgcacctctgacccctaaagaagaggagtacctgcaggcccaggtgcggagcagaagcaagctggacgcccctaaggtggatctgctggtgaagaattgcctcctgcccctgagagagtacttcaagtatttcagccagaatagtctgcccctgggcggcccaagcagcggcgcccctcctcccagcggcggcagcccagccggctccccaacctctaccgaggagggcacctctgagtccgccacccccgagagcggccctggcacctccaccgagcccagcgagggcagcgcacccggcagccctgccggcagccccacctccacagaggagggaaccagcaccgagcccagcgaaggcagcgccccaggcaccagcaccgagcctagtgagggcggctctggcggcggcagcgcccaggagattaaacggatcaacaagatcagaagaagacttgtgaaagacagcaacaccaagaaggccggcaagacaggccccatgaaaaccctgctggttagagtgatgacacccgatctgagagagcggctggaaaacctgagaaagaagcctgaaaatatcccccagcccatcagcaatacatctagagccaacctgaataagctgctgaccgattacaccgaaatgaagaaggcgatcctgcatgtgtactgggaagagttccagaaggaccctgtgggcctgatgagccgggtggcccagcctgccagcaagaagatcgatcagaacaagctgaaacctgagatggacgagaagggcaacctgaccaccgccggctttgcctgctctcagtgtggccagcccctgttcgtgtacaagctggagcaggtgtctgagaagggcaaggcttacaccaactacttcggacggtgcaatgtggccgagcacgaaaagctgatcctgctggcccagctgaagcccgagaaggatagcgacgaagccgtgacatatagcctgggaaagtttgggcagagggccctggatttctacagcattcatgtgaccaaggagtccacccaccccgtgaagcccctggcccagatcgccggaaacagatacgcctccggacctgtgggaaaggccctgagcgacgcatgtatgggcacaatcgcctccttcctgtctaagtaccaggacatcatcatcgaacaccagaaggtggtgaagggcaaccagaagagactggagagcctgcgggagctggccggcaaggaaaacctggaataccctagcgtgaccctgccacctcagcctcacaccaaggagggcgttgatgcctacaacgaagtgatcgcccgggtgcgaatgtgggtgaacctgaacctgtggcagaagctgaagctaagcagagatgatgccaagcctctgctgagactgaagggattcccttcctttcctctggtcgagagacaggccaacgaagtggactggtgggacatggtgtgtaacgtgaagaagctgatcaacgagaaaaaggaggatggcaaggtgttttggcagaatctggctggctacaagagacaggaagccctgagaccatacctgagcagcgaggaagatcggaagaagggaaagaaattcgctcggtaccagctgggcgacctgctgctgcacctggaaaagaagcacggcgaggactggggaaaggtgtacgacgaggcctgggagcggattgacaagaaagtggaaggcctgagcaagcacatcaagctggaagaggaacggagaagcgaggacgcccagagcaaggccgccctgaccgactggctgcgggctaaggccagcttcgtgatcgagggcctgaaggaggccgacaaggacgagttctgcagatgcgagctgaagctgcagaagtggtacggggacctgcggggaaagcccttcgccatcgaagccgagaacagcatcctggacatcagcggcttcagcaagcagtacaactgtgccttcatctggcagaaggacggcgtgaagaagctgaacctgtacctgatcatcaactacttcaagggcggcaagctgcggttcaagaagatcaaacctgaagccttcgaagccaacagattctacaccgtgatcaacaaaaagagcggcgagatcgtgcccatggaggtgaacttcaacttcgacgaccccaacctgatcatcctgcctctggcctttggcaagagacagggcagagaattcatctggaacgacctgctgtccctggaaaccggcagcctgaagctggccaacggaagagtgatcgagaagacactgtacaacagaagaacccggcaggatgagcctgccctgttcgtggccctgaccttcgagcggcgggaggtcctggactcctccaatatcaaaccaatgaacctgatcggcgtggcaagaggcgaaaacatccccgccgtgatcgccctgaccgaccccgagggctgcccactgagccggtttaaggatagcctgggaaacccaacccacatcctgagaatcggcgagagctataaggagaagcagcggaccatccaggccaagaaggaggtggagcagcggagagccggcggctacagccggaagtacgccagcaaagccaagaatctggcagacgatatggtgagaaacaccgctagagatctgctgtactacgccgtgacccaggatgccatgctgatcttcgccaacctgagccggggcttcggccggcagggcaagcggaccttcatggccgagagacagtacacacggatggaggactggctgaccgccaagctggcctacgagggcctgagcaagacctacctgtccaagacactggcccagtacacctccaagacatgcagcaactgtgggtttaccatcaccagcgccgactacgacagggtgctggagaagctgaagaagacagcaacaggctggatgaccacaattaacggcaaggagctgaaggtggagggccagattacctactacaacagatacaagagacagaacgtagtcaaggacctgtccgtcgagctggatagactgagcgaagaatctgtgaacaacgacatctcctcctggacaaagggcagaagcggagaagctctgagcctcctgaagaaaagattctcccatagacccgtgcaggagaagttcgtgtgcctgaactgcggcttcgagacacacgcagccgagcaagccgccctgaacatcgccagatcctggctgttcctgcggagccaggagtacaagaaataccagacaaacaagacaaccggcaacaccgataagagagccttcgtcgagacctggcagtccttttaccggaagaagcttaaggaggtgtggaaacctgccgtgcggtctggcggatctggcggaggctccacaagcttccaggagaccgtgaccttcaaggacgtggccgtggtgttcagcgaggaggagctgggcctgctggacagcacccagaggaagctgtacagggacgtgatgctggagaacttcaggaacctggtgagcgtgggccacagcagcagcaagcccgacatgatcagccagctggagagggaggagaagctgtgcatgaaggagatccacaccgagaggggcaggcacagcggcggcaggaaccagaccagccccaagaaaaagagaaaagtctaagctgccttctgcggggcttgccttctggccatgcccttcttctctcccttgcacctgtacctcttggtctttgaataaagcctgagtaggaaggctagcaaaaaaaaaaaaaaaaaaaaaaaaaaaaaaaaaaaaaaaaaaaaaaaaaaaaaaaaaaaaaaaaaaaaaaaaaaaaaaaa

SEQ ID NO: 3080 - RNA, 5419 nt, synthetic construct
  source 1..5419: mol_type = other RNA
aggaaataagagagaaaagaagagtaagaagaaatataagagccaccatggcccctaagaagaagcgtaaagtgagccgggtgaacggcagcggcagcggcggcggcatgaaccacgaccaggagttcgacccccctaaggtgtaccctcccgtccccgccgagaagagaaagcccatccgggtcctgagcctgttcgatggcatcgccaccggtctgctggtgctgaaggacctgggcatccaggtggataggtacattgcctccgaggtgtgcgaggactccatcaccgtgggaatggtgcgtcatcagggcaagatcatgtacgtgggcgacgtgcggagcgtgacacagaagcatatccaggagtggggccctttcgacctggtgatcggcggcagcccttgcaatgacctgagcatcgtgaacccagcccggaagggcctgtacgagggaaccggcagactgttcttcgagttttacagactgctgcacgacgcccggcctaaggaaggcgacgaccggcccttcttttggctgttcgagaatgtggtggccatgggagtcagcgacaagcgggatattagccggttcctggagagcaaccccgtgatgatcgatgccaaggaagtgagcgccgcccaccgggccagatacttctggggcaatctgcctggcatgaacagacccctggccagcaccgtgaacgacaagctggagctgcaggagtgcctggagcacggccggatcgccaagttcagcaaggtgagaaccatcaccacccgaagcaacagcatcaaacaaggcaaggaccagcactttcctgtgttcatgaacgagaaggaggacatcctgtggtgtaccgagatggagagagtgttcgggttcccagtccactacacagatgtcagcaacatgtctagactggccagacagagactgctgggaagaagctggtccgtccctgtgatcagacacctgttcgcccctctgaaggagtacttcgcctgcgtgagcagcggcaacagcaacgccaacagccggggccccagcttctctagcggcctggtgccactgtccctgagagggagccacatgggccccatggagatctacaaaaccgtgagcgcctggaagcggcagcctgtgcgcgtgctgagcctgtttcggaatatcgataaagtcctgaaaagcctgggattcctggagagcggctctggctccggcggtggcaccctgaagtacgtggaggatgtgacaaacgtggtcagacgggatgtggagaagtggggccccttcgatctggtgtacggcagcacccaacccctgggcagctcttgtgaccggtgccctggctggtacatgtttcagttccaccggatcctgcagtacgccctgccgagacaggagtcccagcggccattcttttggattttcatggacaacttgctgctgaccgaggatgaccaggaaactaccactcggttcctgcagaccgaagccgtgaccctgcaggacgtgagaggccgggactaccagaacgccatgcgggtgtggtccaacatccctggactgaaaagcaagcacgcacctctgacccctaaagaagaggagtacctgcaggcccaggtgcggagcagaagcaagctggacgcccctaaggtggatctgctggtgaagaattgcctcctgcccctgagagagtacttcaagtatttcagccagaatagtctgcccctgggcggcccaagcagcggcgcccctcctcccagcggcggcagcccagccggctccccaacctctaccgaggagggcacctctgagtccgccacccccgagagcggccctggcacctccaccgagcccagcgagggcagcgcacccggcagccctgccggcagccccacctccacagaggagggaaccagcaccgagcccagcgaaggcagcgccccaggcaccagcaccgagcctagtgagggcggctctggcggcggcagcgcccaggagattaaacggatcaacaagatcagaagaagacttgtgaaagacagcaacaccaagaaggccggcaagacaggccccatgaaaaccctgctggttagagtgatgacacccgatctgagagagcggctggaaaacctgagaaagaagcctgaaaatatcccccagcccatcagcaatacatctagagccaacctgaataagctgctgaccgattacaccgaaatgaagaaggcgatcctgcatgtgtactgggaagagttccagaaggaccctgtgggcctgatgagccgggtggcccagcctgccagcaagaagatcgatcagaacaagctgaaacctgagatggacgagaagggcaacctgaccaccgccggctttgcctgctctcagtgtggccagcccctgttcgtgtacaagctggagcaggtgtctgagaagggcaaggcttacaccaactacttcggacggtgcaatgtggccgagcacgaaaagctgatcctgctggcccagctgaagcccgagaaggatagcgacgaagccgtgacatatagcctgggaaagtttgggcagagggccctggatttctacagcattcatgtgaccaaggagtccacccaccccgtgaagcccctggcccagatcgccggaaacagatacgcctccggacctgtgggaaaggccctgagcgacgcatgtatgggcacaatcgcctccttcctgtctaagtaccaggacatcatcatcgaacaccagaaggtggtgaagggcaaccagaagagactggagagcctgcgggagctggccggcaaggaaaacctggaataccctagcgtgaccctgccacctcagcctcacaccaaggagggcgttgatgcctacaacgaagtgatcgcccgggtgcgaatgtgggtgaacctgaacctgtggcagaagctgaagctaagcagagatgatgccaagcctctgctgagactgaagggattcccttcctttcctctggtcgagagacaggccaacgaagtggactggtgggacatggtgtgtaacgtgaagaagctgatcaacgagaaaaaggaggatggcaaggtgttttggcagaatctggctggctacaagagacaggaagccctgagaccatacctgagcagcgaggaagatcggaagaagggaaagaaattcgctcggtaccagctgggcgacctgctgctgcacctggaaaagaagcacggcgaggactggggaaaggtgtacgacgaggcctgggagcggattgacaagaaagtggaaggcctgagcaagcacatcaagctggaagaggaacggagaagcgaggacgcccagagcaaggccgccctgaccgactggctgcgggctaaggccagcttcgtgatcgagggcctgaaggaggccgacaaggacgagttctgcagatgcgagctgaagctgcagaagtggtacggggacctgcggggaaagcccttcgccatcgaagccgagaacagcatcctggacatcagcggcttcagcaagcagtacaactgtgccttcatctggcagaaggacggcgtgaagaagctgaacctgtacctgatcatcaactacttcaagggcggcaagctgcggttcaagaagatcaaacctgaagccttcgaagccaacagattctacaccgtgatcaacaaaaagagcggcgagatcgtgcccatggaggtgaacttcaacttcgacgaccccaacctgatcatcctgcctctggcctttggcaagagacagggcagagaattcatctggaacgacctgctgtccctggaaaccggcagcctgaagctggccaacggaagagtgatcgagaagacactgtacaacagaagaacccggcaggatgagcctgccctgttcgtggccctgaccttcgagcggcgggaggtcctggactcctccaatatcaaaccaatgaacctgatcggcgtggcaagaggcgaaaacatccccgccgtgatcgccctgaccgaccccgagggctgcccactgagccggtttaaggatagcctgggaaacccaacccacatcctgagaatcggcgagagctataaggagaagcagcggaccatccaggccaagaaggaggtggagcagcggagagccggcggctacagccggaagtacgccagcaaagccaagaatctggcagacgatatggtgagaaacaccgctagagatctgctgtactacgccgtgacccaggatgccatgctgatcttcgccaacctgagccggggcttcggccggcagggcaagcggaccttcatggccgagagacagtacacacggatggaggactggctgaccgccaagctggcctacgagggcctgagcaagacctacctgtccaagacactggcccagtacacctccaagacatgcagcaactgtgggtttaccatcaccagcgccgactacgacagggtgctggagaagctgaagaagacagcaacaggctggatgaccacaattaacggcaaggagctgaaggtggagggccagattacctactacaacagatacaagagacagaacgtagtcaaggacctgtccgtcgagctggatagactgagcgaagaatctgtgaacaacgacatctcctcctggacaaagggcagaagcggagaagctctgagcctcctgaagaaaagattctcccatagacccgtgcaggagaagttcgtgtgcctgaactgcggcttcgagacacacgcagccgagcaagccgccctgaacatcgccagatcctggctgttcctgcggagccaggagtacaagaaataccagacaaacaagacaaccggcaacaccgataagagagccttcgtcgagacctggcagtccttttaccggaagaagcttaaggaggtgtggaaacctgccgtgcggtctggcggatctggcggaggctccacaagctaccagatccccgtgagcttcaaggacgtggtggtgggcttcacccaggaggagtggcacaggctgagccccgcccagagggccctgtacagggacgtgatgctggagacctacagcaacctggtgagcgtgggctacgagggcaccaagcccgacgtgatcctgaggctggagcaggaggaggccccctggatcggcgaggccgcctgccccggctgccactgctgggaggacatctggaggaccagccccaagaaaaagagaaaagtctaagctgccttctgcggggcttgccttctggccatgcccttcttctctcccttgcacctgtacctcttggtctttgaataaagcctgagtaggaaggctagcaaaaaaaaaaaaaaaaaaaaaaaaaaaaaaaaaaaaaaaaaaaaaaaaaaaaaaaaaaaaaaaaaaaaaaaaaaaaaaaa

SEQ ID NO: 3081 - RNA, 5419 nt, synthetic construct
  source 1..5419: mol_type = other RNA
aggaaataagagagaaaagaagagtaagaagaaatataagagccaccatggcccctaagaagaagcgtaaagtgagccgggtgaacggcagcggcagcggcggcggcatgaaccacgaccaggagttcgacccccctaaggtgtaccctcccgtccccgccgagaagagaaagcccatccgggtcctgagcctgttcgatggcatcgccaccggtctgctggtgctgaaggacctgggcatccaggtggataggtacattgcctccgaggtgtgcgaggactccatcaccgtgggaatggtgcgtcatcagggcaagatcatgtacgtgggcgacgtgcggagcgtgacacagaagcatatccaggagtggggccctttcgacctggtgatcggcggcagcccttgcaatgacctgagcatcgtgaacccagcccggaagggcctgtacgagggaaccggcagactgttcttcgagttttacagactgctgcacgacgcccggcctaaggaaggcgacgaccggcccttcttttggctgttcgagaatgtggtggccatgggagtcagcgacaagcgggatattagccggttcctggagagcaaccccgtgatgatcgatgccaaggaagtgagcgccgcccaccgggccagatacttctggggcaatctgcctggcatgaacagacccctggccagcaccgtgaacgacaagctggagctgcaggagtgcctggagcacggccggatcgccaagttcagcaaggtgagaaccatcaccacccgaagcaacagcatcaaacaaggcaaggaccagcactttcctgtgttcatgaacgagaaggaggacatcctgtggtgtaccgagatggagagagtgttcgggttcccagtccactacacagatgtcagcaacatgtctagactggccagacagagactgctgggaagaagctggtccgtccctgtgatcagacacctgttcgcccctctgaaggagtacttcgcctgcgtgagcagcggcaacagcaacgccaacagccggggccccagcttctctagcggcctggtgccactgtccctgagagggagccacatgggccccatggagatctacaaaaccgtgagcgcctggaagcggcagcctgtgcgcgtgctgagcctgtttcggaatatcgataaagtcctgaaaagcctgggattcctggagagcggctctggctccggcggtggcaccctgaagtacgtggaggatgtgacaaacgtggtcagacgggatgtggagaagtggggccccttcgatctggtgtacggcagcacccaacccctgggcagctcttgtgaccggtgccctggctggtacatgtttcagttccaccggatcctgcagtacgccctgccgagacaggagtcccagcggccattcttttggattttcatggacaacttgctgctgaccgaggatgaccaggaaactaccactcggttcctgcagaccgaagccgtgaccctgcaggacgtgagaggccgggactaccagaacgccatgcgggtgtggtccaacatccctggactgaaaagcaagcacgcacctctgacccctaaagaagaggagtacctgcaggcccaggtgcggagcagaagcaagctggacgcccctaaggtggatctgctggtgaagaattgcctcctgcccctgagagagtacttcaagtatttcagccagaatagtctgcccctgggcggcccaagcagcggcgcccctcctcccagcggcggcagcccagccggctccccaacctctaccgaggagggcacctctgagtccgccacccccgagagcggccctggcacctccaccgagcccagcgagggcagcgcacccggcagccctgccggcagccccacctccacagaggagggaaccagcaccgagcccagcgaaggcagcgccccaggcaccagcaccgagcctagtgagggcggctctggcggcggcagcgcccaggagattaaacggatcaacaagatcagaagaagacttgtgaaagacagcaacaccaagaaggccggcaagacaggccccatgaaaaccctgctggttagagtgatgacacccgatctgagagagcggctggaaaacctgagaaagaagcctgaaaatatcccccagcccatcagcaatacatctagagccaacctgaataagctgctgaccgattacaccgaaatgaagaaggcgatcctgcatgtgtactgggaagagttccagaaggaccctgtgggcctgatgagccgggtggcccagcctgccagcaagaagatcgatcagaacaagctgaaacctgagatggacgagaagggcaacctgaccaccgccggctttgcctgctctcagtgtggccagcccctgttcgtgtacaagctggagcaggtgtctgagaagggcaaggcttacaccaactacttcggacggtgcaatgtggccgagcacgaaaagctgatcctgctggcccagctgaagcccgagaaggatagcgacgaagccgtgacatatagcctgggaaagtttgggcagagggccctggatttctacagcattcatgtgaccaaggagtccacccaccccgtgaagcccctggcccagatcgccggaaacagatacgcctccggacctgtgggaaaggccctgagcgacgcatgtatgggcacaatcgcctccttcctgtctaagtaccaggacatcatcatcgaacaccagaaggtggtgaagggcaaccagaagagactggagagcctgcgggagctggccggcaaggaaaacctggaataccctagcgtgaccctgccacctcagcctcacaccaaggagggcgttgatgcctacaacgaagtgatcgcccgggtgcgaatgtgggtgaacctgaacctgtggcagaagctgaagctaagcagagatgatgccaagcctctgctgagactgaagggattcccttcctttcctctggtcgagagacaggccaacgaagtggactggtgggacatggtgtgtaacgtgaagaagctgatcaacgagaaaaaggaggatggcaaggtgttttggcagaatctggctggctacaagagacaggaagccctgagaccatacctgagcagcgaggaagatcggaagaagggaaagaaattcgctcggtaccagctgggcgacctgctgctgcacctggaaaagaagcacggcgaggactggggaaaggtgtacgacgaggcctgggagcggattgacaagaaagtggaaggcctgagcaagcacatcaagctggaagaggaacggagaagcgaggacgcccagagcaaggccgccctgaccgactggctgcgggctaaggccagcttcgtgatcgagggcctgaaggaggccgacaaggacgagttctgcagatgcgagctgaagctgcagaagtggtacggggacctgcggggaaagcccttcgccatcgaagccgagaacagcatcctggacatcagcggcttcagcaagcagtacaactgtgccttcatctggcagaaggacggcgtgaagaagctgaacctgtacctgatcatcaactacttcaagggcggcaagctgcggttcaagaagatcaaacctgaagccttcgaagccaacagattctacaccgtgatcaacaaaaagagcggcgagatcgtgcccatggaggtgaacttcaacttcgacgaccccaacctgatcatcctgcctctggcctttggcaagagacagggcagagaattcatctggaacgacctgctgtccctggaaaccggcagcctgaagctggccaacggaagagtgatcgagaagacactgtacaacagaagaacccggcaggatgagcctgccctgttcgtggccctgaccttcgagcggcgggaggtcctggactcctccaatatcaaaccaatgaacctgatcggcgtggcaagaggcgaaaacatccccgccgtgatcgccctgaccgaccccgagggctgcccactgagccggtttaaggatagcctgggaaacccaacccacatcctgagaatcggcgagagctataaggagaagcagcggaccatccaggccaagaaggaggtggagcagcggagagccggcggctacagccggaagtacgccagcaaagccaagaatctggcagacgatatggtgagaaacaccgctagagatctgctgtactacgccgtgacccaggatgccatgctgatcttcgccaacctgagccggggcttcggccggcagggcaagcggaccttcatggccgagagacagtacacacggatggaggactggctgaccgccaagctggcctacgagggcctgagcaagacctacctgtccaagacactggcccagtacacctccaagacatgcagcaactgtgggtttaccatcaccagcgccgactacgacagggtgctggagaagctgaagaagacagcaacaggctggatgaccacaattaacggcaaggagctgaaggtggagggccagattacctactacaacagatacaagagacagaacgtagtcaaggacctgtccgtcgagctggatagactgagcgaagaatctgtgaacaacgacatctcctcctggacaaagggcagaagcggagaagctctgagcctcctgaagaaaagattctcccatagacccgtgcaggagaagttcgtgtgcctgaactgcggcttcgagacacacgcagccgagcaagccgccctgaacatcgccagatcctggctgttcctgcggagccaggagtacaagaaataccagacaaacaagacaaccggcaacaccgataagagagccttcgtcgagacctggcagtccttttaccggaagaagcttaaggaggtgtggaaacctgccgtgcggtctggcggatctggcggaggctccacaagcagccagagcctggtgaccttcggcgacgtggccgtggacttcagcagggaggagtgggagtggctgagcagcgcccagaggaccctgtacaggaccgtgatgctggagaactacaggaacctggtgagcctgggcctgtgcatcagcaagcccgacatgatcagcagcctggagcagaggaaggagccctggatggccaagaggaagctgaccaggggcaggtgccccgacctgaagatcgtgaccagccccaagaaaaagagaaaagtctaagctgccttctgcggggcttgccttctggccatgcccttcttctctcccttgcacctgtacctcttggtctttgaataaagcctgagtaggaaggctagcaaaaaaaaaaaaaaaaaaaaaaaaaaaaaaaaaaaaaaaaaaaaaaaaaaaaaaaaaaaaaaaaaaaaaaaaaaaaaaaa

SEQ ID NO: 3082 - RNA, 5419 nt, synthetic construct
  source 1..5419: mol_type = other RNA
aggaaataagagagaaaagaagagtaagaagaaatataagagccaccatggcccctaagaagaagcgtaaagtgagccgggtgaacggcagcggcagcggcggcggcatgaaccacgaccaggagttcgacccccctaaggtgtaccctcccgtccccgccgagaagagaaagcccatccgggtcctgagcctgttcgatggcatcgccaccggtctgctggtgctgaaggacctgggcatccaggtggataggtacattgcctccgaggtgtgcgaggactccatcaccgtgggaatggtgcgtcatcagggcaagatcatgtacgtgggcgacgtgcggagcgtgacacagaagcatatccaggagtggggccctttcgacctggtgatcggcggcagcccttgcaatgacctgagcatcgtgaacccagcccggaagggcctgtacgagggaaccggcagactgttcttcgagttttacagactgctgcacgacgcccggcctaaggaaggcgacgaccggcccttcttttggctgttcgagaatgtggtggccatgggagtcagcgacaagcgggatattagccggttcctggagagcaaccccgtgatgatcgatgccaaggaagtgagcgccgcccaccgggccagatacttctggggcaatctgcctggcatgaacagacccctggccagcaccgtgaacgacaagctggagctgcaggagtgcctggagcacggccggatcgccaagttcagcaaggtgagaaccatcaccacccgaagcaacagcatcaaacaaggcaaggaccagcactttcctgtgttcatgaacgagaaggaggacatcctgtggtgtaccgagatggagagagtgttcgggttcccagtccactacacagatgtcagcaacatgtctagactggccagacagagactgctgggaagaagctggtccgtccctgtgatcagacacctgttcgcccctctgaaggagtacttcgcctgcgtgagcagcggcaacagcaacgccaacagccggggccccagcttctctagcggcctggtgccactgtccctgagagggagccacatgggccccatggagatctacaaaaccgtgagcgcctggaagcggcagcctgtgcgcgtgctgagcctgtttcggaatatcgataaagtcctgaaaagcctgggattcctggagagcggctctggctccggcggtggcaccctgaagtacgtggaggatgtgacaaacgtggtcagacgggatgtggagaagtggggccccttcgatctggtgtacggcagcacccaacccctgggcagctcttgtgaccggtgccctggctggtacatgtttcagttccaccggatcctgcagtacgccctgccgagacaggagtcccagcggccattcttttggattttcatggacaacttgctgctgaccgaggatgaccaggaaactaccactcggttcctgcagaccgaagccgtgaccctgcaggacgtgagaggccgggactaccagaacgccatgcgggtgtggtccaacatccctggactgaaaagcaagcacgcacctctgacccctaaagaagaggagtacctgcaggcccaggtgcggagcagaagcaagctggacgcccctaaggtggatctgctggtgaagaattgcctcctgcccctgagagagtacttcaagtatttcagccagaatagtctgcccctgggcggcccaagcagcggcgcccctcctcccagcggcggcagcccagccggctccccaacctctaccgaggagggcacctctgagtccgccacccccgagagcggccctggcacctccaccgagcccagcgagggcagcgcacccggcagccctgccggcagccccacctccacagaggagggaaccagcaccgagcccagcgaaggcagcgccccaggcaccagcaccgagcctagtgagggcggctctggcggcggcagcgcccaggagattaaacggatcaacaagatcagaagaagacttgtgaaagacagcaacaccaagaaggccggcaagacaggccccatgaaaaccctgctggttagagtgatgacacccgatctgagagagcggctggaaaacctgagaaagaagcctgaaaatatcccccagcccatcagcaatacatctagagccaacctgaataagctgctgaccgattacaccgaaatgaagaaggcgatcctgcatgtgtactgggaagagttccagaaggaccctgtgggcctgatgagccgggtggcccagcctgccagcaagaagatcgatcagaacaagctgaaacctgagatggacgagaagggcaacctgaccaccgccggctttgcctgctctcagtgtggccagcccctgttcgtgtacaagctggagcaggtgtctgagaagggcaaggcttacaccaactacttcggacggtgcaatgtggccgagcacgaaaagctgatcctgctggcccagctgaagcccgagaaggatagcgacgaagccgtgacatatagcctgggaaagtttgggcagagggccctggatttctacagcattcatgtgaccaaggagtccacccaccccgtgaagcccctggcccagatcgccggaaacagatacgcctccggacctgtgggaaaggccctgagcgacgcatgtatgggcacaatcgcctccttcctgtctaagtaccaggacatcatcatcgaacaccagaaggtggtgaagggcaaccagaagagactggagagcctgcgggagctggccggcaaggaaaacctggaataccctagcgtgaccctgccacctcagcctcacaccaaggagggcgttgatgcctacaacgaagtgatcgcccgggtgcgaatgtgggtgaacctgaacctgtggcagaagctgaagctaagcagagatgatgccaagcctctgctgagactgaagggattcccttcctttcctctggtcgagagacaggccaacgaagtggactggtgggacatggtgtgtaacgtgaagaagctgatcaacgagaaaaaggaggatggcaaggtgttttggcagaatctggctggctacaagagacaggaagccctgagaccatacctgagcagcgaggaagatcggaagaagggaaagaaattcgctcggtaccagctgggcgacctgctgctgcacctggaaaagaagcacggcgaggactggggaaaggtgtacgacgaggcctgggagcggattgacaagaaagtggaaggcctgagcaagcacatcaagctggaagaggaacggagaagcgaggacgcccagagcaaggccgccctgaccgactggctgcgggctaaggccagcttcgtgatcgagggcctgaaggaggccgacaaggacgagttctgcagatgcgagctgaagctgcagaagtggtacggggacctgcggggaaagcccttcgccatcgaagccgagaacagcatcctggacatcagcggcttcagcaagcagtacaactgtgccttcatctggcagaaggacggcgtgaagaagctgaacctgtacctgatcatcaactacttcaagggcggcaagctgcggttcaagaagatcaaacctgaagccttcgaagccaacagattctacaccgtgatcaacaaaaagagcggcgagatcgtgcccatggaggtgaacttcaacttcgacgaccccaacctgatcatcctgcctctggcctttggcaagagacagggcagagaattcatctggaacgacctgctgtccctggaaaccggcagcctgaagctggccaacggaagagtgatcgagaagacactgtacaacagaagaacccggcaggatgagcctgccctgttcgtggccctgaccttcgagcggcgggaggtcctggactcctccaatatcaaaccaatgaacctgatcggcgtggcaagaggcgaaaacatccccgccgtgatcgccctgaccgaccccgagggctgcccactgagccggtttaaggatagcctgggaaacccaacccacatcctgagaatcggcgagagctataaggagaagcagcggaccatccaggccaagaaggaggtggagcagcggagagccggcggctacagccggaagtacgccagcaaagccaagaatctggcagacgatatggtgagaaacaccgctagagatctgctgtactacgccgtgacccaggatgccatgctgatcttcgccaacctgagccggggcttcggccggcagggcaagcggaccttcatggccgagagacagtacacacggatggaggactggctgaccgccaagctggcctacgagggcctgagcaagacctacctgtccaagacactggcccagtacacctccaagacatgcagcaactgtgggtttaccatcaccagcgccgactacgacagggtgctggagaagctgaagaagacagcaacaggctggatgaccacaattaacggcaaggagctgaaggtggagggccagattacctactacaacagatacaagagacagaacgtagtcaaggacctgtccgtcgagctggatagactgagcgaagaatctgtgaacaacgacatctcctcctggacaaagggcagaagcggagaagctctgagcctcctgaagaaaagattctcccatagacccgtgcaggagaagttcgtgtgcctgaactgcggcttcgagacacacgcagccgagcaagccgccctgaacatcgccagatcctggctgttcctgcggagccaggagtacaagaaataccagacaaacaagacaaccggcaacaccgataagagagccttcgtcgagacctggcagtccttttaccggaagaagcttaaggaggtgtggaaacctgccgtgcggtctggcggatctggcggaggctccacaagcatgatgcaggcccaggagagcctgaccctggaggacgtggccgtggacttcacctgggaggagtggcagctgctgagccccgcccagaaggacctgtacagggacgtgatgctggagaactacagcaacctggtgagcgtgggctaccaggccagcaagcccgacgccttcagcaagctggagaggggcgaggagacctgcaccaccgaggacgagatctacagcaggatctgcagcgagatcaccagccccaagaaaaagagaaaagtctaagctgccttctgcggggcttgccttctggccatgcccttcttctctcccttgcacctgtacctcttggtctttgaataaagcctgagtaggaaggctagcaaaaaaaaaaaaaaaaaaaaaaaaaaaaaaaaaaaaaaaaaaaaaaaaaaaaaaaaaaaaaaaaaaaaaaaaaaaaaaaa

SEQ ID NO: 3083 - RNA, 5419 nt, synthetic construct
  source 1..5419: mol_type = other RNA
aggaaataagagagaaaagaagagtaagaagaaatataagagccaccatggcccctaagaagaagcgtaaagtgagccgggtgaacggcagcggcagcggcggcggcatgaaccacgaccaggagttcgacccccctaaggtgtaccctcccgtccccgccgagaagagaaagcccatccgggtcctgagcctgttcgatggcatcgccaccggtctgctggtgctgaaggacctgggcatccaggtggataggtacattgcctccgaggtgtgcgaggactccatcaccgtgggaatggtgcgtcatcagggcaagatcatgtacgtgggcgacgtgcggagcgtgacacagaagcatatccaggagtggggccctttcgacctggtgatcggcggcagcccttgcaatgacctgagcatcgtgaacccagcccggaagggcctgtacgagggaaccggcagactgttcttcgagttttacagactgctgcacgacgcccggcctaaggaaggcgacgaccggcccttcttttggctgttcgagaatgtggtggccatgggagtcagcgacaagcgggatattagccggttcctggagagcaaccccgtgatgatcgatgccaaggaagtgagcgccgcccaccgggccagatacttctggggcaatctgcctggcatgaacagacccctggccagcaccgtgaacgacaagctggagctgcaggagtgcctggagcacggccggatcgccaagttcagcaaggtgagaaccatcaccacccgaagcaacagcatcaaacaaggcaaggaccagcactttcctgtgttcatgaacgagaaggaggacatcctgtggtgtaccgagatggagagagtgttcgggttcccagtccactacacagatgtcagcaacatgtctagactggccagacagagactgctgggaagaagctggtccgtccctgtgatcagacacctgttcgcccctctgaaggagtacttcgcctgcgtgagcagcggcaacagcaacgccaacagccggggccccagcttctctagcggcctggtgccactgtccctgagagggagccacatgggccccatggagatctacaaaaccgtgagcgcctggaagcggcagcctgtgcgcgtgctgagcctgtttcggaatatcgataaagtcctgaaaagcctgggattcctggagagcggctctggctccggcggtggcaccctgaagtacgtggaggatgtgacaaacgtggtcagacgggatgtggagaagtggggccccttcgatctggtgtacggcagcacccaacccctgggcagctcttgtgaccggtgccctggctggtacatgtttcagttccaccggatcctgcagtacgccctgccgagacaggagtcccagcggccattcttttggattttcatggacaacttgctgctgaccgaggatgaccaggaaactaccactcggttcctgcagaccgaagccgtgaccctgcaggacgtgagaggccgggactaccagaacgccatgcgggtgtggtccaacatccctggactgaaaagcaagcacgcacctctgacccctaaagaagaggagtacctgcaggcccaggtgcggagcagaagcaagctggacgcccctaaggtggatctgctggtgaagaattgcctcctgcccctgagagagtacttcaagtatttcagccagaatagtctgcccctgggcggcccaagcagcggcgcccctcctcccagcggcggcagcccagccggctccccaacctctaccgaggagggcacctctgagtccgccacccccgagagcggccctggcacctccaccgagcccagcgagggcagcgcacccggcagccctgccggcagccccacctccacagaggagggaaccagcaccgagcccagcgaaggcagcgccccaggcaccagcaccgagcctagtgagggcggctctggcggcggcagcgcccaggagattaaacggatcaacaagatcagaagaagacttgtgaaagacagcaacaccaagaaggccggcaagacaggccccatgaaaaccctgctggttagagtgatgacacccgatctgagagagcggctggaaaacctgagaaagaagcctgaaaatatcccccagcccatcagcaatacatctagagccaacctgaataagctgctgaccgattacaccgaaatgaagaaggcgatcctgcatgtgtactgggaagagttccagaaggaccctgtgggcctgatgagccgggtggcccagcctgccagcaagaagatcgatcagaacaagctgaaacctgagatggacgagaagggcaacctgaccaccgccggctttgcctgctctcagtgtggccagcccctgttcgtgtacaagctggagcaggtgtctgagaagggcaaggcttacaccaactacttcggacggtgcaatgtggccgagcacgaaaagctgatcctgctggcccagctgaagcccgagaaggatagcgacgaagccgtgacatatagcctgggaaagtttgggcagagggccctggatttctacagcattcatgtgaccaaggagtccacccaccccgtgaagcccctggcccagatcgccggaaacagatacgcctccggacctgtgggaaaggccctgagcgacgcatgtatgggcacaatcgcctccttcctgtctaagtaccaggacatcatcatcgaacaccagaaggtggtgaagggcaaccagaagagactggagagcctgcgggagctggccggcaaggaaaacctggaataccctagcgtgaccctgccacctcagcctcacaccaaggagggcgttgatgcctacaacgaagtgatcgcccgggtgcgaatgtgggtgaacctgaacctgtggcagaagctgaagctaagcagagatgatgccaagcctctgctgagactgaagggattcccttcctttcctctggtcgagagacaggccaacgaagtggactggtgggacatggtgtgtaacgtgaagaagctgatcaacgagaaaaaggaggatggcaaggtgttttggcagaatctggctggctacaagagacaggaagccctgagaccatacctgagcagcgaggaagatcggaagaagggaaagaaattcgctcggtaccagctgggcgacctgctgctgcacctggaaaagaagcacggcgaggactggggaaaggtgtacgacgaggcctgggagcggattgacaagaaagtggaaggcctgagcaagcacatcaagctggaagaggaacggagaagcgaggacgcccagagcaaggccgccctgaccgactggctgcgggctaaggccagcttcgtgatcgagggcctgaaggaggccgacaaggacgagttctgcagatgcgagctgaagctgcagaagtggtacggggacctgcggggaaagcccttcgccatcgaagccgagaacagcatcctggacatcagcggcttcagcaagcagtacaactgtgccttcatctggcagaaggacggcgtgaagaagctgaacctgtacctgatcatcaactacttcaagggcggcaagctgcggttcaagaagatcaaacctgaagccttcgaagccaacagattctacaccgtgatcaacaaaaagagcggcgagatcgtgcccatggaggtgaacttcaacttcgacgaccccaacctgatcatcctgcctctggcctttggcaagagacagggcagagaattcatctggaacgacctgctgtccctggaaaccggcagcctgaagctggccaacggaagagtgatcgagaagacactgtacaacagaagaacccggcaggatgagcctgccctgttcgtggccctgaccttcgagcggcgggaggtcctggactcctccaatatcaaaccaatgaacctgatcggcgtggcaagaggcgaaaacatccccgccgtgatcgccctgaccgaccccgagggctgcccactgagccggtttaaggatagcctgggaaacccaacccacatcctgagaatcggcgagagctataaggagaagcagcggaccatccaggccaagaaggaggtggagcagcggagagccggcggctacagccggaagtacgccagcaaagccaagaatctggcagacgatatggtgagaaacaccgctagagatctgctgtactacgccgtgacccaggatgccatgctgatcttcgccaacctgagccggggcttcggccggcagggcaagcggaccttcatggccgagagacagtacacacggatggaggactggctgaccgccaagctggcctacgagggcctgagcaagacctacctgtccaagacactggcccagtacacctccaagacatgcagcaactgtgggtttaccatcaccagcgccgactacgacagggtgctggagaagctgaagaagacagcaacaggctggatgaccacaattaacggcaaggagctgaaggtggagggccagattacctactacaacagatacaagagacagaacgtagtcaaggacctgtccgtcgagctggatagactgagcgaagaatctgtgaacaacgacatctcctcctggacaaagggcagaagcggagaagctctgagcctcctgaagaaaagattctcccatagacccgtgcaggagaagttcgtgtgcctgaactgcggcttcgagacacacgcagccgagcaagccgccctgaacatcgccagatcctggctgttcctgcggagccaggagtacaagaaataccagacaaacaagacaaccggcaacaccgataagagagccttcgtcgagacctggcagtccttttaccggaagaagcttaaggaggtgtggaaacctgccgtgcggtctggcggatctggcggaggctccacaagcagccaggagcccgtgaccttcgaggacgtggccgtgtacttcacccagaaccagtgggccagcctggaccccatgcagagggccctgtacctggaggtgatgctggagaactacgccaacatcaccagcctggccctgcccttccccaagcccgacctgatcctgcagctggagcagggcgaggccccctgggacctggacccctggacccccctggagggcgaggccctggagggcgtgcacaccagccccaagaaaaagagaaaagtctaagctgccttctgcggggcttgccttctggccatgcccttcttctctcccttgcacctgtacctcttggtctttgaataaagcctgagtaggaaggctagcaaaaaaaaaaaaaaaaaaaaaaaaaaaaaaaaaaaaaaaaaaaaaaaaaaaaaaaaaaaaaaaaaaaaaaaaaaaaaaaa

SEQ ID NO: 3084 - RNA, 5419 nt, synthetic construct
  source 1..5419: mol_type = other RNA
aggaaataagagagaaaagaagagtaagaagaaatataagagccaccatggcccctaagaagaagcgtaaagtgagccgggtgaacggcagcggcagcggcggcggcatgaaccacgaccaggagttcgacccccctaaggtgtaccctcccgtccccgccgagaagagaaagcccatccgggtcctgagcctgttcgatggcatcgccaccggtctgctggtgctgaaggacctgggcatccaggtggataggtacattgcctccgaggtgtgcgaggactccatcaccgtgggaatggtgcgtcatcagggcaagatcatgtacgtgggcgacgtgcggagcgtgacacagaagcatatccaggagtggggccctttcgacctggtgatcggcggcagcccttgcaatgacctgagcatcgtgaacccagcccggaagggcctgtacgagggaaccggcagactgttcttcgagttttacagactgctgcacgacgcccggcctaaggaaggcgacgaccggcccttcttttggctgttcgagaatgtggtggccatgggagtcagcgacaagcgggatattagccggttcctggagagcaaccccgtgatgatcgatgccaaggaagtgagcgccgcccaccgggccagatacttctggggcaatctgcctggcatgaacagacccctggccagcaccgtgaacgacaagctggagctgcaggagtgcctggagcacggccggatcgccaagttcagcaaggtgagaaccatcaccacccgaagcaacagcatcaaacaaggcaaggaccagcactttcctgtgttcatgaacgagaaggaggacatcctgtggtgtaccgagatggagagagtgttcgggttcccagtccactacacagatgtcagcaacatgtctagactggccagacagagactgctgggaagaagctggtccgtccctgtgatcagacacctgttcgcccctctgaaggagtacttcgcctgcgtgagcagcggcaacagcaacgccaacagccggggccccagcttctctagcggcctggtgccactgtccctgagagggagccacatgggccccatggagatctacaaaaccgtgagcgcctggaagcggcagcctgtgcgcgtgctgagcctgtttcggaatatcgataaagtcctgaaaagcctgggattcctggagagcggctctggctccggcggtggcaccctgaagtacgtggaggatgtgacaaacgtggtcagacgggatgtggagaagtggggccccttcgatctggtgtacggcagcacccaacccctgggcagctcttgtgaccggtgccctggctggtacatgtttcagttccaccggatcctgcagtacgccctgccgagacaggagtcccagcggccattcttttggattttcatggacaacttgctgctgaccgaggatgaccaggaaactaccactcggttcctgcagaccgaagccgtgaccctgcaggacgtgagaggccgggactaccagaacgccatgcgggtgtggtccaacatccctggactgaaaagcaagcacgcacctctgacccctaaagaagaggagtacctgcaggcccaggtgcggagcagaagcaagctggacgcccctaaggtggatctgctggtgaagaattgcctcctgcccctgagagagtacttcaagtatttcagccagaatagtctgcccctgggcggcccaagcagcggcgcccctcctcccagcggcggcagcccagccggctccccaacctctaccgaggagggcacctctgagtccgccacccccgagagcggccctggcacctccaccgagcccagcgagggcagcgcacccggcagccctgccggcagccccacctccacagaggagggaaccagcaccgagcccagcgaaggcagcgccccaggcaccagcaccgagcctagtgagggcggctctggcggcggcagcgcccaggagattaaacggatcaacaagatcagaagaagacttgtgaaagacagcaacaccaagaaggccggcaagacaggccccatgaaaaccctgctggttagagtgatgacacccgatctgagagagcggctggaaaacctgagaaagaagcctgaaaatatcccccagcccatcagcaatacatctagagccaacctgaataagctgctgaccgattacaccgaaatgaagaaggcgatcctgcatgtgtactgggaagagttccagaaggaccctgtgggcctgatgagccgggtggcccagcctgccagcaagaagatcgatcagaacaagctgaaacctgagatggacgagaagggcaacctgaccaccgccggctttgcctgctctcagtgtggccagcccctgttcgtgtacaagctggagcaggtgtctgagaagggcaaggcttacaccaactacttcggacggtgcaatgtggccgagcacgaaaagctgatcctgctggcccagctgaagcccgagaaggatagcgacgaagccgtgacatatagcctgggaaagtttgggcagagggccctggatttctacagcattcatgtgaccaaggagtccacccaccccgtgaagcccctggcccagatcgccggaaacagatacgcctccggacctgtgggaaaggccctgagcgacgcatgtatgggcacaatcgcctccttcctgtctaagtaccaggacatcatcatcgaacaccagaaggtggtgaagggcaaccagaagagactggagagcctgcgggagctggccggcaaggaaaacctggaataccctagcgtgaccctgccacctcagcctcacaccaaggagggcgttgatgcctacaacgaagtgatcgcccgggtgcgaatgtgggtgaacctgaacctgtggcagaagctgaagctaagcagagatgatgccaagcctctgctgagactgaagggattcccttcctttcctctggtcgagagacaggccaacgaagtggactggtgggacatggtgtgtaacgtgaagaagctgatcaacgagaaaaaggaggatggcaaggtgttttggcagaatctggctggctacaagagacaggaagccctgagaccatacctgagcagcgaggaagatcggaagaagggaaagaaattcgctcggtaccagctgggcgacctgctgctgcacctggaaaagaagcacggcgaggactggggaaaggtgtacgacgaggcctgggagcggattgacaagaaagtggaaggcctgagcaagcacatcaagctggaagaggaacggagaagcgaggacgcccagagcaaggccgccctgaccgactggctgcgggctaaggccagcttcgtgatcgagggcctgaaggaggccgacaaggacgagttctgcagatgcgagctgaagctgcagaagtggtacggggacctgcggggaaagcccttcgccatcgaagccgagaacagcatcctggacatcagcggcttcagcaagcagtacaactgtgccttcatctggcagaaggacggcgtgaagaagctgaacctgtacctgatcatcaactacttcaagggcggcaagctgcggttcaagaagatcaaacctgaagccttcgaagccaacagattctacaccgtgatcaacaaaaagagcggcgagatcgtgcccatggaggtgaacttcaacttcgacgaccccaacctgatcatcctgcctctggcctttggcaagagacagggcagagaattcatctggaacgacctgctgtccctggaaaccggcagcctgaagctggccaacggaagagtgatcgagaagacactgtacaacagaagaacccggcaggatgagcctgccctgttcgtggccctgaccttcgagcggcgggaggtcctggactcctccaatatcaaaccaatgaacctgatcggcgtggcaagaggcgaaaacatccccgccgtgatcgccctgaccgaccccgagggctgcccactgagccggtttaaggatagcctgggaaacccaacccacatcctgagaatcggcgagagctataaggagaagcagcggaccatccaggccaagaaggaggtggagcagcggagagccggcggctacagccggaagtacgccagcaaagccaagaatctggcagacgatatggtgagaaacaccgctagagatctgctgtactacgccgtgacccaggatgccatgctgatcttcgccaacctgagccggggcttcggccggcagggcaagcggaccttcatggccgagagacagtacacacggatggaggactggctgaccgccaagctggcctacgagggcctgagcaagacctacctgtccaagacactggcccagtacacctccaagacatgcagcaactgtgggtttaccatcaccagcgccgactacgacagggtgctggagaagctgaagaagacagcaacaggctggatgaccacaattaacggcaaggagctgaaggtggagggccagattacctactacaacagatacaagagacagaacgtagtcaaggacctgtccgtcgagctggatagactgagcgaagaatctgtgaacaacgacatctcctcctggacaaagggcagaagcggagaagctctgagcctcctgaagaaaagattctcccatagacccgtgcaggagaagttcgtgtgcctgaactgcggcttcgagacacacgcagccgagcaagccgccctgaacatcgccagatcctggctgttcctgcggagccaggagtacaagaaataccagacaaacaagacaaccggcaacaccgataagagagccttcgtcgagacctggcagtccttttaccggaagaagcttaaggaggtgtggaaacctgccgtgcggtctggcggatctggcggaggctccacaagcctgcaggagagcgtgaccttcaaggacgtggccgtgctgttcacccaggacgagtgggcccagctgagccccgcccagagggccctgtacagggacgtgatgctggagaactacagccacctggtgagcctgggcctgctgggccccaagcccgacctgttcgcccagctgggcaagggcgaggagtggacccccgaggacaccagcaggggcttctgcctggactggatgaccatccccgtgaccagccccaagaaaaagagaaaagtctaagctgccttctgcggggcttgccttctggccatgcccttcttctctcccttgcacctgtacctcttggtctttgaataaagcctgagtaggaaggctagcaaaaaaaaaaaaaaaaaaaaaaaaaaaaaaaaaaaaaaaaaaaaaaaaaaaaaaaaaaaaaaaaaaaaaaaaaaaaaaaa

SEQ ID NO: 3085 - RNA, 5419 nt, synthetic construct
  source 1..5419: mol_type = other RNA
aggaaataagagagaaaagaagagtaagaagaaatataagagccaccatggcccctaagaagaagcgtaaagtgagccgggtgaacggcagcggcagcggcggcggcatgaaccacgaccaggagttcgacccccctaaggtgtaccctcccgtccccgccgagaagagaaagcccatccgggtcctgagcctgttcgatggcatcgccaccggtctgctggtgctgaaggacctgggcatccaggtggataggtacattgcctccgaggtgtgcgaggactccatcaccgtgggaatggtgcgtcatcagggcaagatcatgtacgtgggcgacgtgcggagcgtgacacagaagcatatccaggagtggggccctttcgacctggtgatcggcggcagcccttgcaatgacctgagcatcgtgaacccagcccggaagggcctgtacgagggaaccggcagactgttcttcgagttttacagactgctgcacgacgcccggcctaaggaaggcgacgaccggcccttcttttggctgttcgagaatgtggtggccatgggagtcagcgacaagcgggatattagccggttcctggagagcaaccccgtgatgatcgatgccaaggaagtgagcgccgcccaccgggccagatacttctggggcaatctgcctggcatgaacagacccctggccagcaccgtgaacgacaagctggagctgcaggagtgcctggagcacggccggatcgccaagttcagcaaggtgagaaccatcaccacccgaagcaacagcatcaaacaaggcaaggaccagcactttcctgtgttcatgaacgagaaggaggacatcctgtggtgtaccgagatggagagagtgttcgggttcccagtccactacacagatgtcagcaacatgtctagactggccagacagagactgctgggaagaagctggtccgtccctgtgatcagacacctgttcgcccctctgaaggagtacttcgcctgcgtgagcagcggcaacagcaacgccaacagccggggccccagcttctctagcggcctggtgccactgtccctgagagggagccacatgggccccatggagatctacaaaaccgtgagcgcctggaagcggcagcctgtgcgcgtgctgagcctgtttcggaatatcgataaagtcctgaaaagcctgggattcctggagagcggctctggctccggcggtggcaccctgaagtacgtggaggatgtgacaaacgtggtcagacgggatgtggagaagtggggccccttcgatctggtgtacggcagcacccaacccctgggcagctcttgtgaccggtgccctggctggtacatgtttcagttccaccggatcctgcagtacgccctgccgagacaggagtcccagcggccattcttttggattttcatggacaacttgctgctgaccgaggatgaccaggaaactaccactcggttcctgcagaccgaagccgtgaccctgcaggacgtgagaggccgggactaccagaacgccatgcgggtgtggtccaacatccctggactgaaaagcaagcacgcacctctgacccctaaagaagaggagtacctgcaggcccaggtgcggagcagaagcaagctggacgcccctaaggtggatctgctggtgaagaattgcctcctgcccctgagagagtacttcaagtatttcagccagaatagtctgcccctgggcggcccaagcagcggcgcccctcctcccagcggcggcagcccagccggctccccaacctctaccgaggagggcacctctgagtccgccacccccgagagcggccctggcacctccaccgagcccagcgagggcagcgcacccggcagccctgccggcagccccacctccacagaggagggaaccagcaccgagcccagcgaaggcagcgccccaggcaccagcaccgagcctagtgagggcggctctggcggcggcagcgcccaggagattaaacggatcaacaagatcagaagaagacttgtgaaagacagcaacaccaagaaggccggcaagacaggccccatgaaaaccctgctggttagagtgatgacacccgatctgagagagcggctggaaaacctgagaaagaagcctgaaaatatcccccagcccatcagcaatacatctagagccaacctgaataagctgctgaccgattacaccgaaatgaagaaggcgatcctgcatgtgtactgggaagagttccagaaggaccctgtgggcctgatgagccgggtggcccagcctgccagcaagaagatcgatcagaacaagctgaaacctgagatggacgagaagggcaacctgaccaccgccggctttgcctgctctcagtgtggccagcccctgttcgtgtacaagctggagcaggtgtctgagaagggcaaggcttacaccaactacttcggacggtgcaatgtggccgagcacgaaaagctgatcctgctggcccagctgaagcccgagaaggatagcgacgaagccgtgacatatagcctgggaaagtttgggcagagggccctggatttctacagcattcatgtgaccaaggagtccacccaccccgtgaagcccctggcccagatcgccggaaacagatacgcctccggacctgtgggaaaggccctgagcgacgcatgtatgggcacaatcgcctccttcctgtctaagtaccaggacatcatcatcgaacaccagaaggtggtgaagggcaaccagaagagactggagagcctgcgggagctggccggcaaggaaaacctggaataccctagcgtgaccctgccacctcagcctcacaccaaggagggcgttgatgcctacaacgaagtgatcgcccgggtgcgaatgtgggtgaacctgaacctgtggcagaagctgaagctaagcagagatgatgccaagcctctgctgagactgaagggattcccttcctttcctctggtcgagagacaggccaacgaagtggactggtgggacatggtgtgtaacgtgaagaagctgatcaacgagaaaaaggaggatggcaaggtgttttggcagaatctggctggctacaagagacaggaagccctgagaccatacctgagcagcgaggaagatcggaagaagggaaagaaattcgctcggtaccagctgggcgacctgctgctgcacctggaaaagaagcacggcgaggactggggaaaggtgtacgacgaggcctgggagcggattgacaagaaagtggaaggcctgagcaagcacatcaagctggaagaggaacggagaagcgaggacgcccagagcaaggccgccctgaccgactggctgcgggctaaggccagcttcgtgatcgagggcctgaaggaggccgacaaggacgagttctgcagatgcgagctgaagctgcagaagtggtacggggacctgcggggaaagcccttcgccatcgaagccgagaacagcatcctggacatcagcggcttcagcaagcagtacaactgtgccttcatctggcagaaggacggcgtgaagaagctgaacctgtacctgatcatcaactacttcaagggcggcaagctgcggttcaagaagatcaaacctgaagccttcgaagccaacagattctacaccgtgatcaacaaaaagagcggcgagatcgtgcccatggaggtgaacttcaacttcgacgaccccaacctgatcatcctgcctctggcctttggcaagagacagggcagagaattcatctggaacgacctgctgtccctggaaaccggcagcctgaagctggccaacggaagagtgatcgagaagacactgtacaacagaagaacccggcaggatgagcctgccctgttcgtggccctgaccttcgagcggcgggaggtcctggactcctccaatatcaaaccaatgaacctgatcggcgtggcaagaggcgaaaacatccccgccgtgatcgccctgaccgaccccgagggctgcccactgagccggtttaaggatagcctgggaaacccaacccacatcctgagaatcggcgagagctataaggagaagcagcggaccatccaggccaagaaggaggtggagcagcggagagccggcggctacagccggaagtacgccagcaaagccaagaatctggcagacgatatggtgagaaacaccgctagagatctgctgtactacgccgtgacccaggatgccatgctgatcttcgccaacctgagccggggcttcggccggcagggcaagcggaccttcatggccgagagacagtacacacggatggaggactggctgaccgccaagctggcctacgagggcctgagcaagacctacctgtccaagacactggcccagtacacctccaagacatgcagcaactgtgggtttaccatcaccagcgccgactacgacagggtgctggagaagctgaagaagacagcaacaggctggatgaccacaattaacggcaaggagctgaaggtggagggccagattacctactacaacagatacaagagacagaacgtagtcaaggacctgtccgtcgagctggatagactgagcgaagaatctgtgaacaacgacatctcctcctggacaaagggcagaagcggagaagctctgagcctcctgaagaaaagattctcccatagacccgtgcaggagaagttcgtgtgcctgaactgcggcttcgagacacacgcagccgagcaagccgccctgaacatcgccagatcctggctgttcctgcggagccaggagtacaagaaataccagacaaacaagacaaccggcaacaccgataagagagccttcgtcgagacctggcagtccttttaccggaagaagcttaaggaggtgtggaaacctgccgtgcggtctggcggatctggcggaggctccacaagcagcctgggcagcgtgagcttcaaggacgtgaccgtggacttcagcagggaggagtggcagcagctggacctggcccagaagagcctgtacagggacgtgaccctggagaactacttcaacctgatcagcgtgggctgccaggtgcccaagcccgaggtgatcttcaacctggagcagggcggcgagctgtgcgtgctggacggcggcctgagctgccagaactgcagcgacggcgacatcggcaccagccccaagaaaaagagaaaagtctaagctgccttctgcggggcttgccttctggccatgcccttcttctctcccttgcacctgtacctcttggtctttgaataaagcctgagtaggaaggctagcaaaaaaaaaaaaaaaaaaaaaaaaaaaaaaaaaaaaaaaaaaaaaaaaaaaaaaaaaaaaaaaaaaaaaaaaaaaaaaaa

SEQ ID NO: 3086 - RNA, 5419 nt, synthetic construct
  source 1..5419: mol_type = other RNA
aggaaataagagagaaaagaagagtaagaagaaatataagagccaccatggcccctaagaagaagcgtaaagtgagccgggtgaacggcagcggcagcggcggcggcatgaaccacgaccaggagttcgacccccctaaggtgtaccctcccgtccccgccgagaagagaaagcccatccgggtcctgagcctgttcgatggcatcgccaccggtctgctggtgctgaaggacctgggcatccaggtggataggtacattgcctccgaggtgtgcgaggactccatcaccgtgggaatggtgcgtcatcagggcaagatcatgtacgtgggcgacgtgcggagcgtgacacagaagcatatccaggagtggggccctttcgacctggtgatcggcggcagcccttgcaatgacctgagcatcgtgaacccagcccggaagggcctgtacgagggaaccggcagactgttcttcgagttttacagactgctgcacgacgcccggcctaaggaaggcgacgaccggcccttcttttggctgttcgagaatgtggtggccatgggagtcagcgacaagcgggatattagccggttcctggagagcaaccccgtgatgatcgatgccaaggaagtgagcgccgcccaccgggccagatacttctggggcaatctgcctggcatgaacagacccctggccagcaccgtgaacgacaagctggagctgcaggagtgcctggagcacggccggatcgccaagttcagcaaggtgagaaccatcaccacccgaagcaacagcatcaaacaaggcaaggaccagcactttcctgtgttcatgaacgagaaggaggacatcctgtggtgtaccgagatggagagagtgttcgggttcccagtccactacacagatgtcagcaacatgtctagactggccagacagagactgctgggaagaagctggtccgtccctgtgatcagacacctgttcgcccctctgaaggagtacttcgcctgcgtgagcagcggcaacagcaacgccaacagccggggccccagcttctctagcggcctggtgccactgtccctgagagggagccacatgggccccatggagatctacaaaaccgtgagcgcctggaagcggcagcctgtgcgcgtgctgagcctgtttcggaatatcgataaagtcctgaaaagcctgggattcctggagagcggctctggctccggcggtggcaccctgaagtacgtggaggatgtgacaaacgtggtcagacgggatgtggagaagtggggccccttcgatctggtgtacggcagcacccaacccctgggcagctcttgtgaccggtgccctggctggtacatgtttcagttccaccggatcctgcagtacgccctgccgagacaggagtcccagcggccattcttttggattttcatggacaacttgctgctgaccgaggatgaccaggaaactaccactcggttcctgcagaccgaagccgtgaccctgcaggacgtgagaggccgggactaccagaacgccatgcgggtgtggtccaacatccctggactgaaaagcaagcacgcacctctgacccctaaagaagaggagtacctgcaggcccaggtgcggagcagaagcaagctggacgcccctaaggtggatctgctggtgaagaattgcctcctgcccctgagagagtacttcaagtatttcagccagaatagtctgcccctgggcggcccaagcagcggcgcccctcctcccagcggcggcagcccagccggctccccaacctctaccgaggagggcacctctgagtccgccacccccgagagcggccctggcacctccaccgagcccagcgagggcagcgcacccggcagccctgccggcagccccacctccacagaggagggaaccagcaccgagcccagcgaaggcagcgccccaggcaccagcaccgagcctagtgagggcggctctggcggcggcagcgcccaggagattaaacggatcaacaagatcagaagaagacttgtgaaagacagcaacaccaagaaggccggcaagacaggccccatgaaaaccctgctggttagagtgatgacacccgatctgagagagcggctggaaaacctgagaaagaagcctgaaaatatcccccagcccatcagcaatacatctagagccaacctgaataagctgctgaccgattacaccgaaatgaagaaggcgatcctgcatgtgtactgggaagagttccagaaggaccctgtgggcctgatgagccgggtggcccagcctgccagcaagaagatcgatcagaacaagctgaaacctgagatggacgagaagggcaacctgaccaccgccggctttgcctgctctcagtgtggccagcccctgttcgtgtacaagctggagcaggtgtctgagaagggcaaggcttacaccaactacttcggacggtgcaatgtggccgagcacgaaaagctgatcctgctggcccagctgaagcccgagaaggatagcgacgaagccgtgacatatagcctgggaaagtttgggcagagggccctggatttctacagcattcatgtgaccaaggagtccacccaccccgtgaagcccctggcccagatcgccggaaacagatacgcctccggacctgtgggaaaggccctgagcgacgcatgtatgggcacaatcgcctccttcctgtctaagtaccaggacatcatcatcgaacaccagaaggtggtgaagggcaaccagaagagactggagagcctgcgggagctggccggcaaggaaaacctggaataccctagcgtgaccctgccacctcagcctcacaccaaggagggcgttgatgcctacaacgaagtgatcgcccgggtgcgaatgtgggtgaacctgaacctgtggcagaagctgaagctaagcagagatgatgccaagcctctgctgagactgaagggattcccttcctttcctctggtcgagagacaggccaacgaagtggactggtgggacatggtgtgtaacgtgaagaagctgatcaacgagaaaaaggaggatggcaaggtgttttggcagaatctggctggctacaagagacaggaagccctgagaccatacctgagcagcgaggaagatcggaagaagggaaagaaattcgctcggtaccagctgggcgacctgctgctgcacctggaaaagaagcacggcgaggactggggaaaggtgtacgacgaggcctgggagcggattgacaagaaagtggaaggcctgagcaagcacatcaagctggaagaggaacggagaagcgaggacgcccagagcaaggccgccctgaccgactggctgcgggctaaggccagcttcgtgatcgagggcctgaaggaggccgacaaggacgagttctgcagatgcgagctgaagctgcagaagtggtacggggacctgcggggaaagcccttcgccatcgaagccgagaacagcatcctggacatcagcggcttcagcaagcagtacaactgtgccttcatctggcagaaggacggcgtgaagaagctgaacctgtacctgatcatcaactacttcaagggcggcaagctgcggttcaagaagatcaaacctgaagccttcgaagccaacagattctacaccgtgatcaacaaaaagagcggcgagatcgtgcccatggaggtgaacttcaacttcgacgaccccaacctgatcatcctgcctctggcctttggcaagagacagggcagagaattcatctggaacgacctgctgtccctggaaaccggcagcctgaagctggccaacggaagagtgatcgagaagacactgtacaacagaagaacccggcaggatgagcctgccctgttcgtggccctgaccttcgagcggcgggaggtcctggactcctccaatatcaaaccaatgaacctgatcggcgtggcaagaggcgaaaacatccccgccgtgatcgccctgaccgaccccgagggctgcccactgagccggtttaaggatagcctgggaaacccaacccacatcctgagaatcggcgagagctataaggagaagcagcggaccatccaggccaagaaggaggtggagcagcggagagccggcggctacagccggaagtacgccagcaaagccaagaatctggcagacgatatggtgagaaacaccgctagagatctgctgtactacgccgtgacccaggatgccatgctgatcttcgccaacctgagccggggcttcggccggcagggcaagcggaccttcatggccgagagacagtacacacggatggaggactggctgaccgccaagctggcctacgagggcctgagcaagacctacctgtccaagacactggcccagtacacctccaagacatgcagcaactgtgggtttaccatcaccagcgccgactacgacagggtgctggagaagctgaagaagacagcaacaggctggatgaccacaattaacggcaaggagctgaaggtggagggccagattacctactacaacagatacaagagacagaacgtagtcaaggacctgtccgtcgagctggatagactgagcgaagaatctgtgaacaacgacatctcctcctggacaaagggcagaagcggagaagctctgagcctcctgaagaaaagattctcccatagacccgtgcaggagaagttcgtgtgcctgaactgcggcttcgagacacacgcagccgagcaagccgccctgaacatcgccagatcctggctgttcctgcggagccaggagtacaagaaataccagacaaacaagacaaccggcaacaccgataagagagccttcgtcgagacctggcagtccttttaccggaagaagcttaaggaggtgtggaaacctgccgtgcggtctggcggatctggcggaggctccacaagccccgcccagggccccggcgaggccaggcccagcaggaagaggggcaggaggcccagggccctgaagttcgtggacgtggccgtgtacttcagccccgaggagtggggctgcctgaggcccgcccagagggccctgtacagggacgtgatgagggagacctacggccacctgggcgccctgggctgcgccggccccaagcccgccctgatcagctggctggagaggaacaccgacgactgggagaccagccccaagaaaaagagaaaagtctaagctgccttctgcggggcttgccttctggccatgcccttcttctctcccttgcacctgtacctcttggtctttgaataaagcctgagtaggaaggctagcaaaaaaaaaaaaaaaaaaaaaaaaaaaaaaaaaaaaaaaaaaaaaaaaaaaaaaaaaaaaaaaaaaaaaaaaaaaaaaaa

SEQ ID NO: 3087 - RNA, 5419 nt, synthetic construct
  source 1..5419: mol_type = other RNA
aggaaataagagagaaaagaagagtaagaagaaatataagagccaccatggcccctaagaagaagcgtaaagtgagccgggtgaacggcagcggcagcggcggcggcatgaaccacgaccaggagttcgacccccctaaggtgtaccctcccgtccccgccgagaagagaaagcccatccgggtcctgagcctgttcgatggcatcgccaccggtctgctggtgctgaaggacctgggcatccaggtggataggtacattgcctccgaggtgtgcgaggactccatcaccgtgggaatggtgcgtcatcagggcaagatcatgtacgtgggcgacgtgcggagcgtgacacagaagcatatccaggagtggggccctttcgacctggtgatcggcggcagcccttgcaatgacctgagcatcgtgaacccagcccggaagggcctgtacgagggaaccggcagactgttcttcgagttttacagactgctgcacgacgcccggcctaaggaaggcgacgaccggcccttcttttggctgttcgagaatgtggtggccatgggagtcagcgacaagcgggatattagccggttcctggagagcaaccccgtgatgatcgatgccaaggaagtgagcgccgcccaccgggccagatacttctggggcaatctgcctggcatgaacagacccctggccagcaccgtgaacgacaagctggagctgcaggagtgcctggagcacggccggatcgccaagttcagcaaggtgagaaccatcaccacccgaagcaacagcatcaaacaaggcaaggaccagcactttcctgtgttcatgaacgagaaggaggacatcctgtggtgtaccgagatggagagagtgttcgggttcccagtccactacacagatgtcagcaacatgtctagactggccagacagagactgctgggaagaagctggtccgtccctgtgatcagacacctgttcgcccctctgaaggagtacttcgcctgcgtgagcagcggcaacagcaacgccaacagccggggccccagcttctctagcggcctggtgccactgtccctgagagggagccacatgggccccatggagatctacaaaaccgtgagcgcctggaagcggcagcctgtgcgcgtgctgagcctgtttcggaatatcgataaagtcctgaaaagcctgggattcctggagagcggctctggctccggcggtggcaccctgaagtacgtggaggatgtgacaaacgtggtcagacgggatgtggagaagtggggccccttcgatctggtgtacggcagcacccaacccctgggcagctcttgtgaccggtgccctggctggtacatgtttcagttccaccggatcctgcagtacgccctgccgagacaggagtcccagcggccattcttttggattttcatggacaacttgctgctgaccgaggatgaccaggaaactaccactcggttcctgcagaccgaagccgtgaccctgcaggacgtgagaggccgggactaccagaacgccatgcgggtgtggtccaacatccctggactgaaaagcaagcacgcacctctgacccctaaagaagaggagtacctgcaggcccaggtgcggagcagaagcaagctggacgcccctaaggtggatctgctggtgaagaattgcctcctgcccctgagagagtacttcaagtatttcagccagaatagtctgcccctgggcggcccaagcagcggcgcccctcctcccagcggcggcagcccagccggctccccaacctctaccgaggagggcacctctgagtccgccacccccgagagcggccctggcacctccaccgagcccagcgagggcagcgcacccggcagccctgccggcagccccacctccacagaggagggaaccagcaccgagcccagcgaaggcagcgccccaggcaccagcaccgagcctagtgagggcggctctggcggcggcagcgcccaggagattaaacggatcaacaagatcagaagaagacttgtgaaagacagcaacaccaagaaggccggcaagacaggccccatgaaaaccctgctggttagagtgatgacacccgatctgagagagcggctggaaaacctgagaaagaagcctgaaaatatcccccagcccatcagcaatacatctagagccaacctgaataagctgctgaccgattacaccgaaatgaagaaggcgatcctgcatgtgtactgggaagagttccagaaggaccctgtgggcctgatgagccgggtggcccagcctgccagcaagaagatcgatcagaacaagctgaaacctgagatggacgagaagggcaacctgaccaccgccggctttgcctgctctcagtgtggccagcccctgttcgtgtacaagctggagcaggtgtctgagaagggcaaggcttacaccaactacttcggacggtgcaatgtggccgagcacgaaaagctgatcctgctggcccagctgaagcccgagaaggatagcgacgaagccgtgacatatagcctgggaaagtttgggcagagggccctggatttctacagcattcatgtgaccaaggagtccacccaccccgtgaagcccctggcccagatcgccggaaacagatacgcctccggacctgtgggaaaggccctgagcgacgcatgtatgggcacaatcgcctccttcctgtctaagtaccaggacatcatcatcgaacaccagaaggtggtgaagggcaaccagaagagactggagagcctgcgggagctggccggcaaggaaaacctggaataccctagcgtgaccctgccacctcagcctcacaccaaggagggcgttgatgcctacaacgaagtgatcgcccgggtgcgaatgtgggtgaacctgaacctgtggcagaagctgaagctaagcagagatgatgccaagcctctgctgagactgaagggattcccttcctttcctctggtcgagagacaggccaacgaagtggactggtgggacatggtgtgtaacgtgaagaagctgatcaacgagaaaaaggaggatggcaaggtgttttggcagaatctggctggctacaagagacaggaagccctgagaccatacctgagcagcgaggaagatcggaagaagggaaagaaattcgctcggtaccagctgggcgacctgctgctgcacctggaaaagaagcacggcgaggactggggaaaggtgtacgacgaggcctgggagcggattgacaagaaagtggaaggcctgagcaagcacatcaagctggaagaggaacggagaagcgaggacgcccagagcaaggccgccctgaccgactggctgcgggctaaggccagcttcgtgatcgagggcctgaaggaggccgacaaggacgagttctgcagatgcgagctgaagctgcagaagtggtacggggacctgcggggaaagcccttcgccatcgaagccgagaacagcatcctggacatcagcggcttcagcaagcagtacaactgtgccttcatctggcagaaggacggcgtgaagaagctgaacctgtacctgatcatcaactacttcaagggcggcaagctgcggttcaagaagatcaaacctgaagccttcgaagccaacagattctacaccgtgatcaacaaaaagagcggcgagatcgtgcccatggaggtgaacttcaacttcgacgaccccaacctgatcatcctgcctctggcctttggcaagagacagggcagagaattcatctggaacgacctgctgtccctggaaaccggcagcctgaagctggccaacggaagagtgatcgagaagacactgtacaacagaagaacccggcaggatgagcctgccctgttcgtggccctgaccttcgagcggcgggaggtcctggactcctccaatatcaaaccaatgaacctgatcggcgtggcaagaggcgaaaacatccccgccgtgatcgccctgaccgaccccgagggctgcccactgagccggtttaaggatagcctgggaaacccaacccacatcctgagaatcggcgagagctataaggagaagcagcggaccatccaggccaagaaggaggtggagcagcggagagccggcggctacagccggaagtacgccagcaaagccaagaatctggcagacgatatggtgagaaacaccgctagagatctgctgtactacgccgtgacccaggatgccatgctgatcttcgccaacctgagccggggcttcggccggcagggcaagcggaccttcatggccgagagacagtacacacggatggaggactggctgaccgccaagctggcctacgagggcctgagcaagacctacctgtccaagacactggcccagtacacctccaagacatgcagcaactgtgggtttaccatcaccagcgccgactacgacagggtgctggagaagctgaagaagacagcaacaggctggatgaccacaattaacggcaaggagctgaaggtggagggccagattacctactacaacagatacaagagacagaacgtagtcaaggacctgtccgtcgagctggatagactgagcgaagaatctgtgaacaacgacatctcctcctggacaaagggcagaagcggagaagctctgagcctcctgaagaaaagattctcccatagacccgtgcaggagaagttcgtgtgcctgaactgcggcttcgagacacacgcagccgagcaagccgccctgaacatcgccagatcctggctgttcctgcggagccaggagtacaagaaataccagacaaacaagacaaccggcaacaccgataagagagccttcgtcgagacctggcagtccttttaccggaagaagcttaaggaggtgtggaaacctgccgtgcggtctggcggatctggcggaggctccacaagcatgaacatggagggcctggtgatgttccaggacctgagcatcgacttcagccaggaggagtgggagtgcctgaaccccacccagaaggacctgtacagggacgtgatgatggagaactacagcagcctgctgagcctgggcctgagcatccccaagcccgacgtgatcagcctgctggagcagggcaaggagccctggatggtgagcagggacgtgctgggcggctggtgccccgacaggctgaccagccccaagaaaaagagaaaagtctaagctgccttctgcggggcttgccttctggccatgcccttcttctctcccttgcacctgtacctcttggtctttgaataaagcctgagtaggaaggctagcaaaaaaaaaaaaaaaaaaaaaaaaaaaaaaaaaaaaaaaaaaaaaaaaaaaaaaaaaaaaaaaaaaaaaaaaaaaaaaaa

SEQ ID NO: 3088 - RNA, 5419 nt, synthetic construct
  source 1..5419: mol_type = other RNA
aggaaataagagagaaaagaagagtaagaagaaatataagagccaccatggcccctaagaagaagcgtaaagtgagccgggtgaacggcagcggcagcggcggcggcatgaaccacgaccaggagttcgacccccctaaggtgtaccctcccgtccccgccgagaagagaaagcccatccgggtcctgagcctgttcgatggcatcgccaccggtctgctggtgctgaaggacctgggcatccaggtggataggtacattgcctccgaggtgtgcgaggactccatcaccgtgggaatggtgcgtcatcagggcaagatcatgtacgtgggcgacgtgcggagcgtgacacagaagcatatccaggagtggggccctttcgacctggtgatcggcggcagcccttgcaatgacctgagcatcgtgaacccagcccggaagggcctgtacgagggaaccggcagactgttcttcgagttttacagactgctgcacgacgcccggcctaaggaaggcgacgaccggcccttcttttggctgttcgagaatgtggtggccatgggagtcagcgacaagcgggatattagccggttcctggagagcaaccccgtgatgatcgatgccaaggaagtgagcgccgcccaccgggccagatacttctggggcaatctgcctggcatgaacagacccctggccagcaccgtgaacgacaagctggagctgcaggagtgcctggagcacggccggatcgccaagttcagcaaggtgagaaccatcaccacccgaagcaacagcatcaaacaaggcaaggaccagcactttcctgtgttcatgaacgagaaggaggacatcctgtggtgtaccgagatggagagagtgttcgggttcccagtccactacacagatgtcagcaacatgtctagactggccagacagagactgctgggaagaagctggtccgtccctgtgatcagacacctgttcgcccctctgaaggagtacttcgcctgcgtgagcagcggcaacagcaacgccaacagccggggccccagcttctctagcggcctggtgccactgtccctgagagggagccacatgggccccatggagatctacaaaaccgtgagcgcctggaagcggcagcctgtgcgcgtgctgagcctgtttcggaatatcgataaagtcctgaaaagcctgggattcctggagagcggctctggctccggcggtggcaccctgaagtacgtggaggatgtgacaaacgtggtcagacgggatgtggagaagtggggccccttcgatctggtgtacggcagcacccaacccctgggcagctcttgtgaccggtgccctggctggtacatgtttcagttccaccggatcctgcagtacgccctgccgagacaggagtcccagcggccattcttttggattttcatggacaacttgctgctgaccgaggatgaccaggaaactaccactcggttcctgcagaccgaagccgtgaccctgcaggacgtgagaggccgggactaccagaacgccatgcgggtgtggtccaacatccctggactgaaaagcaagcacgcacctctgacccctaaagaagaggagtacctgcaggcccaggtgcggagcagaagcaagctggacgcccctaaggtggatctgctggtgaagaattgcctcctgcccctgagagagtacttcaagtatttcagccagaatagtctgcccctgggcggcccaagcagcggcgcccctcctcccagcggcggcagcccagccggctccccaacctctaccgaggagggcacctctgagtccgccacccccgagagcggccctggcacctccaccgagcccagcgagggcagcgcacccggcagccctgccggcagccccacctccacagaggagggaaccagcaccgagcccagcgaaggcagcgccccaggcaccagcaccgagcctagtgagggcggctctggcggcggcagcgcccaggagattaaacggatcaacaagatcagaagaagacttgtgaaagacagcaacaccaagaaggccggcaagacaggccccatgaaaaccctgctggttagagtgatgacacccgatctgagagagcggctggaaaacctgagaaagaagcctgaaaatatcccccagcccatcagcaatacatctagagccaacctgaataagctgctgaccgattacaccgaaatgaagaaggcgatcctgcatgtgtactgggaagagttccagaaggaccctgtgggcctgatgagccgggtggcccagcctgccagcaagaagatcgatcagaacaagctgaaacctgagatggacgagaagggcaacctgaccaccgccggctttgcctgctctcagtgtggccagcccctgttcgtgtacaagctggagcaggtgtctgagaagggcaaggcttacaccaactacttcggacggtgcaatgtggccgagcacgaaaagctgatcctgctggcccagctgaagcccgagaaggatagcgacgaagccgtgacatatagcctgggaaagtttgggcagagggccctggatttctacagcattcatgtgaccaaggagtccacccaccccgtgaagcccctggcccagatcgccggaaacagatacgcctccggacctgtgggaaaggccctgagcgacgcatgtatgggcacaatcgcctccttcctgtctaagtaccaggacatcatcatcgaacaccagaaggtggtgaagggcaaccagaagagactggagagcctgcgggagctggccggcaaggaaaacctggaataccctagcgtgaccctgccacctcagcctcacaccaaggagggcgttgatgcctacaacgaagtgatcgcccgggtgcgaatgtgggtgaacctgaacctgtggcagaagctgaagctaagcagagatgatgccaagcctctgctgagactgaagggattcccttcctttcctctggtcgagagacaggccaacgaagtggactggtgggacatggtgtgtaacgtgaagaagctgatcaacgagaaaaaggaggatggcaaggtgttttggcagaatctggctggctacaagagacaggaagccctgagaccatacctgagcagcgaggaagatcggaagaagggaaagaaattcgctcggtaccagctgggcgacctgctgctgcacctggaaaagaagcacggcgaggactggggaaaggtgtacgacgaggcctgggagcggattgacaagaaagtggaaggcctgagcaagcacatcaagctggaagaggaacggagaagcgaggacgcccagagcaaggccgccctgaccgactggctgcgggctaaggccagcttcgtgatcgagggcctgaaggaggccgacaaggacgagttctgcagatgcgagctgaagctgcagaagtggtacggggacctgcggggaaagcccttcgccatcgaagccgagaacagcatcctggacatcagcggcttcagcaagcagtacaactgtgccttcatctggcagaaggacggcgtgaagaagctgaacctgtacctgatcatcaactacttcaagggcggcaagctgcggttcaagaagatcaaacctgaagccttcgaagccaacagattctacaccgtgatcaacaaaaagagcggcgagatcgtgcccatggaggtgaacttcaacttcgacgaccccaacctgatcatcctgcctctggcctttggcaagagacagggcagagaattcatctggaacgacctgctgtccctggaaaccggcagcctgaagctggccaacggaagagtgatcgagaagacactgtacaacagaagaacccggcaggatgagcctgccctgttcgtggccctgaccttcgagcggcgggaggtcctggactcctccaatatcaaaccaatgaacctgatcggcgtggcaagaggcgaaaacatccccgccgtgatcgccctgaccgaccccgagggctgcccactgagccggtttaaggatagcctgggaaacccaacccacatcctgagaatcggcgagagctataaggagaagcagcggaccatccaggccaagaaggaggtggagcagcggagagccggcggctacagccggaagtacgccagcaaagccaagaatctggcagacgatatggtgagaaacaccgctagagatctgctgtactacgccgtgacccaggatgccatgctgatcttcgccaacctgagccggggcttcggccggcagggcaagcggaccttcatggccgagagacagtacacacggatggaggactggctgaccgccaagctggcctacgagggcctgagcaagacctacctgtccaagacactggcccagtacacctccaagacatgcagcaactgtgggtttaccatcaccagcgccgactacgacagggtgctggagaagctgaagaagacagcaacaggctggatgaccacaattaacggcaaggagctgaaggtggagggccagattacctactacaacagatacaagagacagaacgtagtcaaggacctgtccgtcgagctggatagactgagcgaagaatctgtgaacaacgacatctcctcctggacaaagggcagaagcggagaagctctgagcctcctgaagaaaagattctcccatagacccgtgcaggagaagttcgtgtgcctgaactgcggcttcgagacacacgcagccgagcaagccgccctgaacatcgccagatcctggctgttcctgcggagccaggagtacaagaaataccagacaaacaagacaaccggcaacaccgataagagagccttcgtcgagacctggcagtccttttaccggaagaagcttaaggaggtgtggaaacctgccgtgcggtctggcggatctggcggaggctccacaagcatgaccttcgaggacgtgagcgtggagttcacccagggcgagtggggccagctgaaccccgcccagaaggacctgtacagggaggtgatgctggagaacttcaggaacctggccttcctgggcctgcccgtgagcaagccctacgtgatctgccagctggaggagggcggcgagcccttcatcgtggagagggaggtgagcaccggcgcctacagcgactgggagaggaggagcaagagcaagaccagccccaagaaaaagagaaaagtctaagctgccttctgcggggcttgccttctggccatgcccttcttctctcccttgcacctgtacctcttggtctttgaataaagcctgagtaggaaggctagcaaaaaaaaaaaaaaaaaaaaaaaaaaaaaaaaaaaaaaaaaaaaaaaaaaaaaaaaaaaaaaaaaaaaaaaaaaaaaaaa

SEQ ID NO: 3089 - RNA, 5419 nt, synthetic construct
  source 1..5419: mol_type = other RNA
aggaaataagagagaaaagaagagtaagaagaaatataagagccaccatggcccctaagaagaagcgtaaagtgagccgggtgaacggcagcggcagcggcggcggcatgaaccacgaccaggagttcgacccccctaaggtgtaccctcccgtccccgccgagaagagaaagcccatccgggtcctgagcctgttcgatggcatcgccaccggtctgctggtgctgaaggacctgggcatccaggtggataggtacattgcctccgaggtgtgcgaggactccatcaccgtgggaatggtgcgtcatcagggcaagatcatgtacgtgggcgacgtgcggagcgtgacacagaagcatatccaggagtggggccctttcgacctggtgatcggcggcagcccttgcaatgacctgagcatcgtgaacccagcccggaagggcctgtacgagggaaccggcagactgttcttcgagttttacagactgctgcacgacgcccggcctaaggaaggcgacgaccggcccttcttttggctgttcgagaatgtggtggccatgggagtcagcgacaagcgggatattagccggttcctggagagcaaccccgtgatgatcgatgccaaggaagtgagcgccgcccaccgggccagatacttctggggcaatctgcctggcatgaacagacccctggccagcaccgtgaacgacaagctggagctgcaggagtgcctggagcacggccggatcgccaagttcagcaaggtgagaaccatcaccacccgaagcaacagcatcaaacaaggcaaggaccagcactttcctgtgttcatgaacgagaaggaggacatcctgtggtgtaccgagatggagagagtgttcgggttcccagtccactacacagatgtcagcaacatgtctagactggccagacagagactgctgggaagaagctggtccgtccctgtgatcagacacctgttcgcccctctgaaggagtacttcgcctgcgtgagcagcggcaacagcaacgccaacagccggggccccagcttctctagcggcctggtgccactgtccctgagagggagccacatgggccccatggagatctacaaaaccgtgagcgcctggaagcggcagcctgtgcgcgtgctgagcctgtttcggaatatcgataaagtcctgaaaagcctgggattcctggagagcggctctggctccggcggtggcaccctgaagtacgtggaggatgtgacaaacgtggtcagacgggatgtggagaagtggggccccttcgatctggtgtacggcagcacccaacccctgggcagctcttgtgaccggtgccctggctggtacatgtttcagttccaccggatcctgcagtacgccctgccgagacaggagtcccagcggccattcttttggattttcatggacaacttgctgctgaccgaggatgaccaggaaactaccactcggttcctgcagaccgaagccgtgaccctgcaggacgtgagaggccgggactaccagaacgccatgcgggtgtggtccaacatccctggactgaaaagcaagcacgcacctctgacccctaaagaagaggagtacctgcaggcccaggtgcggagcagaagcaagctggacgcccctaaggtggatctgctggtgaagaattgcctcctgcccctgagagagtacttcaagtatttcagccagaatagtctgcccctgggcggcccaagcagcggcgcccctcctcccagcggcggcagcccagccggctccccaacctctaccgaggagggcacctctgagtccgccacccccgagagcggccctggcacctccaccgagcccagcgagggcagcgcacccggcagccctgccggcagccccacctccacagaggagggaaccagcaccgagcccagcgaaggcagcgccccaggcaccagcaccgagcctagtgagggcggctctggcggcggcagcgcccaggagattaaacggatcaacaagatcagaagaagacttgtgaaagacagcaacaccaagaaggccggcaagacaggccccatgaaaaccctgctggttagagtgatgacacccgatctgagagagcggctggaaaacctgagaaagaagcctgaaaatatcccccagcccatcagcaatacatctagagccaacctgaataagctgctgaccgattacaccgaaatgaagaaggcgatcctgcatgtgtactgggaagagttccagaaggaccctgtgggcctgatgagccgggtggcccagcctgccagcaagaagatcgatcagaacaagctgaaacctgagatggacgagaagggcaacctgaccaccgccggctttgcctgctctcagtgtggccagcccctgttcgtgtacaagctggagcaggtgtctgagaagggcaaggcttacaccaactacttcggacggtgcaatgtggccgagcacgaaaagctgatcctgctggcccagctgaagcccgagaaggatagcgacgaagccgtgacatatagcctgggaaagtttgggcagagggccctggatttctacagcattcatgtgaccaaggagtccacccaccccgtgaagcccctggcccagatcgccggaaacagatacgcctccggacctgtgggaaaggccctgagcgacgcatgtatgggcacaatcgcctccttcctgtctaagtaccaggacatcatcatcgaacaccagaaggtggtgaagggcaaccagaagagactggagagcctgcgggagctggccggcaaggaaaacctggaataccctagcgtgaccctgccacctcagcctcacaccaaggagggcgttgatgcctacaacgaagtgatcgcccgggtgcgaatgtgggtgaacctgaacctgtggcagaagctgaagctaagcagagatgatgccaagcctctgctgagactgaagggattcccttcctttcctctggtcgagagacaggccaacgaagtggactggtgggacatggtgtgtaacgtgaagaagctgatcaacgagaaaaaggaggatggcaaggtgttttggcagaatctggctggctacaagagacaggaagccctgagaccatacctgagcagcgaggaagatcggaagaagggaaagaaattcgctcggtaccagctgggcgacctgctgctgcacctggaaaagaagcacggcgaggactggggaaaggtgtacgacgaggcctgggagcggattgacaagaaagtggaaggcctgagcaagcacatcaagctggaagaggaacggagaagcgaggacgcccagagcaaggccgccctgaccgactggctgcgggctaaggccagcttcgtgatcgagggcctgaaggaggccgacaaggacgagttctgcagatgcgagctgaagctgcagaagtggtacggggacctgcggggaaagcccttcgccatcgaagccgagaacagcatcctggacatcagcggcttcagcaagcagtacaactgtgccttcatctggcagaaggacggcgtgaagaagctgaacctgtacctgatcatcaactacttcaagggcggcaagctgcggttcaagaagatcaaacctgaagccttcgaagccaacagattctacaccgtgatcaacaaaaagagcggcgagatcgtgcccatggaggtgaacttcaacttcgacgaccccaacctgatcatcctgcctctggcctttggcaagagacagggcagagaattcatctggaacgacctgctgtccctggaaaccggcagcctgaagctggccaacggaagagtgatcgagaagacactgtacaacagaagaacccggcaggatgagcctgccctgttcgtggccctgaccttcgagcggcgggaggtcctggactcctccaatatcaaaccaatgaacctgatcggcgtggcaagaggcgaaaacatccccgccgtgatcgccctgaccgaccccgagggctgcccactgagccggtttaaggatagcctgggaaacccaacccacatcctgagaatcggcgagagctataaggagaagcagcggaccatccaggccaagaaggaggtggagcagcggagagccggcggctacagccggaagtacgccagcaaagccaagaatctggcagacgatatggtgagaaacaccgctagagatctgctgtactacgccgtgacccaggatgccatgctgatcttcgccaacctgagccggggcttcggccggcagggcaagcggaccttcatggccgagagacagtacacacggatggaggactggctgaccgccaagctggcctacgagggcctgagcaagacctacctgtccaagacactggcccagtacacctccaagacatgcagcaactgtgggtttaccatcaccagcgccgactacgacagggtgctggagaagctgaagaagacagcaacaggctggatgaccacaattaacggcaaggagctgaaggtggagggccagattacctactacaacagatacaagagacagaacgtagtcaaggacctgtccgtcgagctggatagactgagcgaagaatctgtgaacaacgacatctcctcctggacaaagggcagaagcggagaagctctgagcctcctgaagaaaagattctcccatagacccgtgcaggagaagttcgtgtgcctgaactgcggcttcgagacacacgcagccgagcaagccgccctgaacatcgccagatcctggctgttcctgcggagccaggagtacaagaaataccagacaaacaagacaaccggcaacaccgataagagagccttcgtcgagacctggcagtccttttaccggaagaagcttaaggaggtgtggaaacctgccgtgcggtctggcggatctggcggaggctccacaagcctgcagaagagcgtgaccttcgaggacgtggccgtgtacttcacccagaccgagtgggacggcctgagccccgcccagagggccctgtacagggacgtgatgctggagaactacggcaacgtggccagcctgggcttcagcctgttcaagcccgccgtgatcagccagctggagggcgccggcgagctgggcggccccagccccctggtggacggcaccgagaccggcccccagggcctgtggaccagccccaagaaaaagagaaaagtctaagctgccttctgcggggcttgccttctggccatgcccttcttctctcccttgcacctgtacctcttggtctttgaataaagcctgagtaggaaggctagcaaaaaaaaaaaaaaaaaaaaaaaaaaaaaaaaaaaaaaaaaaaaaaaaaaaaaaaaaaaaaaaaaaaaaaaaaaaaaaaa

SEQ ID NO: 3090 - RNA, 5419 nt, synthetic construct
  source 1..5419: mol_type = other RNA
aggaaataagagagaaaagaagagtaagaagaaatataagagccaccatggcccctaagaagaagcgtaaagtgagccgggtgaacggcagcggcagcggcggcggcatgaaccacgaccaggagttcgacccccctaaggtgtaccctcccgtccccgccgagaagagaaagcccatccgggtcctgagcctgttcgatggcatcgccaccggtctgctggtgctgaaggacctgggcatccaggtggataggtacattgcctccgaggtgtgcgaggactccatcaccgtgggaatggtgcgtcatcagggcaagatcatgtacgtgggcgacgtgcggagcgtgacacagaagcatatccaggagtggggccctttcgacctggtgatcggcggcagcccttgcaatgacctgagcatcgtgaacccagcccggaagggcctgtacgagggaaccggcagactgttcttcgagttttacagactgctgcacgacgcccggcctaaggaaggcgacgaccggcccttcttttggctgttcgagaatgtggtggccatgggagtcagcgacaagcgggatattagccggttcctggagagcaaccccgtgatgatcgatgccaaggaagtgagcgccgcccaccgggccagatacttctggggcaatctgcctggcatgaacagacccctggccagcaccgtgaacgacaagctggagctgcaggagtgcctggagcacggccggatcgccaagttcagcaaggtgagaaccatcaccacccgaagcaacagcatcaaacaaggcaaggaccagcactttcctgtgttcatgaacgagaaggaggacatcctgtggtgtaccgagatggagagagtgttcgggttcccagtccactacacagatgtcagcaacatgtctagactggccagacagagactgctgggaagaagctggtccgtccctgtgatcagacacctgttcgcccctctgaaggagtacttcgcctgcgtgagcagcggcaacagcaacgccaacagccggggccccagcttctctagcggcctggtgccactgtccctgagagggagccacatgggccccatggagatctacaaaaccgtgagcgcctggaagcggcagcctgtgcgcgtgctgagcctgtttcggaatatcgataaagtcctgaaaagcctgggattcctggagagcggctctggctccggcggtggcaccctgaagtacgtggaggatgtgacaaacgtggtcagacgggatgtggagaagtggggccccttcgatctggtgtacggcagcacccaacccctgggcagctcttgtgaccggtgccctggctggtacatgtttcagttccaccggatcctgcagtacgccctgccgagacaggagtcccagcggccattcttttggattttcatggacaacttgctgctgaccgaggatgaccaggaaactaccactcggttcctgcagaccgaagccgtgaccctgcaggacgtgagaggccgggactaccagaacgccatgcgggtgtggtccaacatccctggactgaaaagcaagcacgcacctctgacccctaaagaagaggagtacctgcaggcccaggtgcggagcagaagcaagctggacgcccctaaggtggatctgctggtgaagaattgcctcctgcccctgagagagtacttcaagtatttcagccagaatagtctgcccctgggcggcccaagcagcggcgcccctcctcccagcggcggcagcccagccggctccccaacctctaccgaggagggcacctctgagtccgccacccccgagagcggccctggcacctccaccgagcccagcgagggcagcgcacccggcagccctgccggcagccccacctccacagaggagggaaccagcaccgagcccagcgaaggcagcgccccaggcaccagcaccgagcctagtgagggcggctctggcggcggcagcgcccaggagattaaacggatcaacaagatcagaagaagacttgtgaaagacagcaacaccaagaaggccggcaagacaggccccatgaaaaccctgctggttagagtgatgacacccgatctgagagagcggctggaaaacctgagaaagaagcctgaaaatatcccccagcccatcagcaatacatctagagccaacctgaataagctgctgaccgattacaccgaaatgaagaaggcgatcctgcatgtgtactgggaagagttccagaaggaccctgtgggcctgatgagccgggtggcccagcctgccagcaagaagatcgatcagaacaagctgaaacctgagatggacgagaagggcaacctgaccaccgccggctttgcctgctctcagtgtggccagcccctgttcgtgtacaagctggagcaggtgtctgagaagggcaaggcttacaccaactacttcggacggtgcaatgtggccgagcacgaaaagctgatcctgctggcccagctgaagcccgagaaggatagcgacgaagccgtgacatatagcctgggaaagtttgggcagagggccctggatttctacagcattcatgtgaccaaggagtccacccaccccgtgaagcccctggcccagatcgccggaaacagatacgcctccggacctgtgggaaaggccctgagcgacgcatgtatgggcacaatcgcctccttcctgtctaagtaccaggacatcatcatcgaacaccagaaggtggtgaagggcaaccagaagagactggagagcctgcgggagctggccggcaaggaaaacctggaataccctagcgtgaccctgccacctcagcctcacaccaaggagggcgttgatgcctacaacgaagtgatcgcccgggtgcgaatgtgggtgaacctgaacctgtggcagaagctgaagctaagcagagatgatgccaagcctctgctgagactgaagggattcccttcctttcctctggtcgagagacaggccaacgaagtggactggtgggacatggtgtgtaacgtgaagaagctgatcaacgagaaaaaggaggatggcaaggtgttttggcagaatctggctggctacaagagacaggaagccctgagaccatacctgagcagcgaggaagatcggaagaagggaaagaaattcgctcggtaccagctgggcgacctgctgctgcacctggaaaagaagcacggcgaggactggggaaaggtgtacgacgaggcctgggagcggattgacaagaaagtggaaggcctgagcaagcacatcaagctggaagaggaacggagaagcgaggacgcccagagcaaggccgccctgaccgactggctgcgggctaaggccagcttcgtgatcgagggcctgaaggaggccgacaaggacgagttctgcagatgcgagctgaagctgcagaagtggtacggggacctgcggggaaagcccttcgccatcgaagccgagaacagcatcctggacatcagcggcttcagcaagcagtacaactgtgccttcatctggcagaaggacggcgtgaagaagctgaacctgtacctgatcatcaactacttcaagggcggcaagctgcggttcaagaagatcaaacctgaagccttcgaagccaacagattctacaccgtgatcaacaaaaagagcggcgagatcgtgcccatggaggtgaacttcaacttcgacgaccccaacctgatcatcctgcctctggcctttggcaagagacagggcagagaattcatctggaacgacctgctgtccctggaaaccggcagcctgaagctggccaacggaagagtgatcgagaagacactgtacaacagaagaacccggcaggatgagcctgccctgttcgtggccctgaccttcgagcggcgggaggtcctggactcctccaatatcaaaccaatgaacctgatcggcgtggcaagaggcgaaaacatccccgccgtgatcgccctgaccgaccccgagggctgcccactgagccggtttaaggatagcctgggaaacccaacccacatcctgagaatcggcgagagctataaggagaagcagcggaccatccaggccaagaaggaggtggagcagcggagagccggcggctacagccggaagtacgccagcaaagccaagaatctggcagacgatatggtgagaaacaccgctagagatctgctgtactacgccgtgacccaggatgccatgctgatcttcgccaacctgagccggggcttcggccggcagggcaagcggaccttcatggccgagagacagtacacacggatggaggactggctgaccgccaagctggcctacgagggcctgagcaagacctacctgtccaagacactggcccagtacacctccaagacatgcagcaactgtgggtttaccatcaccagcgccgactacgacagggtgctggagaagctgaagaagacagcaacaggctggatgaccacaattaacggcaaggagctgaaggtggagggccagattacctactacaacagatacaagagacagaacgtagtcaaggacctgtccgtcgagctggatagactgagcgaagaatctgtgaacaacgacatctcctcctggacaaagggcagaagcggagaagctctgagcctcctgaagaaaagattctcccatagacccgtgcaggagaagttcgtgtgcctgaactgcggcttcgagacacacgcagccgagcaagccgccctgaacatcgccagatcctggctgttcctgcggagccaggagtacaagaaataccagacaaacaagacaaccggcaacaccgataagagagccttcgtcgagacctggcagtccttttaccggaagaagcttaaggaggtgtggaaacctgccgtgcggtctggcggatctggcggaggctccacaagcatccagggcagcctgaccttcaaggacgtggccgtggacttcacccaggacgagtggtgcctgctggacaacagccagaaggagctgtacctggaggtgatgctggagaacgtgcagaacctgctgagcgtgggcctgcccgtgcccagggagtacctgaccagctgcttccagcagggcgaggccccctggctgctggagcaggaggtgcccaggagcagctgccccgaggccgagaccaacaccagccccaagaaaaagagaaaagtctaagctgccttctgcggggcttgccttctggccatgcccttcttctctcccttgcacctgtacctcttggtctttgaataaagcctgagtaggaaggctagcaaaaaaaaaaaaaaaaaaaaaaaaaaaaaaaaaaaaaaaaaaaaaaaaaaaaaaaaaaaaaaaaaaaaaaaaaaaaaaaa

SEQ ID NO: 3091 - RNA, 5419 nt, synthetic construct
  source 1..5419: mol_type = other RNA
aggaaataagagagaaaagaagagtaagaagaaatataagagccaccatggcccctaagaagaagcgtaaagtgagccgggtgaacggcagcggcagcggcggcggcatgaaccacgaccaggagttcgacccccctaaggtgtaccctcccgtccccgccgagaagagaaagcccatccgggtcctgagcctgttcgatggcatcgccaccggtctgctggtgctgaaggacctgggcatccaggtggataggtacattgcctccgaggtgtgcgaggactccatcaccgtgggaatggtgcgtcatcagggcaagatcatgtacgtgggcgacgtgcggagcgtgacacagaagcatatccaggagtggggccctttcgacctggtgatcggcggcagcccttgcaatgacctgagcatcgtgaacccagcccggaagggcctgtacgagggaaccggcagactgttcttcgagttttacagactgctgcacgacgcccggcctaaggaaggcgacgaccggcccttcttttggctgttcgagaatgtggtggccatgggagtcagcgacaagcgggatattagccggttcctggagagcaaccccgtgatgatcgatgccaaggaagtgagcgccgcccaccgggccagatacttctggggcaatctgcctggcatgaacagacccctggccagcaccgtgaacgacaagctggagctgcaggagtgcctggagcacggccggatcgccaagttcagcaaggtgagaaccatcaccacccgaagcaacagcatcaaacaaggcaaggaccagcactttcctgtgttcatgaacgagaaggaggacatcctgtggtgtaccgagatggagagagtgttcgggttcccagtccactacacagatgtcagcaacatgtctagactggccagacagagactgctgggaagaagctggtccgtccctgtgatcagacacctgttcgcccctctgaaggagtacttcgcctgcgtgagcagcggcaacagcaacgccaacagccggggccccagcttctctagcggcctggtgccactgtccctgagagggagccacatgggccccatggagatctacaaaaccgtgagcgcctggaagcggcagcctgtgcgcgtgctgagcctgtttcggaatatcgataaagtcctgaaaagcctgggattcctggagagcggctctggctccggcggtggcaccctgaagtacgtggaggatgtgacaaacgtggtcagacgggatgtggagaagtggggccccttcgatctggtgtacggcagcacccaacccctgggcagctcttgtgaccggtgccctggctggtacatgtttcagttccaccggatcctgcagtacgccctgccgagacaggagtcccagcggccattcttttggattttcatggacaacttgctgctgaccgaggatgaccaggaaactaccactcggttcctgcagaccgaagccgtgaccctgcaggacgtgagaggccgggactaccagaacgccatgcgggtgtggtccaacatccctggactgaaaagcaagcacgcacctctgacccctaaagaagaggagtacctgcaggcccaggtgcggagcagaagcaagctggacgcccctaaggtggatctgctggtgaagaattgcctcctgcccctgagagagtacttcaagtatttcagccagaatagtctgcccctgggcggcccaagcagcggcgcccctcctcccagcggcggcagcccagccggctccccaacctctaccgaggagggcacctctgagtccgccacccccgagagcggccctggcacctccaccgagcccagcgagggcagcgcacccggcagccctgccggcagccccacctccacagaggagggaaccagcaccgagcccagcgaaggcagcgccccaggcaccagcaccgagcctagtgagggcggctctggcggcggcagcgcccaggagattaaacggatcaacaagatcagaagaagacttgtgaaagacagcaacaccaagaaggccggcaagacaggccccatgaaaaccctgctggttagagtgatgacacccgatctgagagagcggctggaaaacctgagaaagaagcctgaaaatatcccccagcccatcagcaatacatctagagccaacctgaataagctgctgaccgattacaccgaaatgaagaaggcgatcctgcatgtgtactgggaagagttccagaaggaccctgtgggcctgatgagccgggtggcccagcctgccagcaagaagatcgatcagaacaagctgaaacctgagatggacgagaagggcaacctgaccaccgccggctttgcctgctctcagtgtggccagcccctgttcgtgtacaagctggagcaggtgtctgagaagggcaaggcttacaccaactacttcggacggtgcaatgtggccgagcacgaaaagctgatcctgctggcccagctgaagcccgagaaggatagcgacgaagccgtgacatatagcctgggaaagtttgggcagagggccctggatttctacagcattcatgtgaccaaggagtccacccaccccgtgaagcccctggcccagatcgccggaaacagatacgcctccggacctgtgggaaaggccctgagcgacgcatgtatgggcacaatcgcctccttcctgtctaagtaccaggacatcatcatcgaacaccagaaggtggtgaagggcaaccagaagagactggagagcctgcgggagctggccggcaaggaaaacctggaataccctagcgtgaccctgccacctcagcctcacaccaaggagggcgttgatgcctacaacgaagtgatcgcccgggtgcgaatgtgggtgaacctgaacctgtggcagaagctgaagctaagcagagatgatgccaagcctctgctgagactgaagggattcccttcctttcctctggtcgagagacaggccaacgaagtggactggtgggacatggtgtgtaacgtgaagaagctgatcaacgagaaaaaggaggatggcaaggtgttttggcagaatctggctggctacaagagacaggaagccctgagaccatacctgagcagcgaggaagatcggaagaagggaaagaaattcgctcggtaccagctgggcgacctgctgctgcacctggaaaagaagcacggcgaggactggggaaaggtgtacgacgaggcctgggagcggattgacaagaaagtggaaggcctgagcaagcacatcaagctggaagaggaacggagaagcgaggacgcccagagcaaggccgccctgaccgactggctgcgggctaaggccagcttcgtgatcgagggcctgaaggaggccgacaaggacgagttctgcagatgcgagctgaagctgcagaagtggtacggggacctgcggggaaagcccttcgccatcgaagccgagaacagcatcctggacatcagcggcttcagcaagcagtacaactgtgccttcatctggcagaaggacggcgtgaagaagctgaacctgtacctgatcatcaactacttcaagggcggcaagctgcggttcaagaagatcaaacctgaagccttcgaagccaacagattctacaccgtgatcaacaaaaagagcggcgagatcgtgcccatggaggtgaacttcaacttcgacgaccccaacctgatcatcctgcctctggcctttggcaagagacagggcagagaattcatctggaacgacctgctgtccctggaaaccggcagcctgaagctggccaacggaagagtgatcgagaagacactgtacaacagaagaacccggcaggatgagcctgccctgttcgtggccctgaccttcgagcggcgggaggtcctggactcctccaatatcaaaccaatgaacctgatcggcgtggcaagaggcgaaaacatccccgccgtgatcgccctgaccgaccccgagggctgcccactgagccggtttaaggatagcctgggaaacccaacccacatcctgagaatcggcgagagctataaggagaagcagcggaccatccaggccaagaaggaggtggagcagcggagagccggcggctacagccggaagtacgccagcaaagccaagaatctggcagacgatatggtgagaaacaccgctagagatctgctgtactacgccgtgacccaggatgccatgctgatcttcgccaacctgagccggggcttcggccggcagggcaagcggaccttcatggccgagagacagtacacacggatggaggactggctgaccgccaagctggcctacgagggcctgagcaagacctacctgtccaagacactggcccagtacacctccaagacatgcagcaactgtgggtttaccatcaccagcgccgactacgacagggtgctggagaagctgaagaagacagcaacaggctggatgaccacaattaacggcaaggagctgaaggtggagggccagattacctactacaacagatacaagagacagaacgtagtcaaggacctgtccgtcgagctggatagactgagcgaagaatctgtgaacaacgacatctcctcctggacaaagggcagaagcggagaagctctgagcctcctgaagaaaagattctcccatagacccgtgcaggagaagttcgtgtgcctgaactgcggcttcgagacacacgcagccgagcaagccgccctgaacatcgccagatcctggctgttcctgcggagccaggagtacaagaaataccagacaaacaagacaaccggcaacaccgataagagagccttcgtcgagacctggcagtccttttaccggaagaagcttaaggaggtgtggaaacctgccgtgcggtctggcggatctggcggaggctccacaagcttccagggcagcgtgaccttcagggacgtggccatcgacttcagccaggaggagtggaagtggctgcagcccgcccagagggacctgtacaggtgcgtgatgctggagaactacggccacctggtgagcctgggcctgagcatcagcaagcccgacgtggtgagcctgctggagcagggcaaggagccctggctgggcaagaggaacgtgaacagggacctgcaggccctgtgcatccccatcaccagccccaagaaaaagagaaaagtctaagctgccttctgcggggcttgccttctggccatgcccttcttctctcccttgcacctgtacctcttggtctttgaataaagcctgagtaggaaggctagcaaaaaaaaaaaaaaaaaaaaaaaaaaaaaaaaaaaaaaaaaaaaaaaaaaaaaaaaaaaaaaaaaaaaaaaaaaaaaaaa

SEQ ID NO: 3092 - RNA, 5419 nt, synthetic construct
  source 1..5419: mol_type = other RNA
aggaaataagagagaaaagaagagtaagaagaaatataagagccaccatggcccctaagaagaagcgtaaagtgagccgggtgaacggcagcggcagcggcggcggcatgaaccacgaccaggagttcgacccccctaaggtgtaccctcccgtccccgccgagaagagaaagcccatccgggtcctgagcctgttcgatggcatcgccaccggtctgctggtgctgaaggacctgggcatccaggtggataggtacattgcctccgaggtgtgcgaggactccatcaccgtgggaatggtgcgtcatcagggcaagatcatgtacgtgggcgacgtgcggagcgtgacacagaagcatatccaggagtggggccctttcgacctggtgatcggcggcagcccttgcaatgacctgagcatcgtgaacccagcccggaagggcctgtacgagggaaccggcagactgttcttcgagttttacagactgctgcacgacgcccggcctaaggaaggcgacgaccggcccttcttttggctgttcgagaatgtggtggccatgggagtcagcgacaagcgggatattagccggttcctggagagcaaccccgtgatgatcgatgccaaggaagtgagcgccgcccaccgggccagatacttctggggcaatctgcctggcatgaacagacccctggccagcaccgtgaacgacaagctggagctgcaggagtgcctggagcacggccggatcgccaagttcagcaaggtgagaaccatcaccacccgaagcaacagcatcaaacaaggcaaggaccagcactttcctgtgttcatgaacgagaaggaggacatcctgtggtgtaccgagatggagagagtgttcgggttcccagtccactacacagatgtcagcaacatgtctagactggccagacagagactgctgggaagaagctggtccgtccctgtgatcagacacctgttcgcccctctgaaggagtacttcgcctgcgtgagcagcggcaacagcaacgccaacagccggggccccagcttctctagcggcctggtgccactgtccctgagagggagccacatgggccccatggagatctacaaaaccgtgagcgcctggaagcggcagcctgtgcgcgtgctgagcctgtttcggaatatcgataaagtcctgaaaagcctgggattcctggagagcggctctggctccggcggtggcaccctgaagtacgtggaggatgtgacaaacgtggtcagacgggatgtggagaagtggggccccttcgatctggtgtacggcagcacccaacccctgggcagctcttgtgaccggtgccctggctggtacatgtttcagttccaccggatcctgcagtacgccctgccgagacaggagtcccagcggccattcttttggattttcatggacaacttgctgctgaccgaggatgaccaggaaactaccactcggttcctgcagaccgaagccgtgaccctgcaggacgtgagaggccgggactaccagaacgccatgcgggtgtggtccaacatccctggactgaaaagcaagcacgcacctctgacccctaaagaagaggagtacctgcaggcccaggtgcggagcagaagcaagctggacgcccctaaggtggatctgctggtgaagaattgcctcctgcccctgagagagtacttcaagtatttcagccagaatagtctgcccctgggcggcccaagcagcggcgcccctcctcccagcggcggcagcccagccggctccccaacctctaccgaggagggcacctctgagtccgccacccccgagagcggccctggcacctccaccgagcccagcgagggcagcgcacccggcagccctgccggcagccccacctccacagaggagggaaccagcaccgagcccagcgaaggcagcgccccaggcaccagcaccgagcctagtgagggcggctctggcggcggcagcgcccaggagattaaacggatcaacaagatcagaagaagacttgtgaaagacagcaacaccaagaaggccggcaagacaggccccatgaaaaccctgctggttagagtgatgacacccgatctgagagagcggctggaaaacctgagaaagaagcctgaaaatatcccccagcccatcagcaatacatctagagccaacctgaataagctgctgaccgattacaccgaaatgaagaaggcgatcctgcatgtgtactgggaagagttccagaaggaccctgtgggcctgatgagccgggtggcccagcctgccagcaagaagatcgatcagaacaagctgaaacctgagatggacgagaagggcaacctgaccaccgccggctttgcctgctctcagtgtggccagcccctgttcgtgtacaagctggagcaggtgtctgagaagggcaaggcttacaccaactacttcggacggtgcaatgtggccgagcacgaaaagctgatcctgctggcccagctgaagcccgagaaggatagcgacgaagccgtgacatatagcctgggaaagtttgggcagagggccctggatttctacagcattcatgtgaccaaggagtccacccaccccgtgaagcccctggcccagatcgccggaaacagatacgcctccggacctgtgggaaaggccctgagcgacgcatgtatgggcacaatcgcctccttcctgtctaagtaccaggacatcatcatcgaacaccagaaggtggtgaagggcaaccagaagagactggagagcctgcgggagctggccggcaaggaaaacctggaataccctagcgtgaccctgccacctcagcctcacaccaaggagggcgttgatgcctacaacgaagtgatcgcccgggtgcgaatgtgggtgaacctgaacctgtggcagaagctgaagctaagcagagatgatgccaagcctctgctgagactgaagggattcccttcctttcctctggtcgagagacaggccaacgaagtggactggtgggacatggtgtgtaacgtgaagaagctgatcaacgagaaaaaggaggatggcaaggtgttttggcagaatctggctggctacaagagacaggaagccctgagaccatacctgagcagcgaggaagatcggaagaagggaaagaaattcgctcggtaccagctgggcgacctgctgctgcacctggaaaagaagcacggcgaggactggggaaaggtgtacgacgaggcctgggagcggattgacaagaaagtggaaggcctgagcaagcacatcaagctggaagaggaacggagaagcgaggacgcccagagcaaggccgccctgaccgactggctgcgggctaaggccagcttcgtgatcgagggcctgaaggaggccgacaaggacgagttctgcagatgcgagctgaagctgcagaagtggtacggggacctgcggggaaagcccttcgccatcgaagccgagaacagcatcctggacatcagcggcttcagcaagcagtacaactgtgccttcatctggcagaaggacggcgtgaagaagctgaacctgtacctgatcatcaactacttcaagggcggcaagctgcggttcaagaagatcaaacctgaagccttcgaagccaacagattctacaccgtgatcaacaaaaagagcggcgagatcgtgcccatggaggtgaacttcaacttcgacgaccccaacctgatcatcctgcctctggcctttggcaagagacagggcagagaattcatctggaacgacctgctgtccctggaaaccggcagcctgaagctggccaacggaagagtgatcgagaagacactgtacaacagaagaacccggcaggatgagcctgccctgttcgtggccctgaccttcgagcggcgggaggtcctggactcctccaatatcaaaccaatgaacctgatcggcgtggcaagaggcgaaaacatccccgccgtgatcgccctgaccgaccccgagggctgcccactgagccggtttaaggatagcctgggaaacccaacccacatcctgagaatcggcgagagctataaggagaagcagcggaccatccaggccaagaaggaggtggagcagcggagagccggcggctacagccggaagtacgccagcaaagccaagaatctggcagacgatatggtgagaaacaccgctagagatctgctgtactacgccgtgacccaggatgccatgctgatcttcgccaacctgagccggggcttcggccggcagggcaagcggaccttcatggccgagagacagtacacacggatggaggactggctgaccgccaagctggcctacgagggcctgagcaagacctacctgtccaagacactggcccagtacacctccaagacatgcagcaactgtgggtttaccatcaccagcgccgactacgacagggtgctggagaagctgaagaagacagcaacaggctggatgaccacaattaacggcaaggagctgaaggtggagggccagattacctactacaacagatacaagagacagaacgtagtcaaggacctgtccgtcgagctggatagactgagcgaagaatctgtgaacaacgacatctcctcctggacaaagggcagaagcggagaagctctgagcctcctgaagaaaagattctcccatagacccgtgcaggagaagttcgtgtgcctgaactgcggcttcgagacacacgcagccgagcaagccgccctgaacatcgccagatcctggctgttcctgcggagccaggagtacaagaaataccagacaaacaagacaaccggcaacaccgataagagagccttcgtcgagacctggcagtccttttaccggaagaagcttaaggaggtgtggaaacctgccgtgcggtctggcggatctggcggaggctccacaagcaacctggaggccgtgaccttccaggacgtggccgtggagttcacctgcgaggagtggaggcacctggcccccccccagaaggagctgtacagggacgtgatgctggagaactacaagaacctggtgaggctgggcctggccgtgagcaagcccgacgtgatcagccagctggagaggagggaggccccctggatgcccggcggcatccagaggagcaggtgccccgactgggaggccagctgcaccagccccaagaaaaagagaaaagtctaagctgccttctgcggggcttgccttctggccatgcccttcttctctcccttgcacctgtacctcttggtctttgaataaagcctgagtaggaaggctagcaaaaaaaaaaaaaaaaaaaaaaaaaaaaaaaaaaaaaaaaaaaaaaaaaaaaaaaaaaaaaaaaaaaaaaaaaaaaaaaa

SEQ ID NO: 3093 - RNA, 5419 nt, synthetic construct
  source 1..5419: mol_type = other RNA
aggaaataagagagaaaagaagagtaagaagaaatataagagccaccatggcccctaagaagaagcgtaaagtgagccgggtgaacggcagcggcagcggcggcggcatgaaccacgaccaggagttcgacccccctaaggtgtaccctcccgtccccgccgagaagagaaagcccatccgggtcctgagcctgttcgatggcatcgccaccggtctgctggtgctgaaggacctgggcatccaggtggataggtacattgcctccgaggtgtgcgaggactccatcaccgtgggaatggtgcgtcatcagggcaagatcatgtacgtgggcgacgtgcggagcgtgacacagaagcatatccaggagtggggccctttcgacctggtgatcggcggcagcccttgcaatgacctgagcatcgtgaacccagcccggaagggcctgtacgagggaaccggcagactgttcttcgagttttacagactgctgcacgacgcccggcctaaggaaggcgacgaccggcccttcttttggctgttcgagaatgtggtggccatgggagtcagcgacaagcgggatattagccggttcctggagagcaaccccgtgatgatcgatgccaaggaagtgagcgccgcccaccgggccagatacttctggggcaatctgcctggcatgaacagacccctggccagcaccgtgaacgacaagctggagctgcaggagtgcctggagcacggccggatcgccaagttcagcaaggtgagaaccatcaccacccgaagcaacagcatcaaacaaggcaaggaccagcactttcctgtgttcatgaacgagaaggaggacatcctgtggtgtaccgagatggagagagtgttcgggttcccagtccactacacagatgtcagcaacatgtctagactggccagacagagactgctgggaagaagctggtccgtccctgtgatcagacacctgttcgcccctctgaaggagtacttcgcctgcgtgagcagcggcaacagcaacgccaacagccggggccccagcttctctagcggcctggtgccactgtccctgagagggagccacatgggccccatggagatctacaaaaccgtgagcgcctggaagcggcagcctgtgcgcgtgctgagcctgtttcggaatatcgataaagtcctgaaaagcctgggattcctggagagcggctctggctccggcggtggcaccctgaagtacgtggaggatgtgacaaacgtggtcagacgggatgtggagaagtggggccccttcgatctggtgtacggcagcacccaacccctgggcagctcttgtgaccggtgccctggctggtacatgtttcagttccaccggatcctgcagtacgccctgccgagacaggagtcccagcggccattcttttggattttcatggacaacttgctgctgaccgaggatgaccaggaaactaccactcggttcctgcagaccgaagccgtgaccctgcaggacgtgagaggccgggactaccagaacgccatgcgggtgtggtccaacatccctggactgaaaagcaagcacgcacctctgacccctaaagaagaggagtacctgcaggcccaggtgcggagcagaagcaagctggacgcccctaaggtggatctgctggtgaagaattgcctcctgcccctgagagagtacttcaagtatttcagccagaatagtctgcccctgggcggcccaagcagcggcgcccctcctcccagcggcggcagcccagccggctccccaacctctaccgaggagggcacctctgagtccgccacccccgagagcggccctggcacctccaccgagcccagcgagggcagcgcacccggcagccctgccggcagccccacctccacagaggagggaaccagcaccgagcccagcgaaggcagcgccccaggcaccagcaccgagcctagtgagggcggctctggcggcggcagcgcccaggagattaaacggatcaacaagatcagaagaagacttgtgaaagacagcaacaccaagaaggccggcaagacaggccccatgaaaaccctgctggttagagtgatgacacccgatctgagagagcggctggaaaacctgagaaagaagcctgaaaatatcccccagcccatcagcaatacatctagagccaacctgaataagctgctgaccgattacaccgaaatgaagaaggcgatcctgcatgtgtactgggaagagttccagaaggaccctgtgggcctgatgagccgggtggcccagcctgccagcaagaagatcgatcagaacaagctgaaacctgagatggacgagaagggcaacctgaccaccgccggctttgcctgctctcagtgtggccagcccctgttcgtgtacaagctggagcaggtgtctgagaagggcaaggcttacaccaactacttcggacggtgcaatgtggccgagcacgaaaagctgatcctgctggcccagctgaagcccgagaaggatagcgacgaagccgtgacatatagcctgggaaagtttgggcagagggccctggatttctacagcattcatgtgaccaaggagtccacccaccccgtgaagcccctggcccagatcgccggaaacagatacgcctccggacctgtgggaaaggccctgagcgacgcatgtatgggcacaatcgcctccttcctgtctaagtaccaggacatcatcatcgaacaccagaaggtggtgaagggcaaccagaagagactggagagcctgcgggagctggccggcaaggaaaacctggaataccctagcgtgaccctgccacctcagcctcacaccaaggagggcgttgatgcctacaacgaagtgatcgcccgggtgcgaatgtgggtgaacctgaacctgtggcagaagctgaagctaagcagagatgatgccaagcctctgctgagactgaagggattcccttcctttcctctggtcgagagacaggccaacgaagtggactggtgggacatggtgtgtaacgtgaagaagctgatcaacgagaaaaaggaggatggcaaggtgttttggcagaatctggctggctacaagagacaggaagccctgagaccatacctgagcagcgaggaagatcggaagaagggaaagaaattcgctcggtaccagctgggcgacctgctgctgcacctggaaaagaagcacggcgaggactggggaaaggtgtacgacgaggcctgggagcggattgacaagaaagtggaaggcctgagcaagcacatcaagctggaagaggaacggagaagcgaggacgcccagagcaaggccgccctgaccgactggctgcgggctaaggccagcttcgtgatcgagggcctgaaggaggccgacaaggacgagttctgcagatgcgagctgaagctgcagaagtggtacggggacctgcggggaaagcccttcgccatcgaagccgagaacagcatcctggacatcagcggcttcagcaagcagtacaactgtgccttcatctggcagaaggacggcgtgaagaagctgaacctgtacctgatcatcaactacttcaagggcggcaagctgcggttcaagaagatcaaacctgaagccttcgaagccaacagattctacaccgtgatcaacaaaaagagcggcgagatcgtgcccatggaggtgaacttcaacttcgacgaccccaacctgatcatcctgcctctggcctttggcaagagacagggcagagaattcatctggaacgacctgctgtccctggaaaccggcagcctgaagctggccaacggaagagtgatcgagaagacactgtacaacagaagaacccggcaggatgagcctgccctgttcgtggccctgaccttcgagcggcgggaggtcctggactcctccaatatcaaaccaatgaacctgatcggcgtggcaagaggcgaaaacatccccgccgtgatcgccctgaccgaccccgagggctgcccactgagccggtttaaggatagcctgggaaacccaacccacatcctgagaatcggcgagagctataaggagaagcagcggaccatccaggccaagaaggaggtggagcagcggagagccggcggctacagccggaagtacgccagcaaagccaagaatctggcagacgatatggtgagaaacaccgctagagatctgctgtactacgccgtgacccaggatgccatgctgatcttcgccaacctgagccggggcttcggccggcagggcaagcggaccttcatggccgagagacagtacacacggatggaggactggctgaccgccaagctggcctacgagggcctgagcaagacctacctgtccaagacactggcccagtacacctccaagacatgcagcaactgtgggtttaccatcaccagcgccgactacgacagggtgctggagaagctgaagaagacagcaacaggctggatgaccacaattaacggcaaggagctgaaggtggagggccagattacctactacaacagatacaagagacagaacgtagtcaaggacctgtccgtcgagctggatagactgagcgaagaatctgtgaacaacgacatctcctcctggacaaagggcagaagcggagaagctctgagcctcctgaagaaaagattctcccatagacccgtgcaggagaagttcgtgtgcctgaactgcggcttcgagacacacgcagccgagcaagccgccctgaacatcgccagatcctggctgttcctgcggagccaggagtacaagaaataccagacaaacaagacaaccggcaacaccgataagagagccttcgtcgagacctggcagtccttttaccggaagaagcttaaggaggtgtggaaacctgccgtgcggtctggcggatctggcggaggctccacaagcaggcccagggccgtgaagttcgccgacgtggccgtgtacttcagccccgaggagtggggctgcctgaggcccgcccagagggccctgtacagggacgtgatgagggagacctacggccacctgagcgccctgggctgcagcggccccaagcccgccctgatcagctggctggagaggaacaccgacgactgggagcccgccgccctggacccccaggagtgccccaggggcctgaccgtgcagaccagccccaagaaaaagagaaaagtctaagctgccttctgcggggcttgccttctggccatgcccttcttctctcccttgcacctgtacctcttggtctttgaataaagcctgagtaggaaggctagcaaaaaaaaaaaaaaaaaaaaaaaaaaaaaaaaaaaaaaaaaaaaaaaaaaaaaaaaaaaaaaaaaaaaaaaaaaaaaaaa

SEQ ID NO: 3094 - RNA, 5419 nt, synthetic construct
  source 1..5419: mol_type = other RNA
aggaaataagagagaaaagaagagtaagaagaaatataagagccaccatggcccctaagaagaagcgtaaagtgagccgggtgaacggcagcggcagcggcggcggcatgaaccacgaccaggagttcgacccccctaaggtgtaccctcccgtccccgccgagaagagaaagcccatccgggtcctgagcctgttcgatggcatcgccaccggtctgctggtgctgaaggacctgggcatccaggtggataggtacattgcctccgaggtgtgcgaggactccatcaccgtgggaatggtgcgtcatcagggcaagatcatgtacgtgggcgacgtgcggagcgtgacacagaagcatatccaggagtggggccctttcgacctggtgatcggcggcagcccttgcaatgacctgagcatcgtgaacccagcccggaagggcctgtacgagggaaccggcagactgttcttcgagttttacagactgctgcacgacgcccggcctaaggaaggcgacgaccggcccttcttttggctgttcgagaatgtggtggccatgggagtcagcgacaagcgggatattagccggttcctggagagcaaccccgtgatgatcgatgccaaggaagtgagcgccgcccaccgggccagatacttctggggcaatctgcctggcatgaacagacccctggccagcaccgtgaacgacaagctggagctgcaggagtgcctggagcacggccggatcgccaagttcagcaaggtgagaaccatcaccacccgaagcaacagcatcaaacaaggcaaggaccagcactttcctgtgttcatgaacgagaaggaggacatcctgtggtgtaccgagatggagagagtgttcgggttcccagtccactacacagatgtcagcaacatgtctagactggccagacagagactgctgggaagaagctggtccgtccctgtgatcagacacctgttcgcccctctgaaggagtacttcgcctgcgtgagcagcggcaacagcaacgccaacagccggggccccagcttctctagcggcctggtgccactgtccctgagagggagccacatgggccccatggagatctacaaaaccgtgagcgcctggaagcggcagcctgtgcgcgtgctgagcctgtttcggaatatcgataaagtcctgaaaagcctgggattcctggagagcggctctggctccggcggtggcaccctgaagtacgtggaggatgtgacaaacgtggtcagacgggatgtggagaagtggggccccttcgatctggtgtacggcagcacccaacccctgggcagctcttgtgaccggtgccctggctggtacatgtttcagttccaccggatcctgcagtacgccctgccgagacaggagtcccagcggccattcttttggattttcatggacaacttgctgctgaccgaggatgaccaggaaactaccactcggttcctgcagaccgaagccgtgaccctgcaggacgtgagaggccgggactaccagaacgccatgcgggtgtggtccaacatccctggactgaaaagcaagcacgcacctctgacccctaaagaagaggagtacctgcaggcccaggtgcggagcagaagcaagctggacgcccctaaggtggatctgctggtgaagaattgcctcctgcccctgagagagtacttcaagtatttcagccagaatagtctgcccctgggcggcccaagcagcggcgcccctcctcccagcggcggcagcccagccggctccccaacctctaccgaggagggcacctctgagtccgccacccccgagagcggccctggcacctccaccgagcccagcgagggcagcgcacccggcagccctgccggcagccccacctccacagaggagggaaccagcaccgagcccagcgaaggcagcgccccaggcaccagcaccgagcctagtgagggcggctctggcggcggcagcgcccaggagattaaacggatcaacaagatcagaagaagacttgtgaaagacagcaacaccaagaaggccggcaagacaggccccatgaaaaccctgctggttagagtgatgacacccgatctgagagagcggctggaaaacctgagaaagaagcctgaaaatatcccccagcccatcagcaatacatctagagccaacctgaataagctgctgaccgattacaccgaaatgaagaaggcgatcctgcatgtgtactgggaagagttccagaaggaccctgtgggcctgatgagccgggtggcccagcctgccagcaagaagatcgatcagaacaagctgaaacctgagatggacgagaagggcaacctgaccaccgccggctttgcctgctctcagtgtggccagcccctgttcgtgtacaagctggagcaggtgtctgagaagggcaaggcttacaccaactacttcggacggtgcaatgtggccgagcacgaaaagctgatcctgctggcccagctgaagcccgagaaggatagcgacgaagccgtgacatatagcctgggaaagtttgggcagagggccctggatttctacagcattcatgtgaccaaggagtccacccaccccgtgaagcccctggcccagatcgccggaaacagatacgcctccggacctgtgggaaaggccctgagcgacgcatgtatgggcacaatcgcctccttcctgtctaagtaccaggacatcatcatcgaacaccagaaggtggtgaagggcaaccagaagagactggagagcctgcgggagctggccggcaaggaaaacctggaataccctagcgtgaccctgccacctcagcctcacaccaaggagggcgttgatgcctacaacgaagtgatcgcccgggtgcgaatgtgggtgaacctgaacctgtggcagaagctgaagctaagcagagatgatgccaagcctctgctgagactgaagggattcccttcctttcctctggtcgagagacaggccaacgaagtggactggtgggacatggtgtgtaacgtgaagaagctgatcaacgagaaaaaggaggatggcaaggtgttttggcagaatctggctggctacaagagacaggaagccctgagaccatacctgagcagcgaggaagatcggaagaagggaaagaaattcgctcggtaccagctgggcgacctgctgctgcacctggaaaagaagcacggcgaggactggggaaaggtgtacgacgaggcctgggagcggattgacaagaaagtggaaggcctgagcaagcacatcaagctggaagaggaacggagaagcgaggacgcccagagcaaggccgccctgaccgactggctgcgggctaaggccagcttcgtgatcgagggcctgaaggaggccgacaaggacgagttctgcagatgcgagctgaagctgcagaagtggtacggggacctgcggggaaagcccttcgccatcgaagccgagaacagcatcctggacatcagcggcttcagcaagcagtacaactgtgccttcatctggcagaaggacggcgtgaagaagctgaacctgtacctgatcatcaactacttcaagggcggcaagctgcggttcaagaagatcaaacctgaagccttcgaagccaacagattctacaccgtgatcaacaaaaagagcggcgagatcgtgcccatggaggtgaacttcaacttcgacgaccccaacctgatcatcctgcctctggcctttggcaagagacagggcagagaattcatctggaacgacctgctgtccctggaaaccggcagcctgaagctggccaacggaagagtgatcgagaagacactgtacaacagaagaacccggcaggatgagcctgccctgttcgtggccctgaccttcgagcggcgggaggtcctggactcctccaatatcaaaccaatgaacctgatcggcgtggcaagaggcgaaaacatccccgccgtgatcgccctgaccgaccccgagggctgcccactgagccggtttaaggatagcctgggaaacccaacccacatcctgagaatcggcgagagctataaggagaagcagcggaccatccaggccaagaaggaggtggagcagcggagagccggcggctacagccggaagtacgccagcaaagccaagaatctggcagacgatatggtgagaaacaccgctagagatctgctgtactacgccgtgacccaggatgccatgctgatcttcgccaacctgagccggggcttcggccggcagggcaagcggaccttcatggccgagagacagtacacacggatggaggactggctgaccgccaagctggcctacgagggcctgagcaagacctacctgtccaagacactggcccagtacacctccaagacatgcagcaactgtgggtttaccatcaccagcgccgactacgacagggtgctggagaagctgaagaagacagcaacaggctggatgaccacaattaacggcaaggagctgaaggtggagggccagattacctactacaacagatacaagagacagaacgtagtcaaggacctgtccgtcgagctggatagactgagcgaagaatctgtgaacaacgacatctcctcctggacaaagggcagaagcggagaagctctgagcctcctgaagaaaagattctcccatagacccgtgcaggagaagttcgtgtgcctgaactgcggcttcgagacacacgcagccgagcaagccgccctgaacatcgccagatcctggctgttcctgcggagccaggagtacaagaaataccagacaaacaagacaaccggcaacaccgataagagagccttcgtcgagacctggcagtccttttaccggaagaagcttaaggaggtgtggaaacctgccgtgcggtctggcggatctggcggaggctccacaagcaggcagggcagcgtgaccttccaggacgtggccgtggacttcagctgggaggagtggggcaggctgggccccacccagaaggagctgtacagggaggtgatgctggagaactacaggaacctggtgtgcctgggcctggaggtgagcaagcccgacgtggtgtaccagctggagaggggcgaggccccctggatgcccgagggcgccgtgaggaggagctgcagccagaactggggcgccaggaccagccccaagaaaaagagaaaagtctaagctgccttctgcggggcttgccttctggccatgcccttcttctctcccttgcacctgtacctcttggtctttgaataaagcctgagtaggaaggctagcaaaaaaaaaaaaaaaaaaaaaaaaaaaaaaaaaaaaaaaaaaaaaaaaaaaaaaaaaaaaaaaaaaaaaaaaaaaaaaaa

SEQ ID NO: 3095 - RNA, 5419 nt, synthetic construct
  source 1..5419: mol_type = other RNA
aggaaataagagagaaaagaagagtaagaagaaatataagagccaccatggcccctaagaagaagcgtaaagtgagccgggtgaacggcagcggcagcggcggcggcatgaaccacgaccaggagttcgacccccctaaggtgtaccctcccgtccccgccgagaagagaaagcccatccgggtcctgagcctgttcgatggcatcgccaccggtctgctggtgctgaaggacctgggcatccaggtggataggtacattgcctccgaggtgtgcgaggactccatcaccgtgggaatggtgcgtcatcagggcaagatcatgtacgtgggcgacgtgcggagcgtgacacagaagcatatccaggagtggggccctttcgacctggtgatcggcggcagcccttgcaatgacctgagcatcgtgaacccagcccggaagggcctgtacgagggaaccggcagactgttcttcgagttttacagactgctgcacgacgcccggcctaaggaaggcgacgaccggcccttcttttggctgttcgagaatgtggtggccatgggagtcagcgacaagcgggatattagccggttcctggagagcaaccccgtgatgatcgatgccaaggaagtgagcgccgcccaccgggccagatacttctggggcaatctgcctggcatgaacagacccctggccagcaccgtgaacgacaagctggagctgcaggagtgcctggagcacggccggatcgccaagttcagcaaggtgagaaccatcaccacccgaagcaacagcatcaaacaaggcaaggaccagcactttcctgtgttcatgaacgagaaggaggacatcctgtggtgtaccgagatggagagagtgttcgggttcccagtccactacacagatgtcagcaacatgtctagactggccagacagagactgctgggaagaagctggtccgtccctgtgatcagacacctgttcgcccctctgaaggagtacttcgcctgcgtgagcagcggcaacagcaacgccaacagccggggccccagcttctctagcggcctggtgccactgtccctgagagggagccacatgggccccatggagatctacaaaaccgtgagcgcctggaagcggcagcctgtgcgcgtgctgagcctgtttcggaatatcgataaagtcctgaaaagcctgggattcctggagagcggctctggctccggcggtggcaccctgaagtacgtggaggatgtgacaaacgtggtcagacgggatgtggagaagtggggccccttcgatctggtgtacggcagcacccaacccctgggcagctcttgtgaccggtgccctggctggtacatgtttcagttccaccggatcctgcagtacgccctgccgagacaggagtcccagcggccattcttttggattttcatggacaacttgctgctgaccgaggatgaccaggaaactaccactcggttcctgcagaccgaagccgtgaccctgcaggacgtgagaggccgggactaccagaacgccatgcgggtgtggtccaacatccctggactgaaaagcaagcacgcacctctgacccctaaagaagaggagtacctgcaggcccaggtgcggagcagaagcaagctggacgcccctaaggtggatctgctggtgaagaattgcctcctgcccctgagagagtacttcaagtatttcagccagaatagtctgcccctgggcggcccaagcagcggcgcccctcctcccagcggcggcagcccagccggctccccaacctctaccgaggagggcacctctgagtccgccacccccgagagcggccctggcacctccaccgagcccagcgagggcagcgcacccggcagccctgccggcagccccacctccacagaggagggaaccagcaccgagcccagcgaaggcagcgccccaggcaccagcaccgagcctagtgagggcggctctggcggcggcagcgcccaggagattaaacggatcaacaagatcagaagaagacttgtgaaagacagcaacaccaagaaggccggcaagacaggccccatgaaaaccctgctggttagagtgatgacacccgatctgagagagcggctggaaaacctgagaaagaagcctgaaaatatcccccagcccatcagcaatacatctagagccaacctgaataagctgctgaccgattacaccgaaatgaagaaggcgatcctgcatgtgtactgggaagagttccagaaggaccctgtgggcctgatgagccgggtggcccagcctgccagcaagaagatcgatcagaacaagctgaaacctgagatggacgagaagggcaacctgaccaccgccggctttgcctgctctcagtgtggccagcccctgttcgtgtacaagctggagcaggtgtctgagaagggcaaggcttacaccaactacttcggacggtgcaatgtggccgagcacgaaaagctgatcctgctggcccagctgaagcccgagaaggatagcgacgaagccgtgacatatagcctgggaaagtttgggcagagggccctggatttctacagcattcatgtgaccaaggagtccacccaccccgtgaagcccctggcccagatcgccggaaacagatacgcctccggacctgtgggaaaggccctgagcgacgcatgtatgggcacaatcgcctccttcctgtctaagtaccaggacatcatcatcgaacaccagaaggtggtgaagggcaaccagaagagactggagagcctgcgggagctggccggcaaggaaaacctggaataccctagcgtgaccctgccacctcagcctcacaccaaggagggcgttgatgcctacaacgaagtgatcgcccgggtgcgaatgtgggtgaacctgaacctgtggcagaagctgaagctaagcagagatgatgccaagcctctgctgagactgaagggattcccttcctttcctctggtcgagagacaggccaacgaagtggactggtgggacatggtgtgtaacgtgaagaagctgatcaacgagaaaaaggaggatggcaaggtgttttggcagaatctggctggctacaagagacaggaagccctgagaccatacctgagcagcgaggaagatcggaagaagggaaagaaattcgctcggtaccagctgggcgacctgctgctgcacctggaaaagaagcacggcgaggactggggaaaggtgtacgacgaggcctgggagcggattgacaagaaagtggaaggcctgagcaagcacatcaagctggaagaggaacggagaagcgaggacgcccagagcaaggccgccctgaccgactggctgcgggctaaggccagcttcgtgatcgagggcctgaaggaggccgacaaggacgagttctgcagatgcgagctgaagctgcagaagtggtacggggacctgcggggaaagcccttcgccatcgaagccgagaacagcatcctggacatcagcggcttcagcaagcagtacaactgtgccttcatctggcagaaggacggcgtgaagaagctgaacctgtacctgatcatcaactacttcaagggcggcaagctgcggttcaagaagatcaaacctgaagccttcgaagccaacagattctacaccgtgatcaacaaaaagagcggcgagatcgtgcccatggaggtgaacttcaacttcgacgaccccaacctgatcatcctgcctctggcctttggcaagagacagggcagagaattcatctggaacgacctgctgtccctggaaaccggcagcctgaagctggccaacggaagagtgatcgagaagacactgtacaacagaagaacccggcaggatgagcctgccctgttcgtggccctgaccttcgagcggcgggaggtcctggactcctccaatatcaaaccaatgaacctgatcggcgtggcaagaggcgaaaacatccccgccgtgatcgccctgaccgaccccgagggctgcccactgagccggtttaaggatagcctgggaaacccaacccacatcctgagaatcggcgagagctataaggagaagcagcggaccatccaggccaagaaggaggtggagcagcggagagccggcggctacagccggaagtacgccagcaaagccaagaatctggcagacgatatggtgagaaacaccgctagagatctgctgtactacgccgtgacccaggatgccatgctgatcttcgccaacctgagccggggcttcggccggcagggcaagcggaccttcatggccgagagacagtacacacggatggaggactggctgaccgccaagctggcctacgagggcctgagcaagacctacctgtccaagacactggcccagtacacctccaagacatgcagcaactgtgggtttaccatcaccagcgccgactacgacagggtgctggagaagctgaagaagacagcaacaggctggatgaccacaattaacggcaaggagctgaaggtggagggccagattacctactacaacagatacaagagacagaacgtagtcaaggacctgtccgtcgagctggatagactgagcgaagaatctgtgaacaacgacatctcctcctggacaaagggcagaagcggagaagctctgagcctcctgaagaaaagattctcccatagacccgtgcaggagaagttcgtgtgcctgaactgcggcttcgagacacacgcagccgagcaagccgccctgaacatcgccagatcctggctgttcctgcggagccaggagtacaagaaataccagacaaacaagacaaccggcaacaccgataagagagccttcgtcgagacctggcagtccttttaccggaagaagcttaaggaggtgtggaaacctgccgtgcggtctggcggatctggcggaggctccacaagccaggccgaggtgaccttcgaggacgtggccgtgctgctgagcagggaggagtggggcaggctgggccccgcccagaagggcctgtacagggacgtgatgctggagacctacaggaacctggtgagcctgggcgccggccacgccggccccaagcccggcgtgatcgcccagctggagaggggcgacgagccctgggtgctggacatgcagggcagggagcagagcaccatcgacggcagcgccaccagccccaagaaaaagagaaaagtctaagctgccttctgcggggcttgccttctggccatgcccttcttctctcccttgcacctgtacctcttggtctttgaataaagcctgagtaggaaggctagcaaaaaaaaaaaaaaaaaaaaaaaaaaaaaaaaaaaaaaaaaaaaaaaaaaaaaaaaaaaaaaaaaaaaaaaaaaaaaaaa

SEQ ID NO: 3096 - RNA, 5419 nt, synthetic construct
  source 1..5419: mol_type = other RNA
aggaaataagagagaaaagaagagtaagaagaaatataagagccaccatggcccctaagaagaagcgtaaagtgagccgggtgaacggcagcggcagcggcggcggcatgaaccacgaccaggagttcgacccccctaaggtgtaccctcccgtccccgccgagaagagaaagcccatccgggtcctgagcctgttcgatggcatcgccaccggtctgctggtgctgaaggacctgggcatccaggtggataggtacattgcctccgaggtgtgcgaggactccatcaccgtgggaatggtgcgtcatcagggcaagatcatgtacgtgggcgacgtgcggagcgtgacacagaagcatatccaggagtggggccctttcgacctggtgatcggcggcagcccttgcaatgacctgagcatcgtgaacccagcccggaagggcctgtacgagggaaccggcagactgttcttcgagttttacagactgctgcacgacgcccggcctaaggaaggcgacgaccggcccttcttttggctgttcgagaatgtggtggccatgggagtcagcgacaagcgggatattagccggttcctggagagcaaccccgtgatgatcgatgccaaggaagtgagcgccgcccaccgggccagatacttctggggcaatctgcctggcatgaacagacccctggccagcaccgtgaacgacaagctggagctgcaggagtgcctggagcacggccggatcgccaagttcagcaaggtgagaaccatcaccacccgaagcaacagcatcaaacaaggcaaggaccagcactttcctgtgttcatgaacgagaaggaggacatcctgtggtgtaccgagatggagagagtgttcgggttcccagtccactacacagatgtcagcaacatgtctagactggccagacagagactgctgggaagaagctggtccgtccctgtgatcagacacctgttcgcccctctgaaggagtacttcgcctgcgtgagcagcggcaacagcaacgccaacagccggggccccagcttctctagcggcctggtgccactgtccctgagagggagccacatgggccccatggagatctacaaaaccgtgagcgcctggaagcggcagcctgtgcgcgtgctgagcctgtttcggaatatcgataaagtcctgaaaagcctgggattcctggagagcggctctggctccggcggtggcaccctgaagtacgtggaggatgtgacaaacgtggtcagacgggatgtggagaagtggggccccttcgatctggtgtacggcagcacccaacccctgggcagctcttgtgaccggtgccctggctggtacatgtttcagttccaccggatcctgcagtacgccctgccgagacaggagtcccagcggccattcttttggattttcatggacaacttgctgctgaccgaggatgaccaggaaactaccactcggttcctgcagaccgaagccgtgaccctgcaggacgtgagaggccgggactaccagaacgccatgcgggtgtggtccaacatccctggactgaaaagcaagcacgcacctctgacccctaaagaagaggagtacctgcaggcccaggtgcggagcagaagcaagctggacgcccctaaggtggatctgctggtgaagaattgcctcctgcccctgagagagtacttcaagtatttcagccagaatagtctgcccctgggcggcccaagcagcggcgcccctcctcccagcggcggcagcccagccggctccccaacctctaccgaggagggcacctctgagtccgccacccccgagagcggccctggcacctccaccgagcccagcgagggcagcgcacccggcagccctgccggcagccccacctccacagaggagggaaccagcaccgagcccagcgaaggcagcgccccaggcaccagcaccgagcctagtgagggcggctctggcggcggcagcgcccaggagattaaacggatcaacaagatcagaagaagacttgtgaaagacagcaacaccaagaaggccggcaagacaggccccatgaaaaccctgctggttagagtgatgacacccgatctgagagagcggctggaaaacctgagaaagaagcctgaaaatatcccccagcccatcagcaatacatctagagccaacctgaataagctgctgaccgattacaccgaaatgaagaaggcgatcctgcatgtgtactgggaagagttccagaaggaccctgtgggcctgatgagccgggtggcccagcctgccagcaagaagatcgatcagaacaagctgaaacctgagatggacgagaagggcaacctgaccaccgccggctttgcctgctctcagtgtggccagcccctgttcgtgtacaagctggagcaggtgtctgagaagggcaaggcttacaccaactacttcggacggtgcaatgtggccgagcacgaaaagctgatcctgctggcccagctgaagcccgagaaggatagcgacgaagccgtgacatatagcctgggaaagtttgggcagagggccctggatttctacagcattcatgtgaccaaggagtccacccaccccgtgaagcccctggcccagatcgccggaaacagatacgcctccggacctgtgggaaaggccctgagcgacgcatgtatgggcacaatcgcctccttcctgtctaagtaccaggacatcatcatcgaacaccagaaggtggtgaagggcaaccagaagagactggagagcctgcgggagctggccggcaaggaaaacctggaataccctagcgtgaccctgccacctcagcctcacaccaaggagggcgttgatgcctacaacgaagtgatcgcccgggtgcgaatgtgggtgaacctgaacctgtggcagaagctgaagctaagcagagatgatgccaagcctctgctgagactgaagggattcccttcctttcctctggtcgagagacaggccaacgaagtggactggtgggacatggtgtgtaacgtgaagaagctgatcaacgagaaaaaggaggatggcaaggtgttttggcagaatctggctggctacaagagacaggaagccctgagaccatacctgagcagcgaggaagatcggaagaagggaaagaaattcgctcggtaccagctgggcgacctgctgctgcacctggaaaagaagcacggcgaggactggggaaaggtgtacgacgaggcctgggagcggattgacaagaaagtggaaggcctgagcaagcacatcaagctggaagaggaacggagaagcgaggacgcccagagcaaggccgccctgaccgactggctgcgggctaaggccagcttcgtgatcgagggcctgaaggaggccgacaaggacgagttctgcagatgcgagctgaagctgcagaagtggtacggggacctgcggggaaagcccttcgccatcgaagccgagaacagcatcctggacatcagcggcttcagcaagcagtacaactgtgccttcatctggcagaaggacggcgtgaagaagctgaacctgtacctgatcatcaactacttcaagggcggcaagctgcggttcaagaagatcaaacctgaagccttcgaagccaacagattctacaccgtgatcaacaaaaagagcggcgagatcgtgcccatggaggtgaacttcaacttcgacgaccccaacctgatcatcctgcctctggcctttggcaagagacagggcagagaattcatctggaacgacctgctgtccctggaaaccggcagcctgaagctggccaacggaagagtgatcgagaagacactgtacaacagaagaacccggcaggatgagcctgccctgttcgtggccctgaccttcgagcggcgggaggtcctggactcctccaatatcaaaccaatgaacctgatcggcgtggcaagaggcgaaaacatccccgccgtgatcgccctgaccgaccccgagggctgcccactgagccggtttaaggatagcctgggaaacccaacccacatcctgagaatcggcgagagctataaggagaagcagcggaccatccaggccaagaaggaggtggagcagcggagagccggcggctacagccggaagtacgccagcaaagccaagaatctggcagacgatatggtgagaaacaccgctagagatctgctgtactacgccgtgacccaggatgccatgctgatcttcgccaacctgagccggggcttcggccggcagggcaagcggaccttcatggccgagagacagtacacacggatggaggactggctgaccgccaagctggcctacgagggcctgagcaagacctacctgtccaagacactggcccagtacacctccaagacatgcagcaactgtgggtttaccatcaccagcgccgactacgacagggtgctggagaagctgaagaagacagcaacaggctggatgaccacaattaacggcaaggagctgaaggtggagggccagattacctactacaacagatacaagagacagaacgtagtcaaggacctgtccgtcgagctggatagactgagcgaagaatctgtgaacaacgacatctcctcctggacaaagggcagaagcggagaagctctgagcctcctgaagaaaagattctcccatagacccgtgcaggagaagttcgtgtgcctgaactgcggcttcgagacacacgcagccgagcaagccgccctgaacatcgccagatcctggctgttcctgcggagccaggagtacaagaaataccagacaaacaagacaaccggcaacaccgataagagagccttcgtcgagacctggcagtccttttaccggaagaagcttaaggaggtgtggaaacctgccgtgcggtctggcggatctggcggaggctccacaagcagcagccaggagctgctgaccttcagggacgtggccatcgagttcagccaggaggagtggaggtgcctgaaccacacccagagggagctgtacagggacgtgatgctggagaactacggccacctgctgttcctgggcctgatcgtgagcaagcccgacctggtgagcttcctggagcagaccaaggacccctgggacggcaagagcaagaagaccgtggccttccaccccggcaggtgggagaccagccccaagaaaaagagaaaagtctaagctgccttctgcggggcttgccttctggccatgcccttcttctctcccttgcacctgtacctcttggtctttgaataaagcctgagtaggaaggctagcaaaaaaaaaaaaaaaaaaaaaaaaaaaaaaaaaaaaaaaaaaaaaaaaaaaaaaaaaaaaaaaaaaaaaaaaaaaaaaaa

SEQ ID NO: 3097 - RNA, 5419 nt, synthetic construct
  source 1..5419: mol_type = other RNA
aggaaataagagagaaaagaagagtaagaagaaatataagagccaccatggcccctaagaagaagcgtaaagtgagccgggtgaacggcagcggcagcggcggcggcatgaaccacgaccaggagttcgacccccctaaggtgtaccctcccgtccccgccgagaagagaaagcccatccgggtcctgagcctgttcgatggcatcgccaccggtctgctggtgctgaaggacctgggcatccaggtggataggtacattgcctccgaggtgtgcgaggactccatcaccgtgggaatggtgcgtcatcagggcaagatcatgtacgtgggcgacgtgcggagcgtgacacagaagcatatccaggagtggggccctttcgacctggtgatcggcggcagcccttgcaatgacctgagcatcgtgaacccagcccggaagggcctgtacgagggaaccggcagactgttcttcgagttttacagactgctgcacgacgcccggcctaaggaaggcgacgaccggcccttcttttggctgttcgagaatgtggtggccatgggagtcagcgacaagcgggatattagccggttcctggagagcaaccccgtgatgatcgatgccaaggaagtgagcgccgcccaccgggccagatacttctggggcaatctgcctggcatgaacagacccctggccagcaccgtgaacgacaagctggagctgcaggagtgcctggagcacggccggatcgccaagttcagcaaggtgagaaccatcaccacccgaagcaacagcatcaaacaaggcaaggaccagcactttcctgtgttcatgaacgagaaggaggacatcctgtggtgtaccgagatggagagagtgttcgggttcccagtccactacacagatgtcagcaacatgtctagactggccagacagagactgctgggaagaagctggtccgtccctgtgatcagacacctgttcgcccctctgaaggagtacttcgcctgcgtgagcagcggcaacagcaacgccaacagccggggccccagcttctctagcggcctggtgccactgtccctgagagggagccacatgggccccatggagatctacaaaaccgtgagcgcctggaagcggcagcctgtgcgcgtgctgagcctgtttcggaatatcgataaagtcctgaaaagcctgggattcctggagagcggctctggctccggcggtggcaccctgaagtacgtggaggatgtgacaaacgtggtcagacgggatgtggagaagtggggccccttcgatctggtgtacggcagcacccaacccctgggcagctcttgtgaccggtgccctggctggtacatgtttcagttccaccggatcctgcagtacgccctgccgagacaggagtcccagcggccattcttttggattttcatggacaacttgctgctgaccgaggatgaccaggaaactaccactcggttcctgcagaccgaagccgtgaccctgcaggacgtgagaggccgggactaccagaacgccatgcgggtgtggtccaacatccctggactgaaaagcaagcacgcacctctgacccctaaagaagaggagtacctgcaggcccaggtgcggagcagaagcaagctggacgcccctaaggtggatctgctggtgaagaattgcctcctgcccctgagagagtacttcaagtatttcagccagaatagtctgcccctgggcggcccaagcagcggcgcccctcctcccagcggcggcagcccagccggctccccaacctctaccgaggagggcacctctgagtccgccacccccgagagcggccctggcacctccaccgagcccagcgagggcagcgcacccggcagccctgccggcagccccacctccacagaggagggaaccagcaccgagcccagcgaaggcagcgccccaggcaccagcaccgagcctagtgagggcggctctggcggcggcagcgcccaggagattaaacggatcaacaagatcagaagaagacttgtgaaagacagcaacaccaagaaggccggcaagacaggccccatgaaaaccctgctggttagagtgatgacacccgatctgagagagcggctggaaaacctgagaaagaagcctgaaaatatcccccagcccatcagcaatacatctagagccaacctgaataagctgctgaccgattacaccgaaatgaagaaggcgatcctgcatgtgtactgggaagagttccagaaggaccctgtgggcctgatgagccgggtggcccagcctgccagcaagaagatcgatcagaacaagctgaaacctgagatggacgagaagggcaacctgaccaccgccggctttgcctgctctcagtgtggccagcccctgttcgtgtacaagctggagcaggtgtctgagaagggcaaggcttacaccaactacttcggacggtgcaatgtggccgagcacgaaaagctgatcctgctggcccagctgaagcccgagaaggatagcgacgaagccgtgacatatagcctgggaaagtttgggcagagggccctggatttctacagcattcatgtgaccaaggagtccacccaccccgtgaagcccctggcccagatcgccggaaacagatacgcctccggacctgtgggaaaggccctgagcgacgcatgtatgggcacaatcgcctccttcctgtctaagtaccaggacatcatcatcgaacaccagaaggtggtgaagggcaaccagaagagactggagagcctgcgggagctggccggcaaggaaaacctggaataccctagcgtgaccctgccacctcagcctcacaccaaggagggcgttgatgcctacaacgaagtgatcgcccgggtgcgaatgtgggtgaacctgaacctgtggcagaagctgaagctaagcagagatgatgccaagcctctgctgagactgaagggattcccttcctttcctctggtcgagagacaggccaacgaagtggactggtgggacatggtgtgtaacgtgaagaagctgatcaacgagaaaaaggaggatggcaaggtgttttggcagaatctggctggctacaagagacaggaagccctgagaccatacctgagcagcgaggaagatcggaagaagggaaagaaattcgctcggtaccagctgggcgacctgctgctgcacctggaaaagaagcacggcgaggactggggaaaggtgtacgacgaggcctgggagcggattgacaagaaagtggaaggcctgagcaagcacatcaagctggaagaggaacggagaagcgaggacgcccagagcaaggccgccctgaccgactggctgcgggctaaggccagcttcgtgatcgagggcctgaaggaggccgacaaggacgagttctgcagatgcgagctgaagctgcagaagtggtacggggacctgcggggaaagcccttcgccatcgaagccgagaacagcatcctggacatcagcggcttcagcaagcagtacaactgtgccttcatctggcagaaggacggcgtgaagaagctgaacctgtacctgatcatcaactacttcaagggcggcaagctgcggttcaagaagatcaaacctgaagccttcgaagccaacagattctacaccgtgatcaacaaaaagagcggcgagatcgtgcccatggaggtgaacttcaacttcgacgaccccaacctgatcatcctgcctctggcctttggcaagagacagggcagagaattcatctggaacgacctgctgtccctggaaaccggcagcctgaagctggccaacggaagagtgatcgagaagacactgtacaacagaagaacccggcaggatgagcctgccctgttcgtggccctgaccttcgagcggcgggaggtcctggactcctccaatatcaaaccaatgaacctgatcggcgtggcaagaggcgaaaacatccccgccgtgatcgccctgaccgaccccgagggctgcccactgagccggtttaaggatagcctgggaaacccaacccacatcctgagaatcggcgagagctataaggagaagcagcggaccatccaggccaagaaggaggtggagcagcggagagccggcggctacagccggaagtacgccagcaaagccaagaatctggcagacgatatggtgagaaacaccgctagagatctgctgtactacgccgtgacccaggatgccatgctgatcttcgccaacctgagccggggcttcggccggcagggcaagcggaccttcatggccgagagacagtacacacggatggaggactggctgaccgccaagctggcctacgagggcctgagcaagacctacctgtccaagacactggcccagtacacctccaagacatgcagcaactgtgggtttaccatcaccagcgccgactacgacagggtgctggagaagctgaagaagacagcaacaggctggatgaccacaattaacggcaaggagctgaaggtggagggccagattacctactacaacagatacaagagacagaacgtagtcaaggacctgtccgtcgagctggatagactgagcgaagaatctgtgaacaacgacatctcctcctggacaaagggcagaagcggagaagctctgagcctcctgaagaaaagattctcccatagacccgtgcaggagaagttcgtgtgcctgaactgcggcttcgagacacacgcagccgagcaagccgccctgaacatcgccagatcctggctgttcctgcggagccaggagtacaagaaataccagacaaacaagacaaccggcaacaccgataagagagccttcgtcgagacctggcagtccttttaccggaagaagcttaaggaggtgtggaaacctgccgtgcggtctggcggatctggcggaggctccacaagcctgcaggtgagcgtgagcttcgaggacgtgaccgtgaacttcagcagggaggagtggcagcacctggaccccgcccagaggaggctgtacagggacgtgaccctggagaactacagccacctgaggagcgtgggctaccaggtgcccaagcccgaggtgatcttcaagctggagcagggcgagggcccctggaccctggagggcgagaccccccaccagagctgcagcggcgaggacatcggcaccagccccaagaaaaagagaaaagtctaagctgccttctgcggggcttgccttctggccatgcccttcttctctcccttgcacctgtacctcttggtctttgaataaagcctgagtaggaaggctagcaaaaaaaaaaaaaaaaaaaaaaaaaaaaaaaaaaaaaaaaaaaaaaaaaaaaaaaaaaaaaaaaaaaaaaaaaaaaaaaa

SEQ ID NO: 3098 - RNA, 5419 nt, synthetic construct
  source 1..5419: mol_type = other RNA
aggaaataagagagaaaagaagagtaagaagaaatataagagccaccatggcccctaagaagaagcgtaaagtgagccgggtgaacggcagcggcagcggcggcggcatgaaccacgaccaggagttcgacccccctaaggtgtaccctcccgtccccgccgagaagagaaagcccatccgggtcctgagcctgttcgatggcatcgccaccggtctgctggtgctgaaggacctgggcatccaggtggataggtacattgcctccgaggtgtgcgaggactccatcaccgtgggaatggtgcgtcatcagggcaagatcatgtacgtgggcgacgtgcggagcgtgacacagaagcatatccaggagtggggccctttcgacctggtgatcggcggcagcccttgcaatgacctgagcatcgtgaacccagcccggaagggcctgtacgagggaaccggcagactgttcttcgagttttacagactgctgcacgacgcccggcctaaggaaggcgacgaccggcccttcttttggctgttcgagaatgtggtggccatgggagtcagcgacaagcgggatattagccggttcctggagagcaaccccgtgatgatcgatgccaaggaagtgagcgccgcccaccgggccagatacttctggggcaatctgcctggcatgaacagacccctggccagcaccgtgaacgacaagctggagctgcaggagtgcctggagcacggccggatcgccaagttcagcaaggtgagaaccatcaccacccgaagcaacagcatcaaacaaggcaaggaccagcactttcctgtgttcatgaacgagaaggaggacatcctgtggtgtaccgagatggagagagtgttcgggttcccagtccactacacagatgtcagcaacatgtctagactggccagacagagactgctgggaagaagctggtccgtccctgtgatcagacacctgttcgcccctctgaaggagtacttcgcctgcgtgagcagcggcaacagcaacgccaacagccggggccccagcttctctagcggcctggtgccactgtccctgagagggagccacatgggccccatggagatctacaaaaccgtgagcgcctggaagcggcagcctgtgcgcgtgctgagcctgtttcggaatatcgataaagtcctgaaaagcctgggattcctggagagcggctctggctccggcggtggcaccctgaagtacgtggaggatgtgacaaacgtggtcagacgggatgtggagaagtggggccccttcgatctggtgtacggcagcacccaacccctgggcagctcttgtgaccggtgccctggctggtacatgtttcagttccaccggatcctgcagtacgccctgccgagacaggagtcccagcggccattcttttggattttcatggacaacttgctgctgaccgaggatgaccaggaaactaccactcggttcctgcagaccgaagccgtgaccctgcaggacgtgagaggccgggactaccagaacgccatgcgggtgtggtccaacatccctggactgaaaagcaagcacgcacctctgacccctaaagaagaggagtacctgcaggcccaggtgcggagcagaagcaagctggacgcccctaaggtggatctgctggtgaagaattgcctcctgcccctgagagagtacttcaagtatttcagccagaatagtctgcccctgggcggcccaagcagcggcgcccctcctcccagcggcggcagcccagccggctccccaacctctaccgaggagggcacctctgagtccgccacccccgagagcggccctggcacctccaccgagcccagcgagggcagcgcacccggcagccctgccggcagccccacctccacagaggagggaaccagcaccgagcccagcgaaggcagcgccccaggcaccagcaccgagcctagtgagggcggctctggcggcggcagcgcccaggagattaaacggatcaacaagatcagaagaagacttgtgaaagacagcaacaccaagaaggccggcaagacaggccccatgaaaaccctgctggttagagtgatgacacccgatctgagagagcggctggaaaacctgagaaagaagcctgaaaatatcccccagcccatcagcaatacatctagagccaacctgaataagctgctgaccgattacaccgaaatgaagaaggcgatcctgcatgtgtactgggaagagttccagaaggaccctgtgggcctgatgagccgggtggcccagcctgccagcaagaagatcgatcagaacaagctgaaacctgagatggacgagaagggcaacctgaccaccgccggctttgcctgctctcagtgtggccagcccctgttcgtgtacaagctggagcaggtgtctgagaagggcaaggcttacaccaactacttcggacggtgcaatgtggccgagcacgaaaagctgatcctgctggcccagctgaagcccgagaaggatagcgacgaagccgtgacatatagcctgggaaagtttgggcagagggccctggatttctacagcattcatgtgaccaaggagtccacccaccccgtgaagcccctggcccagatcgccggaaacagatacgcctccggacctgtgggaaaggccctgagcgacgcatgtatgggcacaatcgcctccttcctgtctaagtaccaggacatcatcatcgaacaccagaaggtggtgaagggcaaccagaagagactggagagcctgcgggagctggccggcaaggaaaacctggaataccctagcgtgaccctgccacctcagcctcacaccaaggagggcgttgatgcctacaacgaagtgatcgcccgggtgcgaatgtgggtgaacctgaacctgtggcagaagctgaagctaagcagagatgatgccaagcctctgctgagactgaagggattcccttcctttcctctggtcgagagacaggccaacgaagtggactggtgggacatggtgtgtaacgtgaagaagctgatcaacgagaaaaaggaggatggcaaggtgttttggcagaatctggctggctacaagagacaggaagccctgagaccatacctgagcagcgaggaagatcggaagaagggaaagaaattcgctcggtaccagctgggcgacctgctgctgcacctggaaaagaagcacggcgaggactggggaaaggtgtacgacgaggcctgggagcggattgacaagaaagtggaaggcctgagcaagcacatcaagctggaagaggaacggagaagcgaggacgcccagagcaaggccgccctgaccgactggctgcgggctaaggccagcttcgtgatcgagggcctgaaggaggccgacaaggacgagttctgcagatgcgagctgaagctgcagaagtggtacggggacctgcggggaaagcccttcgccatcgaagccgagaacagcatcctggacatcagcggcttcagcaagcagtacaactgtgccttcatctggcagaaggacggcgtgaagaagctgaacctgtacctgatcatcaactacttcaagggcggcaagctgcggttcaagaagatcaaacctgaagccttcgaagccaacagattctacaccgtgatcaacaaaaagagcggcgagatcgtgcccatggaggtgaacttcaacttcgacgaccccaacctgatcatcctgcctctggcctttggcaagagacagggcagagaattcatctggaacgacctgctgtccctggaaaccggcagcctgaagctggccaacggaagagtgatcgagaagacactgtacaacagaagaacccggcaggatgagcctgccctgttcgtggccctgaccttcgagcggcgggaggtcctggactcctccaatatcaaaccaatgaacctgatcggcgtggcaagaggcgaaaacatccccgccgtgatcgccctgaccgaccccgagggctgcccactgagccggtttaaggatagcctgggaaacccaacccacatcctgagaatcggcgagagctataaggagaagcagcggaccatccaggccaagaaggaggtggagcagcggagagccggcggctacagccggaagtacgccagcaaagccaagaatctggcagacgatatggtgagaaacaccgctagagatctgctgtactacgccgtgacccaggatgccatgctgatcttcgccaacctgagccggggcttcggccggcagggcaagcggaccttcatggccgagagacagtacacacggatggaggactggctgaccgccaagctggcctacgagggcctgagcaagacctacctgtccaagacactggcccagtacacctccaagacatgcagcaactgtgggtttaccatcaccagcgccgactacgacagggtgctggagaagctgaagaagacagcaacaggctggatgaccacaattaacggcaaggagctgaaggtggagggccagattacctactacaacagatacaagagacagaacgtagtcaaggacctgtccgtcgagctggatagactgagcgaagaatctgtgaacaacgacatctcctcctggacaaagggcagaagcggagaagctctgagcctcctgaagaaaagattctcccatagacccgtgcaggagaagttcgtgtgcctgaactgcggcttcgagacacacgcagccgagcaagccgccctgaacatcgccagatcctggctgttcctgcggagccaggagtacaagaaataccagacaaacaagacaaccggcaacaccgataagagagccttcgtcgagacctggcagtccttttaccggaagaagcttaaggaggtgtggaaacctgccgtgcggtctggcggatctggcggaggctccacaagcatggccctgaggagcgtgatgttcagcgacgtgagcatcgacttcagccccgaggagtgggagtacctggacctggagcagaaggacctgtacagggacgtgatgctggagaactacagcaacctggtgagcctgggctgcttcatcagcaagcccgacgtgatcagcctgctggagcagggcaaggagccctggaaggtggtgaggaagggcaggaggcagtaccccgacctggagaccaggaccagccccaagaaaaagagaaaagtctaagctgccttctgcggggcttgccttctggccatgcccttcttctctcccttgcacctgtacctcttggtctttgaataaagcctgagtaggaaggctagcaaaaaaaaaaaaaaaaaaaaaaaaaaaaaaaaaaaaaaaaaaaaaaaaaaaaaaaaaaaaaaaaaaaaaaaaaaaaaaaa

SEQ ID NO: 3099 - RNA, 5419 nt, synthetic construct
  source 1..5419: mol_type = other RNA
aggaaataagagagaaaagaagagtaagaagaaatataagagccaccatggcccctaagaagaagcgtaaagtgagccgggtgaacggcagcggcagcggcggcggcatgaaccacgaccaggagttcgacccccctaaggtgtaccctcccgtccccgccgagaagagaaagcccatccgggtcctgagcctgttcgatggcatcgccaccggtctgctggtgctgaaggacctgggcatccaggtggataggtacattgcctccgaggtgtgcgaggactccatcaccgtgggaatggtgcgtcatcagggcaagatcatgtacgtgggcgacgtgcggagcgtgacacagaagcatatccaggagtggggccctttcgacctggtgatcggcggcagcccttgcaatgacctgagcatcgtgaacccagcccggaagggcctgtacgagggaaccggcagactgttcttcgagttttacagactgctgcacgacgcccggcctaaggaaggcgacgaccggcccttcttttggctgttcgagaatgtggtggccatgggagtcagcgacaagcgggatattagccggttcctggagagcaaccccgtgatgatcgatgccaaggaagtgagcgccgcccaccgggccagatacttctggggcaatctgcctggcatgaacagacccctggccagcaccgtgaacgacaagctggagctgcaggagtgcctggagcacggccggatcgccaagttcagcaaggtgagaaccatcaccacccgaagcaacagcatcaaacaaggcaaggaccagcactttcctgtgttcatgaacgagaaggaggacatcctgtggtgtaccgagatggagagagtgttcgggttcccagtccactacacagatgtcagcaacatgtctagactggccagacagagactgctgggaagaagctggtccgtccctgtgatcagacacctgttcgcccctctgaaggagtacttcgcctgcgtgagcagcggcaacagcaacgccaacagccggggccccagcttctctagcggcctggtgccactgtccctgagagggagccacatgggccccatggagatctacaaaaccgtgagcgcctggaagcggcagcctgtgcgcgtgctgagcctgtttcggaatatcgataaagtcctgaaaagcctgggattcctggagagcggctctggctccggcggtggcaccctgaagtacgtggaggatgtgacaaacgtggtcagacgggatgtggagaagtggggccccttcgatctggtgtacggcagcacccaacccctgggcagctcttgtgaccggtgccctggctggtacatgtttcagttccaccggatcctgcagtacgccctgccgagacaggagtcccagcggccattcttttggattttcatggacaacttgctgctgaccgaggatgaccaggaaactaccactcggttcctgcagaccgaagccgtgaccctgcaggacgtgagaggccgggactaccagaacgccatgcgggtgtggtccaacatccctggactgaaaagcaagcacgcacctctgacccctaaagaagaggagtacctgcaggcccaggtgcggagcagaagcaagctggacgcccctaaggtggatctgctggtgaagaattgcctcctgcccctgagagagtacttcaagtatttcagccagaatagtctgcccctgggcggcccaagcagcggcgcccctcctcccagcggcggcagcccagccggctccccaacctctaccgaggagggcacctctgagtccgccacccccgagagcggccctggcacctccaccgagcccagcgagggcagcgcacccggcagccctgccggcagccccacctccacagaggagggaaccagcaccgagcccagcgaaggcagcgccccaggcaccagcaccgagcctagtgagggcggctctggcggcggcagcgcccaggagattaaacggatcaacaagatcagaagaagacttgtgaaagacagcaacaccaagaaggccggcaagacaggccccatgaaaaccctgctggttagagtgatgacacccgatctgagagagcggctggaaaacctgagaaagaagcctgaaaatatcccccagcccatcagcaatacatctagagccaacctgaataagctgctgaccgattacaccgaaatgaagaaggcgatcctgcatgtgtactgggaagagttccagaaggaccctgtgggcctgatgagccgggtggcccagcctgccagcaagaagatcgatcagaacaagctgaaacctgagatggacgagaagggcaacctgaccaccgccggctttgcctgctctcagtgtggccagcccctgttcgtgtacaagctggagcaggtgtctgagaagggcaaggcttacaccaactacttcggacggtgcaatgtggccgagcacgaaaagctgatcctgctggcccagctgaagcccgagaaggatagcgacgaagccgtgacatatagcctgggaaagtttgggcagagggccctggatttctacagcattcatgtgaccaaggagtccacccaccccgtgaagcccctggcccagatcgccggaaacagatacgcctccggacctgtgggaaaggccctgagcgacgcatgtatgggcacaatcgcctccttcctgtctaagtaccaggacatcatcatcgaacaccagaaggtggtgaagggcaaccagaagagactggagagcctgcgggagctggccggcaaggaaaacctggaataccctagcgtgaccctgccacctcagcctcacaccaaggagggcgttgatgcctacaacgaagtgatcgcccgggtgcgaatgtgggtgaacctgaacctgtggcagaagctgaagctaagcagagatgatgccaagcctctgctgagactgaagggattcccttcctttcctctggtcgagagacaggccaacgaagtggactggtgggacatggtgtgtaacgtgaagaagctgatcaacgagaaaaaggaggatggcaaggtgttttggcagaatctggctggctacaagagacaggaagccctgagaccatacctgagcagcgaggaagatcggaagaagggaaagaaattcgctcggtaccagctgggcgacctgctgctgcacctggaaaagaagcacggcgaggactggggaaaggtgtacgacgaggcctgggagcggattgacaagaaagtggaaggcctgagcaagcacatcaagctggaagaggaacggagaagcgaggacgcccagagcaaggccgccctgaccgactggctgcgggctaaggccagcttcgtgatcgagggcctgaaggaggccgacaaggacgagttctgcagatgcgagctgaagctgcagaagtggtacggggacctgcggggaaagcccttcgccatcgaagccgagaacagcatcctggacatcagcggcttcagcaagcagtacaactgtgccttcatctggcagaaggacggcgtgaagaagctgaacctgtacctgatcatcaactacttcaagggcggcaagctgcggttcaagaagatcaaacctgaagccttcgaagccaacagattctacaccgtgatcaacaaaaagagcggcgagatcgtgcccatggaggtgaacttcaacttcgacgaccccaacctgatcatcctgcctctggcctttggcaagagacagggcagagaattcatctggaacgacctgctgtccctggaaaccggcagcctgaagctggccaacggaagagtgatcgagaagacactgtacaacagaagaacccggcaggatgagcctgccctgttcgtggccctgaccttcgagcggcgggaggtcctggactcctccaatatcaaaccaatgaacctgatcggcgtggcaagaggcgaaaacatccccgccgtgatcgccctgaccgaccccgagggctgcccactgagccggtttaaggatagcctgggaaacccaacccacatcctgagaatcggcgagagctataaggagaagcagcggaccatccaggccaagaaggaggtggagcagcggagagccggcggctacagccggaagtacgccagcaaagccaagaatctggcagacgatatggtgagaaacaccgctagagatctgctgtactacgccgtgacccaggatgccatgctgatcttcgccaacctgagccggggcttcggccggcagggcaagcggaccttcatggccgagagacagtacacacggatggaggactggctgaccgccaagctggcctacgagggcctgagcaagacctacctgtccaagacactggcccagtacacctccaagacatgcagcaactgtgggtttaccatcaccagcgccgactacgacagggtgctggagaagctgaagaagacagcaacaggctggatgaccacaattaacggcaaggagctgaaggtggagggccagattacctactacaacagatacaagagacagaacgtagtcaaggacctgtccgtcgagctggatagactgagcgaagaatctgtgaacaacgacatctcctcctggacaaagggcagaagcggagaagctctgagcctcctgaagaaaagattctcccatagacccgtgcaggagaagttcgtgtgcctgaactgcggcttcgagacacacgcagccgagcaagccgccctgaacatcgccagatcctggctgttcctgcggagccaggagtacaagaaataccagacaaacaagacaaccggcaacaccgataagagagccttcgtcgagacctggcagtccttttaccggaagaagcttaaggaggtgtggaaacctgccgtgcggtctggcggatctggcggaggctccacaagcttccagggcagcgtgagcttcaaggacgtgaccgtgggcttcagccaggaggagtggcagcacctggaccccagccagagggccctgtacagggacgtgatgctggagaactacagcaacctggtgagcgtgggctactgcgtgcacaagcccgaggtgatcttcaggctggagcagggcgaggagccctggaggctggaggaggagttccccagccagagcttccccgaggtgtggaccgccaccagccccaagaaaaagagaaaagtctaagctgccttctgcggggcttgccttctggccatgcccttcttctctcccttgcacctgtacctcttggtctttgaataaagcctgagtaggaaggctagcaaaaaaaaaaaaaaaaaaaaaaaaaaaaaaaaaaaaaaaaaaaaaaaaaaaaaaaaaaaaaaaaaaaaaaaaaaaaaaaa

SEQ ID NO: 3100 - RNA, 5419 nt, synthetic construct
  source 1..5419: mol_type = other RNA
aggaaataagagagaaaagaagagtaagaagaaatataagagccaccatggcccctaagaagaagcgtaaagtgagccgggtgaacggcagcggcagcggcggcggcatgaaccacgaccaggagttcgacccccctaaggtgtaccctcccgtccccgccgagaagagaaagcccatccgggtcctgagcctgttcgatggcatcgccaccggtctgctggtgctgaaggacctgggcatccaggtggataggtacattgcctccgaggtgtgcgaggactccatcaccgtgggaatggtgcgtcatcagggcaagatcatgtacgtgggcgacgtgcggagcgtgacacagaagcatatccaggagtggggccctttcgacctggtgatcggcggcagcccttgcaatgacctgagcatcgtgaacccagcccggaagggcctgtacgagggaaccggcagactgttcttcgagttttacagactgctgcacgacgcccggcctaaggaaggcgacgaccggcccttcttttggctgttcgagaatgtggtggccatgggagtcagcgacaagcgggatattagccggttcctggagagcaaccccgtgatgatcgatgccaaggaagtgagcgccgcccaccgggccagatacttctggggcaatctgcctggcatgaacagacccctggccagcaccgtgaacgacaagctggagctgcaggagtgcctggagcacggccggatcgccaagttcagcaaggtgagaaccatcaccacccgaagcaacagcatcaaacaaggcaaggaccagcactttcctgtgttcatgaacgagaaggaggacatcctgtggtgtaccgagatggagagagtgttcgggttcccagtccactacacagatgtcagcaacatgtctagactggccagacagagactgctgggaagaagctggtccgtccctgtgatcagacacctgttcgcccctctgaaggagtacttcgcctgcgtgagcagcggcaacagcaacgccaacagccggggccccagcttctctagcggcctggtgccactgtccctgagagggagccacatgggccccatggagatctacaaaaccgtgagcgcctggaagcggcagcctgtgcgcgtgctgagcctgtttcggaatatcgataaagtcctgaaaagcctgggattcctggagagcggctctggctccggcggtggcaccctgaagtacgtggaggatgtgacaaacgtggtcagacgggatgtggagaagtggggccccttcgatctggtgtacggcagcacccaacccctgggcagctcttgtgaccggtgccctggctggtacatgtttcagttccaccggatcctgcagtacgccctgccgagacaggagtcccagcggccattcttttggattttcatggacaacttgctgctgaccgaggatgaccaggaaactaccactcggttcctgcagaccgaagccgtgaccctgcaggacgtgagaggccgggactaccagaacgccatgcgggtgtggtccaacatccctggactgaaaagcaagcacgcacctctgacccctaaagaagaggagtacctgcaggcccaggtgcggagcagaagcaagctggacgcccctaaggtggatctgctggtgaagaattgcctcctgcccctgagagagtacttcaagtatttcagccagaatagtctgcccctgggcggcccaagcagcggcgcccctcctcccagcggcggcagcccagccggctccccaacctctaccgaggagggcacctctgagtccgccacccccgagagcggccctggcacctccaccgagcccagcgagggcagcgcacccggcagccctgccggcagccccacctccacagaggagggaaccagcaccgagcccagcgaaggcagcgccccaggcaccagcaccgagcctagtgagggcggctctggcggcggcagcgcccaggagattaaacggatcaacaagatcagaagaagacttgtgaaagacagcaacaccaagaaggccggcaagacaggccccatgaaaaccctgctggttagagtgatgacacccgatctgagagagcggctggaaaacctgagaaagaagcctgaaaatatcccccagcccatcagcaatacatctagagccaacctgaataagctgctgaccgattacaccgaaatgaagaaggcgatcctgcatgtgtactgggaagagttccagaaggaccctgtgggcctgatgagccgggtggcccagcctgccagcaagaagatcgatcagaacaagctgaaacctgagatggacgagaagggcaacctgaccaccgccggctttgcctgctctcagtgtggccagcccctgttcgtgtacaagctggagcaggtgtctgagaagggcaaggcttacaccaactacttcggacggtgcaatgtggccgagcacgaaaagctgatcctgctggcccagctgaagcccgagaaggatagcgacgaagccgtgacatatagcctgggaaagtttgggcagagggccctggatttctacagcattcatgtgaccaaggagtccacccaccccgtgaagcccctggcccagatcgccggaaacagatacgcctccggacctgtgggaaaggccctgagcgacgcatgtatgggcacaatcgcctccttcctgtctaagtaccaggacatcatcatcgaacaccagaaggtggtgaagggcaaccagaagagactggagagcctgcgggagctggccggcaaggaaaacctggaataccctagcgtgaccctgccacctcagcctcacaccaaggagggcgttgatgcctacaacgaagtgatcgcccgggtgcgaatgtgggtgaacctgaacctgtggcagaagctgaagctaagcagagatgatgccaagcctctgctgagactgaagggattcccttcctttcctctggtcgagagacaggccaacgaagtggactggtgggacatggtgtgtaacgtgaagaagctgatcaacgagaaaaaggaggatggcaaggtgttttggcagaatctggctggctacaagagacaggaagccctgagaccatacctgagcagcgaggaagatcggaagaagggaaagaaattcgctcggtaccagctgggcgacctgctgctgcacctggaaaagaagcacggcgaggactggggaaaggtgtacgacgaggcctgggagcggattgacaagaaagtggaaggcctgagcaagcacatcaagctggaagaggaacggagaagcgaggacgcccagagcaaggccgccctgaccgactggctgcgggctaaggccagcttcgtgatcgagggcctgaaggaggccgacaaggacgagttctgcagatgcgagctgaagctgcagaagtggtacggggacctgcggggaaagcccttcgccatcgaagccgagaacagcatcctggacatcagcggcttcagcaagcagtacaactgtgccttcatctggcagaaggacggcgtgaagaagctgaacctgtacctgatcatcaactacttcaagggcggcaagctgcggttcaagaagatcaaacctgaagccttcgaagccaacagattctacaccgtgatcaacaaaaagagcggcgagatcgtgcccatggaggtgaacttcaacttcgacgaccccaacctgatcatcctgcctctggcctttggcaagagacagggcagagaattcatctggaacgacctgctgtccctggaaaccggcagcctgaagctggccaacggaagagtgatcgagaagacactgtacaacagaagaacccggcaggatgagcctgccctgttcgtggccctgaccttcgagcggcgggaggtcctggactcctccaatatcaaaccaatgaacctgatcggcgtggcaagaggcgaaaacatccccgccgtgatcgccctgaccgaccccgagggctgcccactgagccggtttaaggatagcctgggaaacccaacccacatcctgagaatcggcgagagctataaggagaagcagcggaccatccaggccaagaaggaggtggagcagcggagagccggcggctacagccggaagtacgccagcaaagccaagaatctggcagacgatatggtgagaaacaccgctagagatctgctgtactacgccgtgacccaggatgccatgctgatcttcgccaacctgagccggggcttcggccggcagggcaagcggaccttcatggccgagagacagtacacacggatggaggactggctgaccgccaagctggcctacgagggcctgagcaagacctacctgtccaagacactggcccagtacacctccaagacatgcagcaactgtgggtttaccatcaccagcgccgactacgacagggtgctggagaagctgaagaagacagcaacaggctggatgaccacaattaacggcaaggagctgaaggtggagggccagattacctactacaacagatacaagagacagaacgtagtcaaggacctgtccgtcgagctggatagactgagcgaagaatctgtgaacaacgacatctcctcctggacaaagggcagaagcggagaagctctgagcctcctgaagaaaagattctcccatagacccgtgcaggagaagttcgtgtgcctgaactgcggcttcgagacacacgcagccgagcaagccgccctgaacatcgccagatcctggctgttcctgcggagccaggagtacaagaaataccagacaaacaagacaaccggcaacaccgataagagagccttcgtcgagacctggcagtccttttaccggaagaagcttaaggaggtgtggaaacctgccgtgcggtctggcggatctggcggaggctccacaagcctgcaggaggccgtgaccttcaaggacgtggccgtggtgttcagcgaggaggagctgggcctgctggacagcgcccagaggaccctgtacagggacgtgatgctggagaccttccagaacctggtgagcctgggccaccagcccttcaagcccgacgtgatcagccagctggagagggaggagatgctgtggatgaagggcctgcagaccggcaggggcaggtgcagcggcggcaggaaccagaccagccccaagaaaaagagaaaagtctaagctgccttctgcggggcttgccttctggccatgcccttcttctctcccttgcacctgtacctcttggtctttgaataaagcctgagtaggaaggctagcaaaaaaaaaaaaaaaaaaaaaaaaaaaaaaaaaaaaaaaaaaaaaaaaaaaaaaaaaaaaaaaaaaaaaaaaaaaaaaaa

SEQ ID NO: 3101 - RNA, 5419 nt, synthetic construct
  source 1..5419: mol_type = other RNA
aggaaataagagagaaaagaagagtaagaagaaatataagagccaccatggcccctaagaagaagcgtaaagtgagccgggtgaacggcagcggcagcggcggcggcatgaaccacgaccaggagttcgacccccctaaggtgtaccctcccgtccccgccgagaagagaaagcccatccgggtcctgagcctgttcgatggcatcgccaccggtctgctggtgctgaaggacctgggcatccaggtggataggtacattgcctccgaggtgtgcgaggactccatcaccgtgggaatggtgcgtcatcagggcaagatcatgtacgtgggcgacgtgcggagcgtgacacagaagcatatccaggagtggggccctttcgacctggtgatcggcggcagcccttgcaatgacctgagcatcgtgaacccagcccggaagggcctgtacgagggaaccggcagactgttcttcgagttttacagactgctgcacgacgcccggcctaaggaaggcgacgaccggcccttcttttggctgttcgagaatgtggtggccatgggagtcagcgacaagcgggatattagccggttcctggagagcaaccccgtgatgatcgatgccaaggaagtgagcgccgcccaccgggccagatacttctggggcaatctgcctggcatgaacagacccctggccagcaccgtgaacgacaagctggagctgcaggagtgcctggagcacggccggatcgccaagttcagcaaggtgagaaccatcaccacccgaagcaacagcatcaaacaaggcaaggaccagcactttcctgtgttcatgaacgagaaggaggacatcctgtggtgtaccgagatggagagagtgttcgggttcccagtccactacacagatgtcagcaacatgtctagactggccagacagagactgctgggaagaagctggtccgtccctgtgatcagacacctgttcgcccctctgaaggagtacttcgcctgcgtgagcagcggcaacagcaacgccaacagccggggccccagcttctctagcggcctggtgccactgtccctgagagggagccacatgggccccatggagatctacaaaaccgtgagcgcctggaagcggcagcctgtgcgcgtgctgagcctgtttcggaatatcgataaagtcctgaaaagcctgggattcctggagagcggctctggctccggcggtggcaccctgaagtacgtggaggatgtgacaaacgtggtcagacgggatgtggagaagtggggccccttcgatctggtgtacggcagcacccaacccctgggcagctcttgtgaccggtgccctggctggtacatgtttcagttccaccggatcctgcagtacgccctgccgagacaggagtcccagcggccattcttttggattttcatggacaacttgctgctgaccgaggatgaccaggaaactaccactcggttcctgcagaccgaagccgtgaccctgcaggacgtgagaggccgggactaccagaacgccatgcgggtgtggtccaacatccctggactgaaaagcaagcacgcacctctgacccctaaagaagaggagtacctgcaggcccaggtgcggagcagaagcaagctggacgcccctaaggtggatctgctggtgaagaattgcctcctgcccctgagagagtacttcaagtatttcagccagaatagtctgcccctgggcggcccaagcagcggcgcccctcctcccagcggcggcagcccagccggctccccaacctctaccgaggagggcacctctgagtccgccacccccgagagcggccctggcacctccaccgagcccagcgagggcagcgcacccggcagccctgccggcagccccacctccacagaggagggaaccagcaccgagcccagcgaaggcagcgccccaggcaccagcaccgagcctagtgagggcggctctggcggcggcagcgcccaggagattaaacggatcaacaagatcagaagaagacttgtgaaagacagcaacaccaagaaggccggcaagacaggccccatgaaaaccctgctggttagagtgatgacacccgatctgagagagcggctggaaaacctgagaaagaagcctgaaaatatcccccagcccatcagcaatacatctagagccaacctgaataagctgctgaccgattacaccgaaatgaagaaggcgatcctgcatgtgtactgggaagagttccagaaggaccctgtgggcctgatgagccgggtggcccagcctgccagcaagaagatcgatcagaacaagctgaaacctgagatggacgagaagggcaacctgaccaccgccggctttgcctgctctcagtgtggccagcccctgttcgtgtacaagctggagcaggtgtctgagaagggcaaggcttacaccaactacttcggacggtgcaatgtggccgagcacgaaaagctgatcctgctggcccagctgaagcccgagaaggatagcgacgaagccgtgacatatagcctgggaaagtttgggcagagggccctggatttctacagcattcatgtgaccaaggagtccacccaccccgtgaagcccctggcccagatcgccggaaacagatacgcctccggacctgtgggaaaggccctgagcgacgcatgtatgggcacaatcgcctccttcctgtctaagtaccaggacatcatcatcgaacaccagaaggtggtgaagggcaaccagaagagactggagagcctgcgggagctggccggcaaggaaaacctggaataccctagcgtgaccctgccacctcagcctcacaccaaggagggcgttgatgcctacaacgaagtgatcgcccgggtgcgaatgtgggtgaacctgaacctgtggcagaagctgaagctaagcagagatgatgccaagcctctgctgagactgaagggattcccttcctttcctctggtcgagagacaggccaacgaagtggactggtgggacatggtgtgtaacgtgaagaagctgatcaacgagaaaaaggaggatggcaaggtgttttggcagaatctggctggctacaagagacaggaagccctgagaccatacctgagcagcgaggaagatcggaagaagggaaagaaattcgctcggtaccagctgggcgacctgctgctgcacctggaaaagaagcacggcgaggactggggaaaggtgtacgacgaggcctgggagcggattgacaagaaagtggaaggcctgagcaagcacatcaagctggaagaggaacggagaagcgaggacgcccagagcaaggccgccctgaccgactggctgcgggctaaggccagcttcgtgatcgagggcctgaaggaggccgacaaggacgagttctgcagatgcgagctgaagctgcagaagtggtacggggacctgcggggaaagcccttcgccatcgaagccgagaacagcatcctggacatcagcggcttcagcaagcagtacaactgtgccttcatctggcagaaggacggcgtgaagaagctgaacctgtacctgatcatcaactacttcaagggcggcaagctgcggttcaagaagatcaaacctgaagccttcgaagccaacagattctacaccgtgatcaacaaaaagagcggcgagatcgtgcccatggaggtgaacttcaacttcgacgaccccaacctgatcatcctgcctctggcctttggcaagagacagggcagagaattcatctggaacgacctgctgtccctggaaaccggcagcctgaagctggccaacggaagagtgatcgagaagacactgtacaacagaagaacccggcaggatgagcctgccctgttcgtggccctgaccttcgagcggcgggaggtcctggactcctccaatatcaaaccaatgaacctgatcggcgtggcaagaggcgaaaacatccccgccgtgatcgccctgaccgaccccgagggctgcccactgagccggtttaaggatagcctgggaaacccaacccacatcctgagaatcggcgagagctataaggagaagcagcggaccatccaggccaagaaggaggtggagcagcggagagccggcggctacagccggaagtacgccagcaaagccaagaatctggcagacgatatggtgagaaacaccgctagagatctgctgtactacgccgtgacccaggatgccatgctgatcttcgccaacctgagccggggcttcggccggcagggcaagcggaccttcatggccgagagacagtacacacggatggaggactggctgaccgccaagctggcctacgagggcctgagcaagacctacctgtccaagacactggcccagtacacctccaagacatgcagcaactgtgggtttaccatcaccagcgccgactacgacagggtgctggagaagctgaagaagacagcaacaggctggatgaccacaattaacggcaaggagctgaaggtggagggccagattacctactacaacagatacaagagacagaacgtagtcaaggacctgtccgtcgagctggatagactgagcgaagaatctgtgaacaacgacatctcctcctggacaaagggcagaagcggagaagctctgagcctcctgaagaaaagattctcccatagacccgtgcaggagaagttcgtgtgcctgaactgcggcttcgagacacacgcagccgagcaagccgccctgaacatcgccagatcctggctgttcctgcggagccaggagtacaagaaataccagacaaacaagacaaccggcaacaccgataagagagccttcgtcgagacctggcagtccttttaccggaagaagcttaaggaggtgtggaaacctgccgtgcggtctggcggatctggcggaggctccacaagcgcccaggtgctggtgaccttccaggacgtggccgtggacttcacccaggaggagtggaggctgctggaccccggccagaaggagctgtacaaggaggtgatgctggacaacgcccagaacatgctgttcctgggcctgcccgtgcccagggaggactggttcagccacttccacgagggcggcgccagctggatgctggagggcgaggaccccagcaacagcggcctggacggcgagaggaggaccagccccaagaaaaagagaaaagtctaagctgccttctgcggggcttgccttctggccatgcccttcttctctcccttgcacctgtacctcttggtctttgaataaagcctgagtaggaaggctagcaaaaaaaaaaaaaaaaaaaaaaaaaaaaaaaaaaaaaaaaaaaaaaaaaaaaaaaaaaaaaaaaaaaaaaaaaaaaaaaa

SEQ ID NO: 3102 - RNA, 5419 nt, synthetic construct
  source 1..5419: mol_type = other RNA
aggaaataagagagaaaagaagagtaagaagaaatataagagccaccatggcccctaagaagaagcgtaaagtgagccgggtgaacggcagcggcagcggcggcggcatgaaccacgaccaggagttcgacccccctaaggtgtaccctcccgtccccgccgagaagagaaagcccatccgggtcctgagcctgttcgatggcatcgccaccggtctgctggtgctgaaggacctgggcatccaggtggataggtacattgcctccgaggtgtgcgaggactccatcaccgtgggaatggtgcgtcatcagggcaagatcatgtacgtgggcgacgtgcggagcgtgacacagaagcatatccaggagtggggccctttcgacctggtgatcggcggcagcccttgcaatgacctgagcatcgtgaacccagcccggaagggcctgtacgagggaaccggcagactgttcttcgagttttacagactgctgcacgacgcccggcctaaggaaggcgacgaccggcccttcttttggctgttcgagaatgtggtggccatgggagtcagcgacaagcgggatattagccggttcctggagagcaaccccgtgatgatcgatgccaaggaagtgagcgccgcccaccgggccagatacttctggggcaatctgcctggcatgaacagacccctggccagcaccgtgaacgacaagctggagctgcaggagtgcctggagcacggccggatcgccaagttcagcaaggtgagaaccatcaccacccgaagcaacagcatcaaacaaggcaaggaccagcactttcctgtgttcatgaacgagaaggaggacatcctgtggtgtaccgagatggagagagtgttcgggttcccagtccactacacagatgtcagcaacatgtctagactggccagacagagactgctgggaagaagctggtccgtccctgtgatcagacacctgttcgcccctctgaaggagtacttcgcctgcgtgagcagcggcaacagcaacgccaacagccggggccccagcttctctagcggcctggtgccactgtccctgagagggagccacatgggccccatggagatctacaaaaccgtgagcgcctggaagcggcagcctgtgcgcgtgctgagcctgtttcggaatatcgataaagtcctgaaaagcctgggattcctggagagcggctctggctccggcggtggcaccctgaagtacgtggaggatgtgacaaacgtggtcagacgggatgtggagaagtggggccccttcgatctggtgtacggcagcacccaacccctgggcagctcttgtgaccggtgccctggctggtacatgtttcagttccaccggatcctgcagtacgccctgccgagacaggagtcccagcggccattcttttggattttcatggacaacttgctgctgaccgaggatgaccaggaaactaccactcggttcctgcagaccgaagccgtgaccctgcaggacgtgagaggccgggactaccagaacgccatgcgggtgtggtccaacatccctggactgaaaagcaagcacgcacctctgacccctaaagaagaggagtacctgcaggcccaggtgcggagcagaagcaagctggacgcccctaaggtggatctgctggtgaagaattgcctcctgcccctgagagagtacttcaagtatttcagccagaatagtctgcccctgggcggcccaagcagcggcgcccctcctcccagcggcggcagcccagccggctccccaacctctaccgaggagggcacctctgagtccgccacccccgagagcggccctggcacctccaccgagcccagcgagggcagcgcacccggcagccctgccggcagccccacctccacagaggagggaaccagcaccgagcccagcgaaggcagcgccccaggcaccagcaccgagcctagtgagggcggctctggcggcggcagcgcccaggagattaaacggatcaacaagatcagaagaagacttgtgaaagacagcaacaccaagaaggccggcaagacaggccccatgaaaaccctgctggttagagtgatgacacccgatctgagagagcggctggaaaacctgagaaagaagcctgaaaatatcccccagcccatcagcaatacatctagagccaacctgaataagctgctgaccgattacaccgaaatgaagaaggcgatcctgcatgtgtactgggaagagttccagaaggaccctgtgggcctgatgagccgggtggcccagcctgccagcaagaagatcgatcagaacaagctgaaacctgagatggacgagaagggcaacctgaccaccgccggctttgcctgctctcagtgtggccagcccctgttcgtgtacaagctggagcaggtgtctgagaagggcaaggcttacaccaactacttcggacggtgcaatgtggccgagcacgaaaagctgatcctgctggcccagctgaagcccgagaaggatagcgacgaagccgtgacatatagcctgggaaagtttgggcagagggccctggatttctacagcattcatgtgaccaaggagtccacccaccccgtgaagcccctggcccagatcgccggaaacagatacgcctccggacctgtgggaaaggccctgagcgacgcatgtatgggcacaatcgcctccttcctgtctaagtaccaggacatcatcatcgaacaccagaaggtggtgaagggcaaccagaagagactggagagcctgcgggagctggccggcaaggaaaacctggaataccctagcgtgaccctgccacctcagcctcacaccaaggagggcgttgatgcctacaacgaagtgatcgcccgggtgcgaatgtgggtgaacctgaacctgtggcagaagctgaagctaagcagagatgatgccaagcctctgctgagactgaagggattcccttcctttcctctggtcgagagacaggccaacgaagtggactggtgggacatggtgtgtaacgtgaagaagctgatcaacgagaaaaaggaggatggcaaggtgttttggcagaatctggctggctacaagagacaggaagccctgagaccatacctgagcagcgaggaagatcggaagaagggaaagaaattcgctcggtaccagctgggcgacctgctgctgcacctggaaaagaagcacggcgaggactggggaaaggtgtacgacgaggcctgggagcggattgacaagaaagtggaaggcctgagcaagcacatcaagctggaagaggaacggagaagcgaggacgcccagagcaaggccgccctgaccgactggctgcgggctaaggccagcttcgtgatcgagggcctgaaggaggccgacaaggacgagttctgcagatgcgagctgaagctgcagaagtggtacggggacctgcggggaaagcccttcgccatcgaagccgagaacagcatcctggacatcagcggcttcagcaagcagtacaactgtgccttcatctggcagaaggacggcgtgaagaagctgaacctgtacctgatcatcaactacttcaagggcggcaagctgcggttcaagaagatcaaacctgaagccttcgaagccaacagattctacaccgtgatcaacaaaaagagcggcgagatcgtgcccatggaggtgaacttcaacttcgacgaccccaacctgatcatcctgcctctggcctttggcaagagacagggcagagaattcatctggaacgacctgctgtccctggaaaccggcagcctgaagctggccaacggaagagtgatcgagaagacactgtacaacagaagaacccggcaggatgagcctgccctgttcgtggccctgaccttcgagcggcgggaggtcctggactcctccaatatcaaaccaatgaacctgatcggcgtggcaagaggcgaaaacatccccgccgtgatcgccctgaccgaccccgagggctgcccactgagccggtttaaggatagcctgggaaacccaacccacatcctgagaatcggcgagagctataaggagaagcagcggaccatccaggccaagaaggaggtggagcagcggagagccggcggctacagccggaagtacgccagcaaagccaagaatctggcagacgatatggtgagaaacaccgctagagatctgctgtactacgccgtgacccaggatgccatgctgatcttcgccaacctgagccggggcttcggccggcagggcaagcggaccttcatggccgagagacagtacacacggatggaggactggctgaccgccaagctggcctacgagggcctgagcaagacctacctgtccaagacactggcccagtacacctccaagacatgcagcaactgtgggtttaccatcaccagcgccgactacgacagggtgctggagaagctgaagaagacagcaacaggctggatgaccacaattaacggcaaggagctgaaggtggagggccagattacctactacaacagatacaagagacagaacgtagtcaaggacctgtccgtcgagctggatagactgagcgaagaatctgtgaacaacgacatctcctcctggacaaagggcagaagcggagaagctctgagcctcctgaagaaaagattctcccatagacccgtgcaggagaagttcgtgtgcctgaactgcggcttcgagacacacgcagccgagcaagccgccctgaacatcgccagatcctggctgttcctgcggagccaggagtacaagaaataccagacaaacaagacaaccggcaacaccgataagagagccttcgtcgagacctggcagtccttttaccggaagaagcttaaggaggtgtggaaacctgccgtgcggtctggcggatctggcggaggctccacaagcccccaggtgctggtgagcttcgaggacgtggccgtgttcctgagcagggaggagtggggctgcctgggccccgcccagaggggcctgtacagggacgtgatgctggagacctacaggaacctgatcagcctgggcttccaggacagcaagcccgacgtgatcagcaagctggagaagggcgaggagccctgggccccctacagccccaggatcgaggagggctggatctggagccacggcagcaccagccccaagaaaaagagaaaagtctaagctgccttctgcggggcttgccttctggccatgcccttcttctctcccttgcacctgtacctcttggtctttgaataaagcctgagtaggaaggctagcaaaaaaaaaaaaaaaaaaaaaaaaaaaaaaaaaaaaaaaaaaaaaaaaaaaaaaaaaaaaaaaaaaaaaaaaaaaaaaaa

SEQ ID NO: 3103 - RNA, 5419 nt, synthetic construct
  source 1..5419: mol_type = other RNA
aggaaataagagagaaaagaagagtaagaagaaatataagagccaccatggcccctaagaagaagcgtaaagtgagccgggtgaacggcagcggcagcggcggcggcatgaaccacgaccaggagttcgacccccctaaggtgtaccctcccgtccccgccgagaagagaaagcccatccgggtcctgagcctgttcgatggcatcgccaccggtctgctggtgctgaaggacctgggcatccaggtggataggtacattgcctccgaggtgtgcgaggactccatcaccgtgggaatggtgcgtcatcagggcaagatcatgtacgtgggcgacgtgcggagcgtgacacagaagcatatccaggagtggggccctttcgacctggtgatcggcggcagcccttgcaatgacctgagcatcgtgaacccagcccggaagggcctgtacgagggaaccggcagactgttcttcgagttttacagactgctgcacgacgcccggcctaaggaaggcgacgaccggcccttcttttggctgttcgagaatgtggtggccatgggagtcagcgacaagcgggatattagccggttcctggagagcaaccccgtgatgatcgatgccaaggaagtgagcgccgcccaccgggccagatacttctggggcaatctgcctggcatgaacagacccctggccagcaccgtgaacgacaagctggagctgcaggagtgcctggagcacggccggatcgccaagttcagcaaggtgagaaccatcaccacccgaagcaacagcatcaaacaaggcaaggaccagcactttcctgtgttcatgaacgagaaggaggacatcctgtggtgtaccgagatggagagagtgttcgggttcccagtccactacacagatgtcagcaacatgtctagactggccagacagagactgctgggaagaagctggtccgtccctgtgatcagacacctgttcgcccctctgaaggagtacttcgcctgcgtgagcagcggcaacagcaacgccaacagccggggccccagcttctctagcggcctggtgccactgtccctgagagggagccacatgggccccatggagatctacaaaaccgtgagcgcctggaagcggcagcctgtgcgcgtgctgagcctgtttcggaatatcgataaagtcctgaaaagcctgggattcctggagagcggctctggctccggcggtggcaccctgaagtacgtggaggatgtgacaaacgtggtcagacgggatgtggagaagtggggccccttcgatctggtgtacggcagcacccaacccctgggcagctcttgtgaccggtgccctggctggtacatgtttcagttccaccggatcctgcagtacgccctgccgagacaggagtcccagcggccattcttttggattttcatggacaacttgctgctgaccgaggatgaccaggaaactaccactcggttcctgcagaccgaagccgtgaccctgcaggacgtgagaggccgggactaccagaacgccatgcgggtgtggtccaacatccctggactgaaaagcaagcacgcacctctgacccctaaagaagaggagtacctgcaggcccaggtgcggagcagaagcaagctggacgcccctaaggtggatctgctggtgaagaattgcctcctgcccctgagagagtacttcaagtatttcagccagaatagtctgcccctgggcggcccaagcagcggcgcccctcctcccagcggcggcagcccagccggctccccaacctctaccgaggagggcacctctgagtccgccacccccgagagcggccctggcacctccaccgagcccagcgagggcagcgcacccggcagccctgccggcagccccacctccacagaggagggaaccagcaccgagcccagcgaaggcagcgccccaggcaccagcaccgagcctagtgagggcggctctggcggcggcagcgcccaggagattaaacggatcaacaagatcagaagaagacttgtgaaagacagcaacaccaagaaggccggcaagacaggccccatgaaaaccctgctggttagagtgatgacacccgatctgagagagcggctggaaaacctgagaaagaagcctgaaaatatcccccagcccatcagcaatacatctagagccaacctgaataagctgctgaccgattacaccgaaatgaagaaggcgatcctgcatgtgtactgggaagagttccagaaggaccctgtgggcctgatgagccgggtggcccagcctgccagcaagaagatcgatcagaacaagctgaaacctgagatggacgagaagggcaacctgaccaccgccggctttgcctgctctcagtgtggccagcccctgttcgtgtacaagctggagcaggtgtctgagaagggcaaggcttacaccaactacttcggacggtgcaatgtggccgagcacgaaaagctgatcctgctggcccagctgaagcccgagaaggatagcgacgaagccgtgacatatagcctgggaaagtttgggcagagggccctggatttctacagcattcatgtgaccaaggagtccacccaccccgtgaagcccctggcccagatcgccggaaacagatacgcctccggacctgtgggaaaggccctgagcgacgcatgtatgggcacaatcgcctccttcctgtctaagtaccaggacatcatcatcgaacaccagaaggtggtgaagggcaaccagaagagactggagagcctgcgggagctggccggcaaggaaaacctggaataccctagcgtgaccctgccacctcagcctcacaccaaggagggcgttgatgcctacaacgaagtgatcgcccgggtgcgaatgtgggtgaacctgaacctgtggcagaagctgaagctaagcagagatgatgccaagcctctgctgagactgaagggattcccttcctttcctctggtcgagagacaggccaacgaagtggactggtgggacatggtgtgtaacgtgaagaagctgatcaacgagaaaaaggaggatggcaaggtgttttggcagaatctggctggctacaagagacaggaagccctgagaccatacctgagcagcgaggaagatcggaagaagggaaagaaattcgctcggtaccagctgggcgacctgctgctgcacctggaaaagaagcacggcgaggactggggaaaggtgtacgacgaggcctgggagcggattgacaagaaagtggaaggcctgagcaagcacatcaagctggaagaggaacggagaagcgaggacgcccagagcaaggccgccctgaccgactggctgcgggctaaggccagcttcgtgatcgagggcctgaaggaggccgacaaggacgagttctgcagatgcgagctgaagctgcagaagtggtacggggacctgcggggaaagcccttcgccatcgaagccgagaacagcatcctggacatcagcggcttcagcaagcagtacaactgtgccttcatctggcagaaggacggcgtgaagaagctgaacctgtacctgatcatcaactacttcaagggcggcaagctgcggttcaagaagatcaaacctgaagccttcgaagccaacagattctacaccgtgatcaacaaaaagagcggcgagatcgtgcccatggaggtgaacttcaacttcgacgaccccaacctgatcatcctgcctctggcctttggcaagagacagggcagagaattcatctggaacgacctgctgtccctggaaaccggcagcctgaagctggccaacggaagagtgatcgagaagacactgtacaacagaagaacccggcaggatgagcctgccctgttcgtggccctgaccttcgagcggcgggaggtcctggactcctccaatatcaaaccaatgaacctgatcggcgtggcaagaggcgaaaacatccccgccgtgatcgccctgaccgaccccgagggctgcccactgagccggtttaaggatagcctgggaaacccaacccacatcctgagaatcggcgagagctataaggagaagcagcggaccatccaggccaagaaggaggtggagcagcggagagccggcggctacagccggaagtacgccagcaaagccaagaatctggcagacgatatggtgagaaacaccgctagagatctgctgtactacgccgtgacccaggatgccatgctgatcttcgccaacctgagccggggcttcggccggcagggcaagcggaccttcatggccgagagacagtacacacggatggaggactggctgaccgccaagctggcctacgagggcctgagcaagacctacctgtccaagacactggcccagtacacctccaagacatgcagcaactgtgggtttaccatcaccagcgccgactacgacagggtgctggagaagctgaagaagacagcaacaggctggatgaccacaattaacggcaaggagctgaaggtggagggccagattacctactacaacagatacaagagacagaacgtagtcaaggacctgtccgtcgagctggatagactgagcgaagaatctgtgaacaacgacatctcctcctggacaaagggcagaagcggagaagctctgagcctcctgaagaaaagattctcccatagacccgtgcaggagaagttcgtgtgcctgaactgcggcttcgagacacacgcagccgagcaagccgccctgaacatcgccagatcctggctgttcctgcggagccaggagtacaagaaataccagacaaacaagacaaccggcaacaccgataagagagccttcgtcgagacctggcagtccttttaccggaagaagcttaaggaggtgtggaaacctgccgtgcggtctggcggatctggcggaggctccacaagcgcccaggagagcatcaccctggaggacgtggccgtggacttcacctgggaggagtggcagctgctgggcgccgcccagaaggacctgtacagggacgtgatgctggagaactacagcaacctggtggccgtgggctaccaggccagcaagcccgacgccctgttcaagctggagcagggcgagcagccctggaccatcgaggacggcatccacagcggcgcctgcagcgacatctggaaggtgaccagccccaagaaaaagagaaaagtctaagctgccttctgcggggcttgccttctggccatgcccttcttctctcccttgcacctgtacctcttggtctttgaataaagcctgagtaggaaggctagcaaaaaaaaaaaaaaaaaaaaaaaaaaaaaaaaaaaaaaaaaaaaaaaaaaaaaaaaaaaaaaaaaaaaaaaaaaaaaaaa

SEQ ID NO: 3104 - RNA, 5419 nt, synthetic construct
  source 1..5419: mol_type = other RNA
aggaaataagagagaaaagaagagtaagaagaaatataagagccaccatggcccctaagaagaagcgtaaagtgagccgggtgaacggcagcggcagcggcggcggcatgaaccacgaccaggagttcgacccccctaaggtgtaccctcccgtccccgccgagaagagaaagcccatccgggtcctgagcctgttcgatggcatcgccaccggtctgctggtgctgaaggacctgggcatccaggtggataggtacattgcctccgaggtgtgcgaggactccatcaccgtgggaatggtgcgtcatcagggcaagatcatgtacgtgggcgacgtgcggagcgtgacacagaagcatatccaggagtggggccctttcgacctggtgatcggcggcagcccttgcaatgacctgagcatcgtgaacccagcccggaagggcctgtacgagggaaccggcagactgttcttcgagttttacagactgctgcacgacgcccggcctaaggaaggcgacgaccggcccttcttttggctgttcgagaatgtggtggccatgggagtcagcgacaagcgggatattagccggttcctggagagcaaccccgtgatgatcgatgccaaggaagtgagcgccgcccaccgggccagatacttctggggcaatctgcctggcatgaacagacccctggccagcaccgtgaacgacaagctggagctgcaggagtgcctggagcacggccggatcgccaagttcagcaaggtgagaaccatcaccacccgaagcaacagcatcaaacaaggcaaggaccagcactttcctgtgttcatgaacgagaaggaggacatcctgtggtgtaccgagatggagagagtgttcgggttcccagtccactacacagatgtcagcaacatgtctagactggccagacagagactgctgggaagaagctggtccgtccctgtgatcagacacctgttcgcccctctgaaggagtacttcgcctgcgtgagcagcggcaacagcaacgccaacagccggggccccagcttctctagcggcctggtgccactgtccctgagagggagccacatgggccccatggagatctacaaaaccgtgagcgcctggaagcggcagcctgtgcgcgtgctgagcctgtttcggaatatcgataaagtcctgaaaagcctgggattcctggagagcggctctggctccggcggtggcaccctgaagtacgtggaggatgtgacaaacgtggtcagacgggatgtggagaagtggggccccttcgatctggtgtacggcagcacccaacccctgggcagctcttgtgaccggtgccctggctggtacatgtttcagttccaccggatcctgcagtacgccctgccgagacaggagtcccagcggccattcttttggattttcatggacaacttgctgctgaccgaggatgaccaggaaactaccactcggttcctgcagaccgaagccgtgaccctgcaggacgtgagaggccgggactaccagaacgccatgcgggtgtggtccaacatccctggactgaaaagcaagcacgcacctctgacccctaaagaagaggagtacctgcaggcccaggtgcggagcagaagcaagctggacgcccctaaggtggatctgctggtgaagaattgcctcctgcccctgagagagtacttcaagtatttcagccagaatagtctgcccctgggcggcccaagcagcggcgcccctcctcccagcggcggcagcccagccggctccccaacctctaccgaggagggcacctctgagtccgccacccccgagagcggccctggcacctccaccgagcccagcgagggcagcgcacccggcagccctgccggcagccccacctccacagaggagggaaccagcaccgagcccagcgaaggcagcgccccaggcaccagcaccgagcctagtgagggcggctctggcggcggcagcgcccaggagattaaacggatcaacaagatcagaagaagacttgtgaaagacagcaacaccaagaaggccggcaagacaggccccatgaaaaccctgctggttagagtgatgacacccgatctgagagagcggctggaaaacctgagaaagaagcctgaaaatatcccccagcccatcagcaatacatctagagccaacctgaataagctgctgaccgattacaccgaaatgaagaaggcgatcctgcatgtgtactgggaagagttccagaaggaccctgtgggcctgatgagccgggtggcccagcctgccagcaagaagatcgatcagaacaagctgaaacctgagatggacgagaagggcaacctgaccaccgccggctttgcctgctctcagtgtggccagcccctgttcgtgtacaagctggagcaggtgtctgagaagggcaaggcttacaccaactacttcggacggtgcaatgtggccgagcacgaaaagctgatcctgctggcccagctgaagcccgagaaggatagcgacgaagccgtgacatatagcctgggaaagtttgggcagagggccctggatttctacagcattcatgtgaccaaggagtccacccaccccgtgaagcccctggcccagatcgccggaaacagatacgcctccggacctgtgggaaaggccctgagcgacgcatgtatgggcacaatcgcctccttcctgtctaagtaccaggacatcatcatcgaacaccagaaggtggtgaagggcaaccagaagagactggagagcctgcgggagctggccggcaaggaaaacctggaataccctagcgtgaccctgccacctcagcctcacaccaaggagggcgttgatgcctacaacgaagtgatcgcccgggtgcgaatgtgggtgaacctgaacctgtggcagaagctgaagctaagcagagatgatgccaagcctctgctgagactgaagggattcccttcctttcctctggtcgagagacaggccaacgaagtggactggtgggacatggtgtgtaacgtgaagaagctgatcaacgagaaaaaggaggatggcaaggtgttttggcagaatctggctggctacaagagacaggaagccctgagaccatacctgagcagcgaggaagatcggaagaagggaaagaaattcgctcggtaccagctgggcgacctgctgctgcacctggaaaagaagcacggcgaggactggggaaaggtgtacgacgaggcctgggagcggattgacaagaaagtggaaggcctgagcaagcacatcaagctggaagaggaacggagaagcgaggacgcccagagcaaggccgccctgaccgactggctgcgggctaaggccagcttcgtgatcgagggcctgaaggaggccgacaaggacgagttctgcagatgcgagctgaagctgcagaagtggtacggggacctgcggggaaagcccttcgccatcgaagccgagaacagcatcctggacatcagcggcttcagcaagcagtacaactgtgccttcatctggcagaaggacggcgtgaagaagctgaacctgtacctgatcatcaactacttcaagggcggcaagctgcggttcaagaagatcaaacctgaagccttcgaagccaacagattctacaccgtgatcaacaaaaagagcggcgagatcgtgcccatggaggtgaacttcaacttcgacgaccccaacctgatcatcctgcctctggcctttggcaagagacagggcagagaattcatctggaacgacctgctgtccctggaaaccggcagcctgaagctggccaacggaagagtgatcgagaagacactgtacaacagaagaacccggcaggatgagcctgccctgttcgtggccctgaccttcgagcggcgggaggtcctggactcctccaatatcaaaccaatgaacctgatcggcgtggcaagaggcgaaaacatccccgccgtgatcgccctgaccgaccccgagggctgcccactgagccggtttaaggatagcctgggaaacccaacccacatcctgagaatcggcgagagctataaggagaagcagcggaccatccaggccaagaaggaggtggagcagcggagagccggcggctacagccggaagtacgccagcaaagccaagaatctggcagacgatatggtgagaaacaccgctagagatctgctgtactacgccgtgacccaggatgccatgctgatcttcgccaacctgagccggggcttcggccggcagggcaagcggaccttcatggccgagagacagtacacacggatggaggactggctgaccgccaagctggcctacgagggcctgagcaagacctacctgtccaagacactggcccagtacacctccaagacatgcagcaactgtgggtttaccatcaccagcgccgactacgacagggtgctggagaagctgaagaagacagcaacaggctggatgaccacaattaacggcaaggagctgaaggtggagggccagattacctactacaacagatacaagagacagaacgtagtcaaggacctgtccgtcgagctggatagactgagcgaagaatctgtgaacaacgacatctcctcctggacaaagggcagaagcggagaagctctgagcctcctgaagaaaagattctcccatagacccgtgcaggagaagttcgtgtgcctgaactgcggcttcgagacacacgcagccgagcaagccgccctgaacatcgccagatcctggctgttcctgcggagccaggagtacaagaaataccagacaaacaagacaaccggcaacaccgataagagagccttcgtcgagacctggcagtccttttaccggaagaagcttaaggaggtgtggaaacctgccgtgcggtctggcggatctggcggaggctccacaagcgccaggggcaagagcaagagcaaggcccccgtgaccttcggcgacctggccatctacttcagccaggaggagtgggagtggctgagccccatccagaaggacctgtacgaggacgtgatgctggagaactacaggaacctggtgagcctgggcctgagcttcaggaggcccaacgtgatcaccctgctggagaagggcaaggccccctggatggtggagcccgtgaggaggaggagggcccccaccagccccaagaaaaagagaaaagtctaagctgccttctgcggggcttgccttctggccatgcccttcttctctcccttgcacctgtacctcttggtctttgaataaagcctgagtaggaaggctagcaaaaaaaaaaaaaaaaaaaaaaaaaaaaaaaaaaaaaaaaaaaaaaaaaaaaaaaaaaaaaaaaaaaaaaaaaaaaaaaa

SEQ ID NO: 3105 - RNA, 5419 nt, synthetic construct
  source 1..5419: mol_type = other RNA
aggaaataagagagaaaagaagagtaagaagaaatataagagccaccatggcccctaagaagaagcgtaaagtgagccgggtgaacggcagcggcagcggcggcggcatgaaccacgaccaggagttcgacccccctaaggtgtaccctcccgtccccgccgagaagagaaagcccatccgggtcctgagcctgttcgatggcatcgccaccggtctgctggtgctgaaggacctgggcatccaggtggataggtacattgcctccgaggtgtgcgaggactccatcaccgtgggaatggtgcgtcatcagggcaagatcatgtacgtgggcgacgtgcggagcgtgacacagaagcatatccaggagtggggccctttcgacctggtgatcggcggcagcccttgcaatgacctgagcatcgtgaacccagcccggaagggcctgtacgagggaaccggcagactgttcttcgagttttacagactgctgcacgacgcccggcctaaggaaggcgacgaccggcccttcttttggctgttcgagaatgtggtggccatgggagtcagcgacaagcgggatattagccggttcctggagagcaaccccgtgatgatcgatgccaaggaagtgagcgccgcccaccgggccagatacttctggggcaatctgcctggcatgaacagacccctggccagcaccgtgaacgacaagctggagctgcaggagtgcctggagcacggccggatcgccaagttcagcaaggtgagaaccatcaccacccgaagcaacagcatcaaacaaggcaaggaccagcactttcctgtgttcatgaacgagaaggaggacatcctgtggtgtaccgagatggagagagtgttcgggttcccagtccactacacagatgtcagcaacatgtctagactggccagacagagactgctgggaagaagctggtccgtccctgtgatcagacacctgttcgcccctctgaaggagtacttcgcctgcgtgagcagcggcaacagcaacgccaacagccggggccccagcttctctagcggcctggtgccactgtccctgagagggagccacatgggccccatggagatctacaaaaccgtgagcgcctggaagcggcagcctgtgcgcgtgctgagcctgtttcggaatatcgataaagtcctgaaaagcctgggattcctggagagcggctctggctccggcggtggcaccctgaagtacgtggaggatgtgacaaacgtggtcagacgggatgtggagaagtggggccccttcgatctggtgtacggcagcacccaacccctgggcagctcttgtgaccggtgccctggctggtacatgtttcagttccaccggatcctgcagtacgccctgccgagacaggagtcccagcggccattcttttggattttcatggacaacttgctgctgaccgaggatgaccaggaaactaccactcggttcctgcagaccgaagccgtgaccctgcaggacgtgagaggccgggactaccagaacgccatgcgggtgtggtccaacatccctggactgaaaagcaagcacgcacctctgacccctaaagaagaggagtacctgcaggcccaggtgcggagcagaagcaagctggacgcccctaaggtggatctgctggtgaagaattgcctcctgcccctgagagagtacttcaagtatttcagccagaatagtctgcccctgggcggcccaagcagcggcgcccctcctcccagcggcggcagcccagccggctccccaacctctaccgaggagggcacctctgagtccgccacccccgagagcggccctggcacctccaccgagcccagcgagggcagcgcacccggcagccctgccggcagccccacctccacagaggagggaaccagcaccgagcccagcgaaggcagcgccccaggcaccagcaccgagcctagtgagggcggctctggcggcggcagcgcccaggagattaaacggatcaacaagatcagaagaagacttgtgaaagacagcaacaccaagaaggccggcaagacaggccccatgaaaaccctgctggttagagtgatgacacccgatctgagagagcggctggaaaacctgagaaagaagcctgaaaatatcccccagcccatcagcaatacatctagagccaacctgaataagctgctgaccgattacaccgaaatgaagaaggcgatcctgcatgtgtactgggaagagttccagaaggaccctgtgggcctgatgagccgggtggcccagcctgccagcaagaagatcgatcagaacaagctgaaacctgagatggacgagaagggcaacctgaccaccgccggctttgcctgctctcagtgtggccagcccctgttcgtgtacaagctggagcaggtgtctgagaagggcaaggcttacaccaactacttcggacggtgcaatgtggccgagcacgaaaagctgatcctgctggcccagctgaagcccgagaaggatagcgacgaagccgtgacatatagcctgggaaagtttgggcagagggccctggatttctacagcattcatgtgaccaaggagtccacccaccccgtgaagcccctggcccagatcgccggaaacagatacgcctccggacctgtgggaaaggccctgagcgacgcatgtatgggcacaatcgcctccttcctgtctaagtaccaggacatcatcatcgaacaccagaaggtggtgaagggcaaccagaagagactggagagcctgcgggagctggccggcaaggaaaacctggaataccctagcgtgaccctgccacctcagcctcacaccaaggagggcgttgatgcctacaacgaagtgatcgcccgggtgcgaatgtgggtgaacctgaacctgtggcagaagctgaagctaagcagagatgatgccaagcctctgctgagactgaagggattcccttcctttcctctggtcgagagacaggccaacgaagtggactggtgggacatggtgtgtaacgtgaagaagctgatcaacgagaaaaaggaggatggcaaggtgttttggcagaatctggctggctacaagagacaggaagccctgagaccatacctgagcagcgaggaagatcggaagaagggaaagaaattcgctcggtaccagctgggcgacctgctgctgcacctggaaaagaagcacggcgaggactggggaaaggtgtacgacgaggcctgggagcggattgacaagaaagtggaaggcctgagcaagcacatcaagctggaagaggaacggagaagcgaggacgcccagagcaaggccgccctgaccgactggctgcgggctaaggccagcttcgtgatcgagggcctgaaggaggccgacaaggacgagttctgcagatgcgagctgaagctgcagaagtggtacggggacctgcggggaaagcccttcgccatcgaagccgagaacagcatcctggacatcagcggcttcagcaagcagtacaactgtgccttcatctggcagaaggacggcgtgaagaagctgaacctgtacctgatcatcaactacttcaagggcggcaagctgcggttcaagaagatcaaacctgaagccttcgaagccaacagattctacaccgtgatcaacaaaaagagcggcgagatcgtgcccatggaggtgaacttcaacttcgacgaccccaacctgatcatcctgcctctggcctttggcaagagacagggcagagaattcatctggaacgacctgctgtccctggaaaccggcagcctgaagctggccaacggaagagtgatcgagaagacactgtacaacagaagaacccggcaggatgagcctgccctgttcgtggccctgaccttcgagcggcgggaggtcctggactcctccaatatcaaaccaatgaacctgatcggcgtggcaagaggcgaaaacatccccgccgtgatcgccctgaccgaccccgagggctgcccactgagccggtttaaggatagcctgggaaacccaacccacatcctgagaatcggcgagagctataaggagaagcagcggaccatccaggccaagaaggaggtggagcagcggagagccggcggctacagccggaagtacgccagcaaagccaagaatctggcagacgatatggtgagaaacaccgctagagatctgctgtactacgccgtgacccaggatgccatgctgatcttcgccaacctgagccggggcttcggccggcagggcaagcggaccttcatggccgagagacagtacacacggatggaggactggctgaccgccaagctggcctacgagggcctgagcaagacctacctgtccaagacactggcccagtacacctccaagacatgcagcaactgtgggtttaccatcaccagcgccgactacgacagggtgctggagaagctgaagaagacagcaacaggctggatgaccacaattaacggcaaggagctgaaggtggagggccagattacctactacaacagatacaagagacagaacgtagtcaaggacctgtccgtcgagctggatagactgagcgaagaatctgtgaacaacgacatctcctcctggacaaagggcagaagcggagaagctctgagcctcctgaagaaaagattctcccatagacccgtgcaggagaagttcgtgtgcctgaactgcggcttcgagacacacgcagccgagcaagccgccctgaacatcgccagatcctggctgttcctgcggagccaggagtacaagaaataccagacaaacaagacaaccggcaacaccgataagagagccttcgtcgagacctggcagtccttttaccggaagaagcttaaggaggtgtggaaacctgccgtgcggtctggcggatctggcggaggctccacaagcatggtgcaggagagcgtgaccttcaaggacgtggccgtgctgttcacccaggaggagtggggccagctgagccccgcccagagggccctgtacagggacgtgatgctggagaactacagcaacctggtgagcctgggcctgctgggccccaagcccgacatgttcagccagctggagaagagggaggtgtggatgcccgaggacacccccggcggcttctgcctggactggatgaccatgcccaccagccccaagaaaaagagaaaagtctaagctgccttctgcggggcttgccttctggccatgcccttcttctctcccttgcacctgtacctcttggtctttgaataaagcctgagtaggaaggctagcaaaaaaaaaaaaaaaaaaaaaaaaaaaaaaaaaaaaaaaaaaaaaaaaaaaaaaaaaaaaaaaaaaaaaaaaaaaaaaaa

SEQ ID NO: 3106 - RNA, 5419 nt, synthetic construct
  source 1..5419: mol_type = other RNA
aggaaataagagagaaaagaagagtaagaagaaatataagagccaccatggcccctaagaagaagcgtaaagtgagccgggtgaacggcagcggcagcggcggcggcatgaaccacgaccaggagttcgacccccctaaggtgtaccctcccgtccccgccgagaagagaaagcccatccgggtcctgagcctgttcgatggcatcgccaccggtctgctggtgctgaaggacctgggcatccaggtggataggtacattgcctccgaggtgtgcgaggactccatcaccgtgggaatggtgcgtcatcagggcaagatcatgtacgtgggcgacgtgcggagcgtgacacagaagcatatccaggagtggggccctttcgacctggtgatcggcggcagcccttgcaatgacctgagcatcgtgaacccagcccggaagggcctgtacgagggaaccggcagactgttcttcgagttttacagactgctgcacgacgcccggcctaaggaaggcgacgaccggcccttcttttggctgttcgagaatgtggtggccatgggagtcagcgacaagcgggatattagccggttcctggagagcaaccccgtgatgatcgatgccaaggaagtgagcgccgcccaccgggccagatacttctggggcaatctgcctggcatgaacagacccctggccagcaccgtgaacgacaagctggagctgcaggagtgcctggagcacggccggatcgccaagttcagcaaggtgagaaccatcaccacccgaagcaacagcatcaaacaaggcaaggaccagcactttcctgtgttcatgaacgagaaggaggacatcctgtggtgtaccgagatggagagagtgttcgggttcccagtccactacacagatgtcagcaacatgtctagactggccagacagagactgctgggaagaagctggtccgtccctgtgatcagacacctgttcgcccctctgaaggagtacttcgcctgcgtgagcagcggcaacagcaacgccaacagccggggccccagcttctctagcggcctggtgccactgtccctgagagggagccacatgggccccatggagatctacaaaaccgtgagcgcctggaagcggcagcctgtgcgcgtgctgagcctgtttcggaatatcgataaagtcctgaaaagcctgggattcctggagagcggctctggctccggcggtggcaccctgaagtacgtggaggatgtgacaaacgtggtcagacgggatgtggagaagtggggccccttcgatctggtgtacggcagcacccaacccctgggcagctcttgtgaccggtgccctggctggtacatgtttcagttccaccggatcctgcagtacgccctgccgagacaggagtcccagcggccattcttttggattttcatggacaacttgctgctgaccgaggatgaccaggaaactaccactcggttcctgcagaccgaagccgtgaccctgcaggacgtgagaggccgggactaccagaacgccatgcgggtgtggtccaacatccctggactgaaaagcaagcacgcacctctgacccctaaagaagaggagtacctgcaggcccaggtgcggagcagaagcaagctggacgcccctaaggtggatctgctggtgaagaattgcctcctgcccctgagagagtacttcaagtatttcagccagaatagtctgcccctgggcggcccaagcagcggcgcccctcctcccagcggcggcagcccagccggctccccaacctctaccgaggagggcacctctgagtccgccacccccgagagcggccctggcacctccaccgagcccagcgagggcagcgcacccggcagccctgccggcagccccacctccacagaggagggaaccagcaccgagcccagcgaaggcagcgccccaggcaccagcaccgagcctagtgagggcggctctggcggcggcagcgcccaggagattaaacggatcaacaagatcagaagaagacttgtgaaagacagcaacaccaagaaggccggcaagacaggccccatgaaaaccctgctggttagagtgatgacacccgatctgagagagcggctggaaaacctgagaaagaagcctgaaaatatcccccagcccatcagcaatacatctagagccaacctgaataagctgctgaccgattacaccgaaatgaagaaggcgatcctgcatgtgtactgggaagagttccagaaggaccctgtgggcctgatgagccgggtggcccagcctgccagcaagaagatcgatcagaacaagctgaaacctgagatggacgagaagggcaacctgaccaccgccggctttgcctgctctcagtgtggccagcccctgttcgtgtacaagctggagcaggtgtctgagaagggcaaggcttacaccaactacttcggacggtgcaatgtggccgagcacgaaaagctgatcctgctggcccagctgaagcccgagaaggatagcgacgaagccgtgacatatagcctgggaaagtttgggcagagggccctggatttctacagcattcatgtgaccaaggagtccacccaccccgtgaagcccctggcccagatcgccggaaacagatacgcctccggacctgtgggaaaggccctgagcgacgcatgtatgggcacaatcgcctccttcctgtctaagtaccaggacatcatcatcgaacaccagaaggtggtgaagggcaaccagaagagactggagagcctgcgggagctggccggcaaggaaaacctggaataccctagcgtgaccctgccacctcagcctcacaccaaggagggcgttgatgcctacaacgaagtgatcgcccgggtgcgaatgtgggtgaacctgaacctgtggcagaagctgaagctaagcagagatgatgccaagcctctgctgagactgaagggattcccttcctttcctctggtcgagagacaggccaacgaagtggactggtgggacatggtgtgtaacgtgaagaagctgatcaacgagaaaaaggaggatggcaaggtgttttggcagaatctggctggctacaagagacaggaagccctgagaccatacctgagcagcgaggaagatcggaagaagggaaagaaattcgctcggtaccagctgggcgacctgctgctgcacctggaaaagaagcacggcgaggactggggaaaggtgtacgacgaggcctgggagcggattgacaagaaagtggaaggcctgagcaagcacatcaagctggaagaggaacggagaagcgaggacgcccagagcaaggccgccctgaccgactggctgcgggctaaggccagcttcgtgatcgagggcctgaaggaggccgacaaggacgagttctgcagatgcgagctgaagctgcagaagtggtacggggacctgcggggaaagcccttcgccatcgaagccgagaacagcatcctggacatcagcggcttcagcaagcagtacaactgtgccttcatctggcagaaggacggcgtgaagaagctgaacctgtacctgatcatcaactacttcaagggcggcaagctgcggttcaagaagatcaaacctgaagccttcgaagccaacagattctacaccgtgatcaacaaaaagagcggcgagatcgtgcccatggaggtgaacttcaacttcgacgaccccaacctgatcatcctgcctctggcctttggcaagagacagggcagagaattcatctggaacgacctgctgtccctggaaaccggcagcctgaagctggccaacggaagagtgatcgagaagacactgtacaacagaagaacccggcaggatgagcctgccctgttcgtggccctgaccttcgagcggcgggaggtcctggactcctccaatatcaaaccaatgaacctgatcggcgtggcaagaggcgaaaacatccccgccgtgatcgccctgaccgaccccgagggctgcccactgagccggtttaaggatagcctgggaaacccaacccacatcctgagaatcggcgagagctataaggagaagcagcggaccatccaggccaagaaggaggtggagcagcggagagccggcggctacagccggaagtacgccagcaaagccaagaatctggcagacgatatggtgagaaacaccgctagagatctgctgtactacgccgtgacccaggatgccatgctgatcttcgccaacctgagccggggcttcggccggcagggcaagcggaccttcatggccgagagacagtacacacggatggaggactggctgaccgccaagctggcctacgagggcctgagcaagacctacctgtccaagacactggcccagtacacctccaagacatgcagcaactgtgggtttaccatcaccagcgccgactacgacagggtgctggagaagctgaagaagacagcaacaggctggatgaccacaattaacggcaaggagctgaaggtggagggccagattacctactacaacagatacaagagacagaacgtagtcaaggacctgtccgtcgagctggatagactgagcgaagaatctgtgaacaacgacatctcctcctggacaaagggcagaagcggagaagctctgagcctcctgaagaaaagattctcccatagacccgtgcaggagaagttcgtgtgcctgaactgcggcttcgagacacacgcagccgagcaagccgccctgaacatcgccagatcctggctgttcctgcggagccaggagtacaagaaataccagacaaacaagacaaccggcaacaccgataagagagccttcgtcgagacctggcagtccttttaccggaagaagcttaaggaggtgtggaaacctgccgtgcggtctggcggatctggcggaggctccacaagcaccagcgagcccgtgagcttcgccgacgtggccgtgtacttcagccaggaggagtggggctgcctgcagcccgcccagagggccctgtacagggacgtgatgagggagacctacggccacctgggcgccctgggcttcaggggcaccaagcccgccctgatcagctgggtggaggaggaggccgagctgtggggccccgacgccggcccccccgagatgggcgagtgcctgaccgaggccgacaccagccccaagaaaaagagaaaagtctaagctgccttctgcggggcttgccttctggccatgcccttcttctctcccttgcacctgtacctcttggtctttgaataaagcctgagtaggaaggctagcaaaaaaaaaaaaaaaaaaaaaaaaaaaaaaaaaaaaaaaaaaaaaaaaaaaaaaaaaaaaaaaaaaaaaaaaaaaaaaaa

SEQ ID NO: 3107 - RNA, 5419 nt, synthetic construct
  source 1..5419: mol_type = other RNA
aggaaataagagagaaaagaagagtaagaagaaatataagagccaccatggcccctaagaagaagcgtaaagtgagccgggtgaacggcagcggcagcggcggcggcatgaaccacgaccaggagttcgacccccctaaggtgtaccctcccgtccccgccgagaagagaaagcccatccgggtcctgagcctgttcgatggcatcgccaccggtctgctggtgctgaaggacctgggcatccaggtggataggtacattgcctccgaggtgtgcgaggactccatcaccgtgggaatggtgcgtcatcagggcaagatcatgtacgtgggcgacgtgcggagcgtgacacagaagcatatccaggagtggggccctttcgacctggtgatcggcggcagcccttgcaatgacctgagcatcgtgaacccagcccggaagggcctgtacgagggaaccggcagactgttcttcgagttttacagactgctgcacgacgcccggcctaaggaaggcgacgaccggcccttcttttggctgttcgagaatgtggtggccatgggagtcagcgacaagcgggatattagccggttcctggagagcaaccccgtgatgatcgatgccaaggaagtgagcgccgcccaccgggccagatacttctggggcaatctgcctggcatgaacagacccctggccagcaccgtgaacgacaagctggagctgcaggagtgcctggagcacggccggatcgccaagttcagcaaggtgagaaccatcaccacccgaagcaacagcatcaaacaaggcaaggaccagcactttcctgtgttcatgaacgagaaggaggacatcctgtggtgtaccgagatggagagagtgttcgggttcccagtccactacacagatgtcagcaacatgtctagactggccagacagagactgctgggaagaagctggtccgtccctgtgatcagacacctgttcgcccctctgaaggagtacttcgcctgcgtgagcagcggcaacagcaacgccaacagccggggccccagcttctctagcggcctggtgccactgtccctgagagggagccacatgggccccatggagatctacaaaaccgtgagcgcctggaagcggcagcctgtgcgcgtgctgagcctgtttcggaatatcgataaagtcctgaaaagcctgggattcctggagagcggctctggctccggcggtggcaccctgaagtacgtggaggatgtgacaaacgtggtcagacgggatgtggagaagtggggccccttcgatctggtgtacggcagcacccaacccctgggcagctcttgtgaccggtgccctggctggtacatgtttcagttccaccggatcctgcagtacgccctgccgagacaggagtcccagcggccattcttttggattttcatggacaacttgctgctgaccgaggatgaccaggaaactaccactcggttcctgcagaccgaagccgtgaccctgcaggacgtgagaggccgggactaccagaacgccatgcgggtgtggtccaacatccctggactgaaaagcaagcacgcacctctgacccctaaagaagaggagtacctgcaggcccaggtgcggagcagaagcaagctggacgcccctaaggtggatctgctggtgaagaattgcctcctgcccctgagagagtacttcaagtatttcagccagaatagtctgcccctgggcggcccaagcagcggcgcccctcctcccagcggcggcagcccagccggctccccaacctctaccgaggagggcacctctgagtccgccacccccgagagcggccctggcacctccaccgagcccagcgagggcagcgcacccggcagccctgccggcagccccacctccacagaggagggaaccagcaccgagcccagcgaaggcagcgccccaggcaccagcaccgagcctagtgagggcggctctggcggcggcagcgcccaggagattaaacggatcaacaagatcagaagaagacttgtgaaagacagcaacaccaagaaggccggcaagacaggccccatgaaaaccctgctggttagagtgatgacacccgatctgagagagcggctggaaaacctgagaaagaagcctgaaaatatcccccagcccatcagcaatacatctagagccaacctgaataagctgctgaccgattacaccgaaatgaagaaggcgatcctgcatgtgtactgggaagagttccagaaggaccctgtgggcctgatgagccgggtggcccagcctgccagcaagaagatcgatcagaacaagctgaaacctgagatggacgagaagggcaacctgaccaccgccggctttgcctgctctcagtgtggccagcccctgttcgtgtacaagctggagcaggtgtctgagaagggcaaggcttacaccaactacttcggacggtgcaatgtggccgagcacgaaaagctgatcctgctggcccagctgaagcccgagaaggatagcgacgaagccgtgacatatagcctgggaaagtttgggcagagggccctggatttctacagcattcatgtgaccaaggagtccacccaccccgtgaagcccctggcccagatcgccggaaacagatacgcctccggacctgtgggaaaggccctgagcgacgcatgtatgggcacaatcgcctccttcctgtctaagtaccaggacatcatcatcgaacaccagaaggtggtgaagggcaaccagaagagactggagagcctgcgggagctggccggcaaggaaaacctggaataccctagcgtgaccctgccacctcagcctcacaccaaggagggcgttgatgcctacaacgaagtgatcgcccgggtgcgaatgtgggtgaacctgaacctgtggcagaagctgaagctaagcagagatgatgccaagcctctgctgagactgaagggattcccttcctttcctctggtcgagagacaggccaacgaagtggactggtgggacatggtgtgtaacgtgaagaagctgatcaacgagaaaaaggaggatggcaaggtgttttggcagaatctggctggctacaagagacaggaagccctgagaccatacctgagcagcgaggaagatcggaagaagggaaagaaattcgctcggtaccagctgggcgacctgctgctgcacctggaaaagaagcacggcgaggactggggaaaggtgtacgacgaggcctgggagcggattgacaagaaagtggaaggcctgagcaagcacatcaagctggaagaggaacggagaagcgaggacgcccagagcaaggccgccctgaccgactggctgcgggctaaggccagcttcgtgatcgagggcctgaaggaggccgacaaggacgagttctgcagatgcgagctgaagctgcagaagtggtacggggacctgcggggaaagcccttcgccatcgaagccgagaacagcatcctggacatcagcggcttcagcaagcagtacaactgtgccttcatctggcagaaggacggcgtgaagaagctgaacctgtacctgatcatcaactacttcaagggcggcaagctgcggttcaagaagatcaaacctgaagccttcgaagccaacagattctacaccgtgatcaacaaaaagagcggcgagatcgtgcccatggaggtgaacttcaacttcgacgaccccaacctgatcatcctgcctctggcctttggcaagagacagggcagagaattcatctggaacgacctgctgtccctggaaaccggcagcctgaagctggccaacggaagagtgatcgagaagacactgtacaacagaagaacccggcaggatgagcctgccctgttcgtggccctgaccttcgagcggcgggaggtcctggactcctccaatatcaaaccaatgaacctgatcggcgtggcaagaggcgaaaacatccccgccgtgatcgccctgaccgaccccgagggctgcccactgagccggtttaaggatagcctgggaaacccaacccacatcctgagaatcggcgagagctataaggagaagcagcggaccatccaggccaagaaggaggtggagcagcggagagccggcggctacagccggaagtacgccagcaaagccaagaatctggcagacgatatggtgagaaacaccgctagagatctgctgtactacgccgtgacccaggatgccatgctgatcttcgccaacctgagccggggcttcggccggcagggcaagcggaccttcatggccgagagacagtacacacggatggaggactggctgaccgccaagctggcctacgagggcctgagcaagacctacctgtccaagacactggcccagtacacctccaagacatgcagcaactgtgggtttaccatcaccagcgccgactacgacagggtgctggagaagctgaagaagacagcaacaggctggatgaccacaattaacggcaaggagctgaaggtggagggccagattacctactacaacagatacaagagacagaacgtagtcaaggacctgtccgtcgagctggatagactgagcgaagaatctgtgaacaacgacatctcctcctggacaaagggcagaagcggagaagctctgagcctcctgaagaaaagattctcccatagacccgtgcaggagaagttcgtgtgcctgaactgcggcttcgagacacacgcagccgagcaagccgccctgaacatcgccagatcctggctgttcctgcggagccaggagtacaagaaataccagacaaacaagacaaccggcaacaccgataagagagccttcgtcgagacctggcagtccttttaccggaagaagcttaaggaggtgtggaaacctgccgtgcggtctggcggatctggcggaggctccacaagcgcccagaccctgctgaccttcagggacgtggccatcgagttcagcctggaggagtggaagtgcctggacctggcccagcagaacctgtacagggacgtgatgctggagaactacaggaacctgttcagcgtgggcctgaccgtgagcaagcccggcctgatcacctgcctggagcagaggaaggagccctggaacgtgaagaggcaggaggccgccgacggccaccccgccatgagcagctgcaccagccccaagaaaaagagaaaagtctaagctgccttctgcggggcttgccttctggccatgcccttcttctctcccttgcacctgtacctcttggtctttgaataaagcctgagtaggaaggctagcaaaaaaaaaaaaaaaaaaaaaaaaaaaaaaaaaaaaaaaaaaaaaaaaaaaaaaaaaaaaaaaaaaaaaaaaaaaaaaaa

SEQ ID NO: 3108 - RNA, 5419 nt, synthetic construct
  source 1..5419: mol_type = other RNA
aggaaataagagagaaaagaagagtaagaagaaatataagagccaccatggcccctaagaagaagcgtaaagtgagccgggtgaacggcagcggcagcggcggcggcatgaaccacgaccaggagttcgacccccctaaggtgtaccctcccgtccccgccgagaagagaaagcccatccgggtcctgagcctgttcgatggcatcgccaccggtctgctggtgctgaaggacctgggcatccaggtggataggtacattgcctccgaggtgtgcgaggactccatcaccgtgggaatggtgcgtcatcagggcaagatcatgtacgtgggcgacgtgcggagcgtgacacagaagcatatccaggagtggggccctttcgacctggtgatcggcggcagcccttgcaatgacctgagcatcgtgaacccagcccggaagggcctgtacgagggaaccggcagactgttcttcgagttttacagactgctgcacgacgcccggcctaaggaaggcgacgaccggcccttcttttggctgttcgagaatgtggtggccatgggagtcagcgacaagcgggatattagccggttcctggagagcaaccccgtgatgatcgatgccaaggaagtgagcgccgcccaccgggccagatacttctggggcaatctgcctggcatgaacagacccctggccagcaccgtgaacgacaagctggagctgcaggagtgcctggagcacggccggatcgccaagttcagcaaggtgagaaccatcaccacccgaagcaacagcatcaaacaaggcaaggaccagcactttcctgtgttcatgaacgagaaggaggacatcctgtggtgtaccgagatggagagagtgttcgggttcccagtccactacacagatgtcagcaacatgtctagactggccagacagagactgctgggaagaagctggtccgtccctgtgatcagacacctgttcgcccctctgaaggagtacttcgcctgcgtgagcagcggcaacagcaacgccaacagccggggccccagcttctctagcggcctggtgccactgtccctgagagggagccacatgggccccatggagatctacaaaaccgtgagcgcctggaagcggcagcctgtgcgcgtgctgagcctgtttcggaatatcgataaagtcctgaaaagcctgggattcctggagagcggctctggctccggcggtggcaccctgaagtacgtggaggatgtgacaaacgtggtcagacgggatgtggagaagtggggccccttcgatctggtgtacggcagcacccaacccctgggcagctcttgtgaccggtgccctggctggtacatgtttcagttccaccggatcctgcagtacgccctgccgagacaggagtcccagcggccattcttttggattttcatggacaacttgctgctgaccgaggatgaccaggaaactaccactcggttcctgcagaccgaagccgtgaccctgcaggacgtgagaggccgggactaccagaacgccatgcgggtgtggtccaacatccctggactgaaaagcaagcacgcacctctgacccctaaagaagaggagtacctgcaggcccaggtgcggagcagaagcaagctggacgcccctaaggtggatctgctggtgaagaattgcctcctgcccctgagagagtacttcaagtatttcagccagaatagtctgcccctgggcggcccaagcagcggcgcccctcctcccagcggcggcagcccagccggctccccaacctctaccgaggagggcacctctgagtccgccacccccgagagcggccctggcacctccaccgagcccagcgagggcagcgcacccggcagccctgccggcagccccacctccacagaggagggaaccagcaccgagcccagcgaaggcagcgccccaggcaccagcaccgagcctagtgagggcggctctggcggcggcagcgcccaggagattaaacggatcaacaagatcagaagaagacttgtgaaagacagcaacaccaagaaggccggcaagacaggccccatgaaaaccctgctggttagagtgatgacacccgatctgagagagcggctggaaaacctgagaaagaagcctgaaaatatcccccagcccatcagcaatacatctagagccaacctgaataagctgctgaccgattacaccgaaatgaagaaggcgatcctgcatgtgtactgggaagagttccagaaggaccctgtgggcctgatgagccgggtggcccagcctgccagcaagaagatcgatcagaacaagctgaaacctgagatggacgagaagggcaacctgaccaccgccggctttgcctgctctcagtgtggccagcccctgttcgtgtacaagctggagcaggtgtctgagaagggcaaggcttacaccaactacttcggacggtgcaatgtggccgagcacgaaaagctgatcctgctggcccagctgaagcccgagaaggatagcgacgaagccgtgacatatagcctgggaaagtttgggcagagggccctggatttctacagcattcatgtgaccaaggagtccacccaccccgtgaagcccctggcccagatcgccggaaacagatacgcctccggacctgtgggaaaggccctgagcgacgcatgtatgggcacaatcgcctccttcctgtctaagtaccaggacatcatcatcgaacaccagaaggtggtgaagggcaaccagaagagactggagagcctgcgggagctggccggcaaggaaaacctggaataccctagcgtgaccctgccacctcagcctcacaccaaggagggcgttgatgcctacaacgaagtgatcgcccgggtgcgaatgtgggtgaacctgaacctgtggcagaagctgaagctaagcagagatgatgccaagcctctgctgagactgaagggattcccttcctttcctctggtcgagagacaggccaacgaagtggactggtgggacatggtgtgtaacgtgaagaagctgatcaacgagaaaaaggaggatggcaaggtgttttggcagaatctggctggctacaagagacaggaagccctgagaccatacctgagcagcgaggaagatcggaagaagggaaagaaattcgctcggtaccagctgggcgacctgctgctgcacctggaaaagaagcacggcgaggactggggaaaggtgtacgacgaggcctgggagcggattgacaagaaagtggaaggcctgagcaagcacatcaagctggaagaggaacggagaagcgaggacgcccagagcaaggccgccctgaccgactggctgcgggctaaggccagcttcgtgatcgagggcctgaaggaggccgacaaggacgagttctgcagatgcgagctgaagctgcagaagtggtacggggacctgcggggaaagcccttcgccatcgaagccgagaacagcatcctggacatcagcggcttcagcaagcagtacaactgtgccttcatctggcagaaggacggcgtgaagaagctgaacctgtacctgatcatcaactacttcaagggcggcaagctgcggttcaagaagatcaaacctgaagccttcgaagccaacagattctacaccgtgatcaacaaaaagagcggcgagatcgtgcccatggaggtgaacttcaacttcgacgaccccaacctgatcatcctgcctctggcctttggcaagagacagggcagagaattcatctggaacgacctgctgtccctggaaaccggcagcctgaagctggccaacggaagagtgatcgagaagacactgtacaacagaagaacccggcaggatgagcctgccctgttcgtggccctgaccttcgagcggcgggaggtcctggactcctccaatatcaaaccaatgaacctgatcggcgtggcaagaggcgaaaacatccccgccgtgatcgccctgaccgaccccgagggctgcccactgagccggtttaaggatagcctgggaaacccaacccacatcctgagaatcggcgagagctataaggagaagcagcggaccatccaggccaagaaggaggtggagcagcggagagccggcggctacagccggaagtacgccagcaaagccaagaatctggcagacgatatggtgagaaacaccgctagagatctgctgtactacgccgtgacccaggatgccatgctgatcttcgccaacctgagccggggcttcggccggcagggcaagcggaccttcatggccgagagacagtacacacggatggaggactggctgaccgccaagctggcctacgagggcctgagcaagacctacctgtccaagacactggcccagtacacctccaagacatgcagcaactgtgggtttaccatcaccagcgccgactacgacagggtgctggagaagctgaagaagacagcaacaggctggatgaccacaattaacggcaaggagctgaaggtggagggccagattacctactacaacagatacaagagacagaacgtagtcaaggacctgtccgtcgagctggatagactgagcgaagaatctgtgaacaacgacatctcctcctggacaaagggcagaagcggagaagctctgagcctcctgaagaaaagattctcccatagacccgtgcaggagaagttcgtgtgcctgaactgcggcttcgagacacacgcagccgagcaagccgccctgaacatcgccagatcctggctgttcctgcggagccaggagtacaagaaataccagacaaacaagacaaccggcaacaccgataagagagccttcgtcgagacctggcagtccttttaccggaagaagcttaaggaggtgtggaaacctgccgtgcggtctggcggatctggcggaggctccacaagctgccaggagcccgtgagcttcgcccaggtggccgtgtacttcagcagggaggagtgggccctgctggaccccgcccagagggccctgtacagggacgtgatgctggagacctaccagtgcgtggccagcctggcccccctgcccgcccccaagcccgtgctgatcagccagctggagggcgaggaggacccctgcatcagcgacgtgaggagccccgaggccgtgcccggcgacctgagccccaccagccccaagaaaaagagaaaagtctaagctgccttctgcggggcttgccttctggccatgcccttcttctctcccttgcacctgtacctcttggtctttgaataaagcctgagtaggaaggctagcaaaaaaaaaaaaaaaaaaaaaaaaaaaaaaaaaaaaaaaaaaaaaaaaaaaaaaaaaaaaaaaaaaaaaaaaaaaaaaaa

SEQ ID NO: 3109 - RNA, 5452 nt, synthetic construct
  source 1..5452: mol_type = other RNA
aggaaataagagagaaaagaagagtaagaagaaatataagagccaccatggcccctaagaagaagcgtaaagtgagccgggtgaacggcagcggcagcggcggcggcatgaaccacgaccaggagttcgacccccctaaggtgtaccctcccgtccccgccgagaagagaaagcccatccgggtcctgagcctgttcgatggcatcgccaccggtctgctggtgctgaaggacctgggcatccaggtggataggtacattgcctccgaggtgtgcgaggactccatcaccgtgggaatggtgcgtcatcagggcaagatcatgtacgtgggcgacgtgcggagcgtgacacagaagcatatccaggagtggggccctttcgacctggtgatcggcggcagcccttgcaatgacctgagcatcgtgaacccagcccggaagggcctgtacgagggaaccggcagactgttcttcgagttttacagactgctgcacgacgcccggcctaaggaaggcgacgaccggcccttcttttggctgttcgagaatgtggtggccatgggagtcagcgacaagcgggatattagccggttcctggagagcaaccccgtgatgatcgatgccaaggaagtgagcgccgcccaccgggccagatacttctggggcaatctgcctggcatgaacagacccctggccagcaccgtgaacgacaagctggagctgcaggagtgcctggagcacggccggatcgccaagttcagcaaggtgagaaccatcaccacccgaagcaacagcatcaaacaaggcaaggaccagcactttcctgtgttcatgaacgagaaggaggacatcctgtggtgtaccgagatggagagagtgttcgggttcccagtccactacacagatgtcagcaacatgtctagactggccagacagagactgctgggaagaagctggtccgtccctgtgatcagacacctgttcgcccctctgaaggagtacttcgcctgcgtgagcagcggcaacagcaacgccaacagccggggccccagcttctctagcggcctggtgccactgtccctgagagggagccacatgggccccatggagatctacaaaaccgtgagcgcctggaagcggcagcctgtgcgcgtgctgagcctgtttcggaatatcgataaagtcctgaaaagcctgggattcctggagagcggctctggctccggcggtggcaccctgaagtacgtggaggatgtgacaaacgtggtcagacgggatgtggagaagtggggccccttcgatctggtgtacggcagcacccaacccctgggcagctcttgtgaccggtgccctggctggtacatgtttcagttccaccggatcctgcagtacgccctgccgagacaggagtcccagcggccattcttttggattttcatggacaacttgctgctgaccgaggatgaccaggaaactaccactcggttcctgcagaccgaagccgtgaccctgcaggacgtgagaggccgggactaccagaacgccatgcgggtgtggtccaacatccctggactgaaaagcaagcacgcacctctgacccctaaagaagaggagtacctgcaggcccaggtgcggagcagaagcaagctggacgcccctaaggtggatctgctggtgaagaattgcctcctgcccctgagagagtacttcaagtatttcagccagaatagtctgcccctgggcggcccaagcagcggcgcccctcctcccagcggcggcagcccagccggctccccaacctctaccgaggagggcacctctgagtccgccacccccgagagcggccctggcacctccaccgagcccagcgagggcagcgcacccggcagccctgccggcagccccacctccacagaggagggaaccagcaccgagcccagcgaaggcagcgccccaggcaccagcaccgagcctagtgagggcggctctggcggcggcagcgcccaggagattaaacggatcaacaagatcagaagaagacttgtgaaagacagcaacaccaagaaggccggcaagacaggccccatgaaaaccctgctggttagagtgatgacacccgatctgagagagcggctggaaaacctgagaaagaagcctgaaaatatcccccagcccatcagcaatacatctagagccaacctgaataagctgctgaccgattacaccgaaatgaagaaggcgatcctgcatgtgtactgggaagagttccagaaggaccctgtgggcctgatgagccgggtggcccagcctgccagcaagaagatcgatcagaacaagctgaaacctgagatggacgagaagggcaacctgaccaccgccggctttgcctgctctcagtgtggccagcccctgttcgtgtacaagctggagcaggtgtctgagaagggcaaggcttacaccaactacttcggacggtgcaatgtggccgagcacgaaaagctgatcctgctggcccagctgaagcccgagaaggatagcgacgaagccgtgacatatagcctgggaaagtttgggcagagggccctggatttctacagcattcatgtgaccaaggagtccacccaccccgtgaagcccctggcccagatcgccggaaacagatacgcctccggacctgtgggaaaggccctgagcgacgcatgtatgggcacaatcgcctccttcctgtctaagtaccaggacatcatcatcgaacaccagaaggtggtgaagggcaaccagaagagactggagagcctgcgggagctggccggcaaggaaaacctggaataccctagcgtgaccctgccacctcagcctcacaccaaggagggcgttgatgcctacaacgaagtgatcgcccgggtgcgaatgtgggtgaacctgaacctgtggcagaagctgaagctaagcagagatgatgccaagcctctgctgagactgaagggattcccttcctttcctctggtcgagagacaggccaacgaagtggactggtgggacatggtgtgtaacgtgaagaagctgatcaacgagaaaaaggaggatggcaaggtgttttggcagaatctggctggctacaagagacaggaagccctgagaccatacctgagcagcgaggaagatcggaagaagggaaagaaattcgctcggtaccagctgggcgacctgctgctgcacctggaaaagaagcacggcgaggactggggaaaggtgtacgacgaggcctgggagcggattgacaagaaagtggaaggcctgagcaagcacatcaagctggaagaggaacggagaagcgaggacgcccagagcaaggccgccctgaccgactggctgcgggctaaggccagcttcgtgatcgagggcctgaaggaggccgacaaggacgagttctgcagatgcgagctgaagctgcagaagtggtacggggacctgcggggaaagcccttcgccatcgaagccgagaacagcatcctggacatcagcggcttcagcaagcagtacaactgtgccttcatctggcagaaggacggcgtgaagaagctgaacctgtacctgatcatcaactacttcaagggcggcaagctgcggttcaagaagatcaaacctgaagccttcgaagccaacagattctacaccgtgatcaacaaaaagagcggcgagatcgtgcccatggaggtgaacttcaacttcgacgaccccaacctgatcatcctgcctctggcctttggcaagagacagggcagagaattcatctggaacgacctgctgtccctggaaaccggcagcctgaagctggccaacggaagagtgatcgagaagacactgtacaacagaagaacccggcaggatgagcctgccctgttcgtggccctgaccttcgagcggcgggaggtcctggactcctccaatatcaaaccaatgaacctgatcggcgtggcaagaggcgaaaacatccccgccgtgatcgccctgaccgaccccgagggctgcccactgagccggtttaaggatagcctgggaaacccaacccacatcctgagaatcggcgagagctataaggagaagcagcggaccatccaggccaagaaggaggtggagcagcggagagccggcggctacagccggaagtacgccagcaaagccaagaatctggcagacgatatggtgagaaacaccgctagagatctgctgtactacgccgtgacccaggatgccatgctgatcttcgccaacctgagccggggcttcggccggcagggcaagcggaccttcatggccgagagacagtacacacggatggaggactggctgaccgccaagctggcctacgagggcctgagcaagacctacctgtccaagacactggcccagtacacctccaagacatgcagcaactgtgggtttaccatcaccagcgccgactacgacagggtgctggagaagctgaagaagacagcaacaggctggatgaccacaattaacggcaaggagctgaaggtggagggccagattacctactacaacagatacaagagacagaacgtagtcaaggacctgtccgtcgagctggatagactgagcgaagaatctgtgaacaacgacatctcctcctggacaaagggcagaagcggagaagctctgagcctcctgaagaaaagattctcccatagacccgtgcaggagaagttcgtgtgcctgaactgcggcttcgagacacacgcagccgagcaagccgccctgaacatcgccagatcctggctgttcctgcggagccaggagtacaagaaataccagacaaacaagacaaccggcaacaccgataagagagccttcgtcgagacctggcagtccttttaccggaagaagcttaaggaggtgtggaaacctgccgtgcggtctggcggatctggcggaggctccacaagcgtgaagttcgacgaggtggccgtggtgttcagcgaggacgagtggaacctgctgaccgaccagcagaggggcctgtacatggaggtgatgaaggagaactacgagcacctgatctacctgggcttcgaggtgcccgtgatcctgagcctgctgcaggacggcggcggcatcggcagcgacaccgtgacccagagcaagagccagcaggtggccggcgccgaggagagcaagagcagcgtgaccctggagggccccatccccgagaccctgcccagcaccagccccaagaaaaagagaaaagtctaagctgccttctgcggggcttgccttctggccatgcccttcttctctcccttgcacctgtacctcttggtctttgaataaagcctgagtaggaaggctagcaaaaaaaaaaaaaaaaaaaaaaaaaaaaaaaaaaaaaaaaaaaaaaaaaaaaaaaaaaaaaaaaaaaaaaaaaaaaaaaa

SEQ ID NO: 3110 - RNA, 5419 nt, synthetic construct
  source 1..5419: mol_type = other RNA
aggaaataagagagaaaagaagagtaagaagaaatataagagccaccatggcccctaagaagaagcgtaaagtgagccgggtgaacggcagcggcagcggcggcggcatgaaccacgaccaggagttcgacccccctaaggtgtaccctcccgtccccgccgagaagagaaagcccatccgggtcctgagcctgttcgatggcatcgccaccggtctgctggtgctgaaggacctgggcatccaggtggataggtacattgcctccgaggtgtgcgaggactccatcaccgtgggaatggtgcgtcatcagggcaagatcatgtacgtgggcgacgtgcggagcgtgacacagaagcatatccaggagtggggccctttcgacctggtgatcggcggcagcccttgcaatgacctgagcatcgtgaacccagcccggaagggcctgtacgagggaaccggcagactgttcttcgagttttacagactgctgcacgacgcccggcctaaggaaggcgacgaccggcccttcttttggctgttcgagaatgtggtggccatgggagtcagcgacaagcgggatattagccggttcctggagagcaaccccgtgatgatcgatgccaaggaagtgagcgccgcccaccgggccagatacttctggggcaatctgcctggcatgaacagacccctggccagcaccgtgaacgacaagctggagctgcaggagtgcctggagcacggccggatcgccaagttcagcaaggtgagaaccatcaccacccgaagcaacagcatcaaacaaggcaaggaccagcactttcctgtgttcatgaacgagaaggaggacatcctgtggtgtaccgagatggagagagtgttcgggttcccagtccactacacagatgtcagcaacatgtctagactggccagacagagactgctgggaagaagctggtccgtccctgtgatcagacacctgttcgcccctctgaaggagtacttcgcctgcgtgagcagcggcaacagcaacgccaacagccggggccccagcttctctagcggcctggtgccactgtccctgagagggagccacatgggccccatggagatctacaaaaccgtgagcgcctggaagcggcagcctgtgcgcgtgctgagcctgtttcggaatatcgataaagtcctgaaaagcctgggattcctggagagcggctctggctccggcggtggcaccctgaagtacgtggaggatgtgacaaacgtggtcagacgggatgtggagaagtggggccccttcgatctggtgtacggcagcacccaacccctgggcagctcttgtgaccggtgccctggctggtacatgtttcagttccaccggatcctgcagtacgccctgccgagacaggagtcccagcggccattcttttggattttcatggacaacttgctgctgaccgaggatgaccaggaaactaccactcggttcctgcagaccgaagccgtgaccctgcaggacgtgagaggccgggactaccagaacgccatgcgggtgtggtccaacatccctggactgaaaagcaagcacgcacctctgacccctaaagaagaggagtacctgcaggcccaggtgcggagcagaagcaagctggacgcccctaaggtggatctgctggtgaagaattgcctcctgcccctgagagagtacttcaagtatttcagccagaatagtctgcccctgggcggcccaagcagcggcgcccctcctcccagcggcggcagcccagccggctccccaacctctaccgaggagggcacctctgagtccgccacccccgagagcggccctggcacctccaccgagcccagcgagggcagcgcacccggcagccctgccggcagccccacctccacagaggagggaaccagcaccgagcccagcgaaggcagcgccccaggcaccagcaccgagcctagtgagggcggctctggcggcggcagcgcccaggagattaaacggatcaacaagatcagaagaagacttgtgaaagacagcaacaccaagaaggccggcaagacaggccccatgaaaaccctgctggttagagtgatgacacccgatctgagagagcggctggaaaacctgagaaagaagcctgaaaatatcccccagcccatcagcaatacatctagagccaacctgaataagctgctgaccgattacaccgaaatgaagaaggcgatcctgcatgtgtactgggaagagttccagaaggaccctgtgggcctgatgagccgggtggcccagcctgccagcaagaagatcgatcagaacaagctgaaacctgagatggacgagaagggcaacctgaccaccgccggctttgcctgctctcagtgtggccagcccctgttcgtgtacaagctggagcaggtgtctgagaagggcaaggcttacaccaactacttcggacggtgcaatgtggccgagcacgaaaagctgatcctgctggcccagctgaagcccgagaaggatagcgacgaagccgtgacatatagcctgggaaagtttgggcagagggccctggatttctacagcattcatgtgaccaaggagtccacccaccccgtgaagcccctggcccagatcgccggaaacagatacgcctccggacctgtgggaaaggccctgagcgacgcatgtatgggcacaatcgcctccttcctgtctaagtaccaggacatcatcatcgaacaccagaaggtggtgaagggcaaccagaagagactggagagcctgcgggagctggccggcaaggaaaacctggaataccctagcgtgaccctgccacctcagcctcacaccaaggagggcgttgatgcctacaacgaagtgatcgcccgggtgcgaatgtgggtgaacctgaacctgtggcagaagctgaagctaagcagagatgatgccaagcctctgctgagactgaagggattcccttcctttcctctggtcgagagacaggccaacgaagtggactggtgggacatggtgtgtaacgtgaagaagctgatcaacgagaaaaaggaggatggcaaggtgttttggcagaatctggctggctacaagagacaggaagccctgagaccatacctgagcagcgaggaagatcggaagaagggaaagaaattcgctcggtaccagctgggcgacctgctgctgcacctggaaaagaagcacggcgaggactggggaaaggtgtacgacgaggcctgggagcggattgacaagaaagtggaaggcctgagcaagcacatcaagctggaagaggaacggagaagcgaggacgcccagagcaaggccgccctgaccgactggctgcgggctaaggccagcttcgtgatcgagggcctgaaggaggccgacaaggacgagttctgcagatgcgagctgaagctgcagaagtggtacggggacctgcggggaaagcccttcgccatcgaagccgagaacagcatcctggacatcagcggcttcagcaagcagtacaactgtgccttcatctggcagaaggacggcgtgaagaagctgaacctgtacctgatcatcaactacttcaagggcggcaagctgcggttcaagaagatcaaacctgaagccttcgaagccaacagattctacaccgtgatcaacaaaaagagcggcgagatcgtgcccatggaggtgaacttcaacttcgacgaccccaacctgatcatcctgcctctggcctttggcaagagacagggcagagaattcatctggaacgacctgctgtccctggaaaccggcagcctgaagctggccaacggaagagtgatcgagaagacactgtacaacagaagaacccggcaggatgagcctgccctgttcgtggccctgaccttcgagcggcgggaggtcctggactcctccaatatcaaaccaatgaacctgatcggcgtggcaagaggcgaaaacatccccgccgtgatcgccctgaccgaccccgagggctgcccactgagccggtttaaggatagcctgggaaacccaacccacatcctgagaatcggcgagagctataaggagaagcagcggaccatccaggccaagaaggaggtggagcagcggagagccggcggctacagccggaagtacgccagcaaagccaagaatctggcagacgatatggtgagaaacaccgctagagatctgctgtactacgccgtgacccaggatgccatgctgatcttcgccaacctgagccggggcttcggccggcagggcaagcggaccttcatggccgagagacagtacacacggatggaggactggctgaccgccaagctggcctacgagggcctgagcaagacctacctgtccaagacactggcccagtacacctccaagacatgcagcaactgtgggtttaccatcaccagcgccgactacgacagggtgctggagaagctgaagaagacagcaacaggctggatgaccacaattaacggcaaggagctgaaggtggagggccagattacctactacaacagatacaagagacagaacgtagtcaaggacctgtccgtcgagctggatagactgagcgaagaatctgtgaacaacgacatctcctcctggacaaagggcagaagcggagaagctctgagcctcctgaagaaaagattctcccatagacccgtgcaggagaagttcgtgtgcctgaactgcggcttcgagacacacgcagccgagcaagccgccctgaacatcgccagatcctggctgttcctgcggagccaggagtacaagaaataccagacaaacaagacaaccggcaacaccgataagagagccttcgtcgagacctggcagtccttttaccggaagaagcttaaggaggtgtggaaacctgccgtgcggtctggcggatctggcggaggctccacaagcgcccaggccggcgtgagcttcgaggaggtggccgtgcacttcagccccggcgagtggagcctgctgcagcccgcccagagggccctgtacaaggaggtgatgctggagaacttcggccacgtggccagcctgggcccccccggcgccacccccgacctgatcgcctggctgcaggagggcctgttcctgctgggcggcgacgaggaggccggcagcgccggcgacgcctggaggagcgccaccaccagccccaagaaaaagagaaaagtctaagctgccttctgcggggcttgccttctggccatgcccttcttctctcccttgcacctgtacctcttggtctttgaataaagcctgagtaggaaggctagcaaaaaaaaaaaaaaaaaaaaaaaaaaaaaaaaaaaaaaaaaaaaaaaaaaaaaaaaaaaaaaaaaaaaaaaaaaaaaaaa

SEQ ID NO: 3111 - RNA, 5419 nt, synthetic construct
  source 1..5419: mol_type = other RNA
aggaaataagagagaaaagaagagtaagaagaaatataagagccaccatggcccctaagaagaagcgtaaagtgagccgggtgaacggcagcggcagcggcggcggcatgaaccacgaccaggagttcgacccccctaaggtgtaccctcccgtccccgccgagaagagaaagcccatccgggtcctgagcctgttcgatggcatcgccaccggtctgctggtgctgaaggacctgggcatccaggtggataggtacattgcctccgaggtgtgcgaggactccatcaccgtgggaatggtgcgtcatcagggcaagatcatgtacgtgggcgacgtgcggagcgtgacacagaagcatatccaggagtggggccctttcgacctggtgatcggcggcagcccttgcaatgacctgagcatcgtgaacccagcccggaagggcctgtacgagggaaccggcagactgttcttcgagttttacagactgctgcacgacgcccggcctaaggaaggcgacgaccggcccttcttttggctgttcgagaatgtggtggccatgggagtcagcgacaagcgggatattagccggttcctggagagcaaccccgtgatgatcgatgccaaggaagtgagcgccgcccaccgggccagatacttctggggcaatctgcctggcatgaacagacccctggccagcaccgtgaacgacaagctggagctgcaggagtgcctggagcacggccggatcgccaagttcagcaaggtgagaaccatcaccacccgaagcaacagcatcaaacaaggcaaggaccagcactttcctgtgttcatgaacgagaaggaggacatcctgtggtgtaccgagatggagagagtgttcgggttcccagtccactacacagatgtcagcaacatgtctagactggccagacagagactgctgggaagaagctggtccgtccctgtgatcagacacctgttcgcccctctgaaggagtacttcgcctgcgtgagcagcggcaacagcaacgccaacagccggggccccagcttctctagcggcctggtgccactgtccctgagagggagccacatgggccccatggagatctacaaaaccgtgagcgcctggaagcggcagcctgtgcgcgtgctgagcctgtttcggaatatcgataaagtcctgaaaagcctgggattcctggagagcggctctggctccggcggtggcaccctgaagtacgtggaggatgtgacaaacgtggtcagacgggatgtggagaagtggggccccttcgatctggtgtacggcagcacccaacccctgggcagctcttgtgaccggtgccctggctggtacatgtttcagttccaccggatcctgcagtacgccctgccgagacaggagtcccagcggccattcttttggattttcatggacaacttgctgctgaccgaggatgaccaggaaactaccactcggttcctgcagaccgaagccgtgaccctgcaggacgtgagaggccgggactaccagaacgccatgcgggtgtggtccaacatccctggactgaaaagcaagcacgcacctctgacccctaaagaagaggagtacctgcaggcccaggtgcggagcagaagcaagctggacgcccctaaggtggatctgctggtgaagaattgcctcctgcccctgagagagtacttcaagtatttcagccagaatagtctgcccctgggcggcccaagcagcggcgcccctcctcccagcggcggcagcccagccggctccccaacctctaccgaggagggcacctctgagtccgccacccccgagagcggccctggcacctccaccgagcccagcgagggcagcgcacccggcagccctgccggcagccccacctccacagaggagggaaccagcaccgagcccagcgaaggcagcgccccaggcaccagcaccgagcctagtgagggcggctctggcggcggcagcgcccaggagattaaacggatcaacaagatcagaagaagacttgtgaaagacagcaacaccaagaaggccggcaagacaggccccatgaaaaccctgctggttagagtgatgacacccgatctgagagagcggctggaaaacctgagaaagaagcctgaaaatatcccccagcccatcagcaatacatctagagccaacctgaataagctgctgaccgattacaccgaaatgaagaaggcgatcctgcatgtgtactgggaagagttccagaaggaccctgtgggcctgatgagccgggtggcccagcctgccagcaagaagatcgatcagaacaagctgaaacctgagatggacgagaagggcaacctgaccaccgccggctttgcctgctctcagtgtggccagcccctgttcgtgtacaagctggagcaggtgtctgagaagggcaaggcttacaccaactacttcggacggtgcaatgtggccgagcacgaaaagctgatcctgctggcccagctgaagcccgagaaggatagcgacgaagccgtgacatatagcctgggaaagtttgggcagagggccctggatttctacagcattcatgtgaccaaggagtccacccaccccgtgaagcccctggcccagatcgccggaaacagatacgcctccggacctgtgggaaaggccctgagcgacgcatgtatgggcacaatcgcctccttcctgtctaagtaccaggacatcatcatcgaacaccagaaggtggtgaagggcaaccagaagagactggagagcctgcgggagctggccggcaaggaaaacctggaataccctagcgtgaccctgccacctcagcctcacaccaaggagggcgttgatgcctacaacgaagtgatcgcccgggtgcgaatgtgggtgaacctgaacctgtggcagaagctgaagctaagcagagatgatgccaagcctctgctgagactgaagggattcccttcctttcctctggtcgagagacaggccaacgaagtggactggtgggacatggtgtgtaacgtgaagaagctgatcaacgagaaaaaggaggatggcaaggtgttttggcagaatctggctggctacaagagacaggaagccctgagaccatacctgagcagcgaggaagatcggaagaagggaaagaaattcgctcggtaccagctgggcgacctgctgctgcacctggaaaagaagcacggcgaggactggggaaaggtgtacgacgaggcctgggagcggattgacaagaaagtggaaggcctgagcaagcacatcaagctggaagaggaacggagaagcgaggacgcccagagcaaggccgccctgaccgactggctgcgggctaaggccagcttcgtgatcgagggcctgaaggaggccgacaaggacgagttctgcagatgcgagctgaagctgcagaagtggtacggggacctgcggggaaagcccttcgccatcgaagccgagaacagcatcctggacatcagcggcttcagcaagcagtacaactgtgccttcatctggcagaaggacggcgtgaagaagctgaacctgtacctgatcatcaactacttcaagggcggcaagctgcggttcaagaagatcaaacctgaagccttcgaagccaacagattctacaccgtgatcaacaaaaagagcggcgagatcgtgcccatggaggtgaacttcaacttcgacgaccccaacctgatcatcctgcctctggcctttggcaagagacagggcagagaattcatctggaacgacctgctgtccctggaaaccggcagcctgaagctggccaacggaagagtgatcgagaagacactgtacaacagaagaacccggcaggatgagcctgccctgttcgtggccctgaccttcgagcggcgggaggtcctggactcctccaatatcaaaccaatgaacctgatcggcgtggcaagaggcgaaaacatccccgccgtgatcgccctgaccgaccccgagggctgcccactgagccggtttaaggatagcctgggaaacccaacccacatcctgagaatcggcgagagctataaggagaagcagcggaccatccaggccaagaaggaggtggagcagcggagagccggcggctacagccggaagtacgccagcaaagccaagaatctggcagacgatatggtgagaaacaccgctagagatctgctgtactacgccgtgacccaggatgccatgctgatcttcgccaacctgagccggggcttcggccggcagggcaagcggaccttcatggccgagagacagtacacacggatggaggactggctgaccgccaagctggcctacgagggcctgagcaagacctacctgtccaagacactggcccagtacacctccaagacatgcagcaactgtgggtttaccatcaccagcgccgactacgacagggtgctggagaagctgaagaagacagcaacaggctggatgaccacaattaacggcaaggagctgaaggtggagggccagattacctactacaacagatacaagagacagaacgtagtcaaggacctgtccgtcgagctggatagactgagcgaagaatctgtgaacaacgacatctcctcctggacaaagggcagaagcggagaagctctgagcctcctgaagaaaagattctcccatagacccgtgcaggagaagttcgtgtgcctgaactgcggcttcgagacacacgcagccgagcaagccgccctgaacatcgccagatcctggctgttcctgcggagccaggagtacaagaaataccagacaaacaagacaaccggcaacaccgataagagagccttcgtcgagacctggcagtccttttaccggaagaagcttaaggaggtgtggaaacctgccgtgcggtctggcggatctggcggaggctccacaagcagccagggcagcgtgagcttcaaggacgtgaccgtggacttcacccaggaggagtggcagcagctggaccccgcccagaaggccctgtacagggacgtgatgctggagaactactgccacttcatcgccgtgggcttccacatgaccaagcccgacatgatcaggaagctggagcagggcgaggagctgtggacccagaggatcttccccagctacagctacctggaggaggacggcaagaccaccagccccaagaaaaagagaaaagtctaagctgccttctgcggggcttgccttctggccatgcccttcttctctcccttgcacctgtacctcttggtctttgaataaagcctgagtaggaaggctagcaaaaaaaaaaaaaaaaaaaaaaaaaaaaaaaaaaaaaaaaaaaaaaaaaaaaaaaaaaaaaaaaaaaaaaaaaaaaaaaa

SEQ ID NO: 3112 - RNA, 5419 nt, synthetic construct
  source 1..5419: mol_type = other RNA
aggaaataagagagaaaagaagagtaagaagaaatataagagccaccatggcccctaagaagaagcgtaaagtgagccgggtgaacggcagcggcagcggcggcggcatgaaccacgaccaggagttcgacccccctaaggtgtaccctcccgtccccgccgagaagagaaagcccatccgggtcctgagcctgttcgatggcatcgccaccggtctgctggtgctgaaggacctgggcatccaggtggataggtacattgcctccgaggtgtgcgaggactccatcaccgtgggaatggtgcgtcatcagggcaagatcatgtacgtgggcgacgtgcggagcgtgacacagaagcatatccaggagtggggccctttcgacctggtgatcggcggcagcccttgcaatgacctgagcatcgtgaacccagcccggaagggcctgtacgagggaaccggcagactgttcttcgagttttacagactgctgcacgacgcccggcctaaggaaggcgacgaccggcccttcttttggctgttcgagaatgtggtggccatgggagtcagcgacaagcgggatattagccggttcctggagagcaaccccgtgatgatcgatgccaaggaagtgagcgccgcccaccgggccagatacttctggggcaatctgcctggcatgaacagacccctggccagcaccgtgaacgacaagctggagctgcaggagtgcctggagcacggccggatcgccaagttcagcaaggtgagaaccatcaccacccgaagcaacagcatcaaacaaggcaaggaccagcactttcctgtgttcatgaacgagaaggaggacatcctgtggtgtaccgagatggagagagtgttcgggttcccagtccactacacagatgtcagcaacatgtctagactggccagacagagactgctgggaagaagctggtccgtccctgtgatcagacacctgttcgcccctctgaaggagtacttcgcctgcgtgagcagcggcaacagcaacgccaacagccggggccccagcttctctagcggcctggtgccactgtccctgagagggagccacatgggccccatggagatctacaaaaccgtgagcgcctggaagcggcagcctgtgcgcgtgctgagcctgtttcggaatatcgataaagtcctgaaaagcctgggattcctggagagcggctctggctccggcggtggcaccctgaagtacgtggaggatgtgacaaacgtggtcagacgggatgtggagaagtggggccccttcgatctggtgtacggcagcacccaacccctgggcagctcttgtgaccggtgccctggctggtacatgtttcagttccaccggatcctgcagtacgccctgccgagacaggagtcccagcggccattcttttggattttcatggacaacttgctgctgaccgaggatgaccaggaaactaccactcggttcctgcagaccgaagccgtgaccctgcaggacgtgagaggccgggactaccagaacgccatgcgggtgtggtccaacatccctggactgaaaagcaagcacgcacctctgacccctaaagaagaggagtacctgcaggcccaggtgcggagcagaagcaagctggacgcccctaaggtggatctgctggtgaagaattgcctcctgcccctgagagagtacttcaagtatttcagccagaatagtctgcccctgggcggcccaagcagcggcgcccctcctcccagcggcggcagcccagccggctccccaacctctaccgaggagggcacctctgagtccgccacccccgagagcggccctggcacctccaccgagcccagcgagggcagcgcacccggcagccctgccggcagccccacctccacagaggagggaaccagcaccgagcccagcgaaggcagcgccccaggcaccagcaccgagcctagtgagggcggctctggcggcggcagcgcccaggagattaaacggatcaacaagatcagaagaagacttgtgaaagacagcaacaccaagaaggccggcaagacaggccccatgaaaaccctgctggttagagtgatgacacccgatctgagagagcggctggaaaacctgagaaagaagcctgaaaatatcccccagcccatcagcaatacatctagagccaacctgaataagctgctgaccgattacaccgaaatgaagaaggcgatcctgcatgtgtactgggaagagttccagaaggaccctgtgggcctgatgagccgggtggcccagcctgccagcaagaagatcgatcagaacaagctgaaacctgagatggacgagaagggcaacctgaccaccgccggctttgcctgctctcagtgtggccagcccctgttcgtgtacaagctggagcaggtgtctgagaagggcaaggcttacaccaactacttcggacggtgcaatgtggccgagcacgaaaagctgatcctgctggcccagctgaagcccgagaaggatagcgacgaagccgtgacatatagcctgggaaagtttgggcagagggccctggatttctacagcattcatgtgaccaaggagtccacccaccccgtgaagcccctggcccagatcgccggaaacagatacgcctccggacctgtgggaaaggccctgagcgacgcatgtatgggcacaatcgcctccttcctgtctaagtaccaggacatcatcatcgaacaccagaaggtggtgaagggcaaccagaagagactggagagcctgcgggagctggccggcaaggaaaacctggaataccctagcgtgaccctgccacctcagcctcacaccaaggagggcgttgatgcctacaacgaagtgatcgcccgggtgcgaatgtgggtgaacctgaacctgtggcagaagctgaagctaagcagagatgatgccaagcctctgctgagactgaagggattcccttcctttcctctggtcgagagacaggccaacgaagtggactggtgggacatggtgtgtaacgtgaagaagctgatcaacgagaaaaaggaggatggcaaggtgttttggcagaatctggctggctacaagagacaggaagccctgagaccatacctgagcagcgaggaagatcggaagaagggaaagaaattcgctcggtaccagctgggcgacctgctgctgcacctggaaaagaagcacggcgaggactggggaaaggtgtacgacgaggcctgggagcggattgacaagaaagtggaaggcctgagcaagcacatcaagctggaagaggaacggagaagcgaggacgcccagagcaaggccgccctgaccgactggctgcgggctaaggccagcttcgtgatcgagggcctgaaggaggccgacaaggacgagttctgcagatgcgagctgaagctgcagaagtggtacggggacctgcggggaaagcccttcgccatcgaagccgagaacagcatcctggacatcagcggcttcagcaagcagtacaactgtgccttcatctggcagaaggacggcgtgaagaagctgaacctgtacctgatcatcaactacttcaagggcggcaagctgcggttcaagaagatcaaacctgaagccttcgaagccaacagattctacaccgtgatcaacaaaaagagcggcgagatcgtgcccatggaggtgaacttcaacttcgacgaccccaacctgatcatcctgcctctggcctttggcaagagacagggcagagaattcatctggaacgacctgctgtccctggaaaccggcagcctgaagctggccaacggaagagtgatcgagaagacactgtacaacagaagaacccggcaggatgagcctgccctgttcgtggccctgaccttcgagcggcgggaggtcctggactcctccaatatcaaaccaatgaacctgatcggcgtggcaagaggcgaaaacatccccgccgtgatcgccctgaccgaccccgagggctgcccactgagccggtttaaggatagcctgggaaacccaacccacatcctgagaatcggcgagagctataaggagaagcagcggaccatccaggccaagaaggaggtggagcagcggagagccggcggctacagccggaagtacgccagcaaagccaagaatctggcagacgatatggtgagaaacaccgctagagatctgctgtactacgccgtgacccaggatgccatgctgatcttcgccaacctgagccggggcttcggccggcagggcaagcggaccttcatggccgagagacagtacacacggatggaggactggctgaccgccaagctggcctacgagggcctgagcaagacctacctgtccaagacactggcccagtacacctccaagacatgcagcaactgtgggtttaccatcaccagcgccgactacgacagggtgctggagaagctgaagaagacagcaacaggctggatgaccacaattaacggcaaggagctgaaggtggagggccagattacctactacaacagatacaagagacagaacgtagtcaaggacctgtccgtcgagctggatagactgagcgaagaatctgtgaacaacgacatctcctcctggacaaagggcagaagcggagaagctctgagcctcctgaagaaaagattctcccatagacccgtgcaggagaagttcgtgtgcctgaactgcggcttcgagacacacgcagccgagcaagccgccctgaacatcgccagatcctggctgttcctgcggagccaggagtacaagaaataccagacaaacaagacaaccggcaacaccgataagagagccttcgtcgagacctggcagtccttttaccggaagaagcttaaggaggtgtggaaacctgccgtgcggtctggcggatctggcggaggctccacaagcaagcccgccgccgtgagcttcgccgacgtggccgtgtacttcagccccgaggagtggggctgcctgaggcccgcccagagggccctgtacagggaggtgatgagggagacctacggcctgctgggcgccctgggcggcggcggcaccaagcccgccctgatctgctgggtggagagggacgccgagctgtggggccccgacgcccaggaccccgccgccgccgccgccaggggctacggcaccaccagccccaagaaaaagagaaaagtctaagctgccttctgcggggcttgccttctggccatgcccttcttctctcccttgcacctgtacctcttggtctttgaataaagcctgagtaggaaggctagcaaaaaaaaaaaaaaaaaaaaaaaaaaaaaaaaaaaaaaaaaaaaaaaaaaaaaaaaaaaaaaaaaaaaaaaaaaaaaaaa

SEQ ID NO: 3113 - RNA, 5419 nt, synthetic construct
  source 1..5419: mol_type = other RNA
aggaaataagagagaaaagaagagtaagaagaaatataagagccaccatggcccctaagaagaagcgtaaagtgagccgggtgaacggcagcggcagcggcggcggcatgaaccacgaccaggagttcgacccccctaaggtgtaccctcccgtccccgccgagaagagaaagcccatccgggtcctgagcctgttcgatggcatcgccaccggtctgctggtgctgaaggacctgggcatccaggtggataggtacattgcctccgaggtgtgcgaggactccatcaccgtgggaatggtgcgtcatcagggcaagatcatgtacgtgggcgacgtgcggagcgtgacacagaagcatatccaggagtggggccctttcgacctggtgatcggcggcagcccttgcaatgacctgagcatcgtgaacccagcccggaagggcctgtacgagggaaccggcagactgttcttcgagttttacagactgctgcacgacgcccggcctaaggaaggcgacgaccggcccttcttttggctgttcgagaatgtggtggccatgggagtcagcgacaagcgggatattagccggttcctggagagcaaccccgtgatgatcgatgccaaggaagtgagcgccgcccaccgggccagatacttctggggcaatctgcctggcatgaacagacccctggccagcaccgtgaacgacaagctggagctgcaggagtgcctggagcacggccggatcgccaagttcagcaaggtgagaaccatcaccacccgaagcaacagcatcaaacaaggcaaggaccagcactttcctgtgttcatgaacgagaaggaggacatcctgtggtgtaccgagatggagagagtgttcgggttcccagtccactacacagatgtcagcaacatgtctagactggccagacagagactgctgggaagaagctggtccgtccctgtgatcagacacctgttcgcccctctgaaggagtacttcgcctgcgtgagcagcggcaacagcaacgccaacagccggggccccagcttctctagcggcctggtgccactgtccctgagagggagccacatgggccccatggagatctacaaaaccgtgagcgcctggaagcggcagcctgtgcgcgtgctgagcctgtttcggaatatcgataaagtcctgaaaagcctgggattcctggagagcggctctggctccggcggtggcaccctgaagtacgtggaggatgtgacaaacgtggtcagacgggatgtggagaagtggggccccttcgatctggtgtacggcagcacccaacccctgggcagctcttgtgaccggtgccctggctggtacatgtttcagttccaccggatcctgcagtacgccctgccgagacaggagtcccagcggccattcttttggattttcatggacaacttgctgctgaccgaggatgaccaggaaactaccactcggttcctgcagaccgaagccgtgaccctgcaggacgtgagaggccgggactaccagaacgccatgcgggtgtggtccaacatccctggactgaaaagcaagcacgcacctctgacccctaaagaagaggagtacctgcaggcccaggtgcggagcagaagcaagctggacgcccctaaggtggatctgctggtgaagaattgcctcctgcccctgagagagtacttcaagtatttcagccagaatagtctgcccctgggcggcccaagcagcggcgcccctcctcccagcggcggcagcccagccggctccccaacctctaccgaggagggcacctctgagtccgccacccccgagagcggccctggcacctccaccgagcccagcgagggcagcgcacccggcagccctgccggcagccccacctccacagaggagggaaccagcaccgagcccagcgaaggcagcgccccaggcaccagcaccgagcctagtgagggcggctctggcggcggcagcgcccaggagattaaacggatcaacaagatcagaagaagacttgtgaaagacagcaacaccaagaaggccggcaagacaggccccatgaaaaccctgctggttagagtgatgacacccgatctgagagagcggctggaaaacctgagaaagaagcctgaaaatatcccccagcccatcagcaatacatctagagccaacctgaataagctgctgaccgattacaccgaaatgaagaaggcgatcctgcatgtgtactgggaagagttccagaaggaccctgtgggcctgatgagccgggtggcccagcctgccagcaagaagatcgatcagaacaagctgaaacctgagatggacgagaagggcaacctgaccaccgccggctttgcctgctctcagtgtggccagcccctgttcgtgtacaagctggagcaggtgtctgagaagggcaaggcttacaccaactacttcggacggtgcaatgtggccgagcacgaaaagctgatcctgctggcccagctgaagcccgagaaggatagcgacgaagccgtgacatatagcctgggaaagtttgggcagagggccctggatttctacagcattcatgtgaccaaggagtccacccaccccgtgaagcccctggcccagatcgccggaaacagatacgcctccggacctgtgggaaaggccctgagcgacgcatgtatgggcacaatcgcctccttcctgtctaagtaccaggacatcatcatcgaacaccagaaggtggtgaagggcaaccagaagagactggagagcctgcgggagctggccggcaaggaaaacctggaataccctagcgtgaccctgccacctcagcctcacaccaaggagggcgttgatgcctacaacgaagtgatcgcccgggtgcgaatgtgggtgaacctgaacctgtggcagaagctgaagctaagcagagatgatgccaagcctctgctgagactgaagggattcccttcctttcctctggtcgagagacaggccaacgaagtggactggtgggacatggtgtgtaacgtgaagaagctgatcaacgagaaaaaggaggatggcaaggtgttttggcagaatctggctggctacaagagacaggaagccctgagaccatacctgagcagcgaggaagatcggaagaagggaaagaaattcgctcggtaccagctgggcgacctgctgctgcacctggaaaagaagcacggcgaggactggggaaaggtgtacgacgaggcctgggagcggattgacaagaaagtggaaggcctgagcaagcacatcaagctggaagaggaacggagaagcgaggacgcccagagcaaggccgccctgaccgactggctgcgggctaaggccagcttcgtgatcgagggcctgaaggaggccgacaaggacgagttctgcagatgcgagctgaagctgcagaagtggtacggggacctgcggggaaagcccttcgccatcgaagccgagaacagcatcctggacatcagcggcttcagcaagcagtacaactgtgccttcatctggcagaaggacggcgtgaagaagctgaacctgtacctgatcatcaactacttcaagggcggcaagctgcggttcaagaagatcaaacctgaagccttcgaagccaacagattctacaccgtgatcaacaaaaagagcggcgagatcgtgcccatggaggtgaacttcaacttcgacgaccccaacctgatcatcctgcctctggcctttggcaagagacagggcagagaattcatctggaacgacctgctgtccctggaaaccggcagcctgaagctggccaacggaagagtgatcgagaagacactgtacaacagaagaacccggcaggatgagcctgccctgttcgtggccctgaccttcgagcggcgggaggtcctggactcctccaatatcaaaccaatgaacctgatcggcgtggcaagaggcgaaaacatccccgccgtgatcgccctgaccgaccccgagggctgcccactgagccggtttaaggatagcctgggaaacccaacccacatcctgagaatcggcgagagctataaggagaagcagcggaccatccaggccaagaaggaggtggagcagcggagagccggcggctacagccggaagtacgccagcaaagccaagaatctggcagacgatatggtgagaaacaccgctagagatctgctgtactacgccgtgacccaggatgccatgctgatcttcgccaacctgagccggggcttcggccggcagggcaagcggaccttcatggccgagagacagtacacacggatggaggactggctgaccgccaagctggcctacgagggcctgagcaagacctacctgtccaagacactggcccagtacacctccaagacatgcagcaactgtgggtttaccatcaccagcgccgactacgacagggtgctggagaagctgaagaagacagcaacaggctggatgaccacaattaacggcaaggagctgaaggtggagggccagattacctactacaacagatacaagagacagaacgtagtcaaggacctgtccgtcgagctggatagactgagcgaagaatctgtgaacaacgacatctcctcctggacaaagggcagaagcggagaagctctgagcctcctgaagaaaagattctcccatagacccgtgcaggagaagttcgtgtgcctgaactgcggcttcgagacacacgcagccgagcaagccgccctgaacatcgccagatcctggctgttcctgcggagccaggagtacaagaaataccagacaaacaagacaaccggcaacaccgataagagagccttcgtcgagacctggcagtccttttaccggaagaagcttaaggaggtgtggaaacctgccgtgcggtctggcggatctggcggaggctccacaagcctgctgaccttcgaggacgtggccgtgagcttcagcgaggaggagtggaggctgctggaccccgcccagaagagcctgtacaacgacgtgatgcaggagaactacgagaccatcgtgagcctgggcctgaagctgaagaacgacaccggcaacgaccagcccatcagcctgagcgccctggagatccaggccagcggctgcagggtgctgaggaaggccaggatgaaggtggcccagaagaccaccagccccaagaaaaagagaaaagtctaagctgccttctgcggggcttgccttctggccatgcccttcttctctcccttgcacctgtacctcttggtctttgaataaagcctgagtaggaaggctagcaaaaaaaaaaaaaaaaaaaaaaaaaaaaaaaaaaaaaaaaaaaaaaaaaaaaaaaaaaaaaaaaaaaaaaaaaaaaaaaa

SEQ ID NO: 3114 - RNA, 5419 nt, synthetic construct
  source 1..5419: mol_type = other RNA
aggaaataagagagaaaagaagagtaagaagaaatataagagccaccatggcccctaagaagaagcgtaaagtgagccgggtgaacggcagcggcagcggcggcggcatgaaccacgaccaggagttcgacccccctaaggtgtaccctcccgtccccgccgagaagagaaagcccatccgggtcctgagcctgttcgatggcatcgccaccggtctgctggtgctgaaggacctgggcatccaggtggataggtacattgcctccgaggtgtgcgaggactccatcaccgtgggaatggtgcgtcatcagggcaagatcatgtacgtgggcgacgtgcggagcgtgacacagaagcatatccaggagtggggccctttcgacctggtgatcggcggcagcccttgcaatgacctgagcatcgtgaacccagcccggaagggcctgtacgagggaaccggcagactgttcttcgagttttacagactgctgcacgacgcccggcctaaggaaggcgacgaccggcccttcttttggctgttcgagaatgtggtggccatgggagtcagcgacaagcgggatattagccggttcctggagagcaaccccgtgatgatcgatgccaaggaagtgagcgccgcccaccgggccagatacttctggggcaatctgcctggcatgaacagacccctggccagcaccgtgaacgacaagctggagctgcaggagtgcctggagcacggccggatcgccaagttcagcaaggtgagaaccatcaccacccgaagcaacagcatcaaacaaggcaaggaccagcactttcctgtgttcatgaacgagaaggaggacatcctgtggtgtaccgagatggagagagtgttcgggttcccagtccactacacagatgtcagcaacatgtctagactggccagacagagactgctgggaagaagctggtccgtccctgtgatcagacacctgttcgcccctctgaaggagtacttcgcctgcgtgagcagcggcaacagcaacgccaacagccggggccccagcttctctagcggcctggtgccactgtccctgagagggagccacatgggccccatggagatctacaaaaccgtgagcgcctggaagcggcagcctgtgcgcgtgctgagcctgtttcggaatatcgataaagtcctgaaaagcctgggattcctggagagcggctctggctccggcggtggcaccctgaagtacgtggaggatgtgacaaacgtggtcagacgggatgtggagaagtggggccccttcgatctggtgtacggcagcacccaacccctgggcagctcttgtgaccggtgccctggctggtacatgtttcagttccaccggatcctgcagtacgccctgccgagacaggagtcccagcggccattcttttggattttcatggacaacttgctgctgaccgaggatgaccaggaaactaccactcggttcctgcagaccgaagccgtgaccctgcaggacgtgagaggccgggactaccagaacgccatgcgggtgtggtccaacatccctggactgaaaagcaagcacgcacctctgacccctaaagaagaggagtacctgcaggcccaggtgcggagcagaagcaagctggacgcccctaaggtggatctgctggtgaagaattgcctcctgcccctgagagagtacttcaagtatttcagccagaatagtctgcccctgggcggcccaagcagcggcgcccctcctcccagcggcggcagcccagccggctccccaacctctaccgaggagggcacctctgagtccgccacccccgagagcggccctggcacctccaccgagcccagcgagggcagcgcacccggcagccctgccggcagccccacctccacagaggagggaaccagcaccgagcccagcgaaggcagcgccccaggcaccagcaccgagcctagtgagggcggctctggcggcggcagcgcccaggagattaaacggatcaacaagatcagaagaagacttgtgaaagacagcaacaccaagaaggccggcaagacaggccccatgaaaaccctgctggttagagtgatgacacccgatctgagagagcggctggaaaacctgagaaagaagcctgaaaatatcccccagcccatcagcaatacatctagagccaacctgaataagctgctgaccgattacaccgaaatgaagaaggcgatcctgcatgtgtactgggaagagttccagaaggaccctgtgggcctgatgagccgggtggcccagcctgccagcaagaagatcgatcagaacaagctgaaacctgagatggacgagaagggcaacctgaccaccgccggctttgcctgctctcagtgtggccagcccctgttcgtgtacaagctggagcaggtgtctgagaagggcaaggcttacaccaactacttcggacggtgcaatgtggccgagcacgaaaagctgatcctgctggcccagctgaagcccgagaaggatagcgacgaagccgtgacatatagcctgggaaagtttgggcagagggccctggatttctacagcattcatgtgaccaaggagtccacccaccccgtgaagcccctggcccagatcgccggaaacagatacgcctccggacctgtgggaaaggccctgagcgacgcatgtatgggcacaatcgcctccttcctgtctaagtaccaggacatcatcatcgaacaccagaaggtggtgaagggcaaccagaagagactggagagcctgcgggagctggccggcaaggaaaacctggaataccctagcgtgaccctgccacctcagcctcacaccaaggagggcgttgatgcctacaacgaagtgatcgcccgggtgcgaatgtgggtgaacctgaacctgtggcagaagctgaagctaagcagagatgatgccaagcctctgctgagactgaagggattcccttcctttcctctggtcgagagacaggccaacgaagtggactggtgggacatggtgtgtaacgtgaagaagctgatcaacgagaaaaaggaggatggcaaggtgttttggcagaatctggctggctacaagagacaggaagccctgagaccatacctgagcagcgaggaagatcggaagaagggaaagaaattcgctcggtaccagctgggcgacctgctgctgcacctggaaaagaagcacggcgaggactggggaaaggtgtacgacgaggcctgggagcggattgacaagaaagtggaaggcctgagcaagcacatcaagctggaagaggaacggagaagcgaggacgcccagagcaaggccgccctgaccgactggctgcgggctaaggccagcttcgtgatcgagggcctgaaggaggccgacaaggacgagttctgcagatgcgagctgaagctgcagaagtggtacggggacctgcggggaaagcccttcgccatcgaagccgagaacagcatcctggacatcagcggcttcagcaagcagtacaactgtgccttcatctggcagaaggacggcgtgaagaagctgaacctgtacctgatcatcaactacttcaagggcggcaagctgcggttcaagaagatcaaacctgaagccttcgaagccaacagattctacaccgtgatcaacaaaaagagcggcgagatcgtgcccatggaggtgaacttcaacttcgacgaccccaacctgatcatcctgcctctggcctttggcaagagacagggcagagaattcatctggaacgacctgctgtccctggaaaccggcagcctgaagctggccaacggaagagtgatcgagaagacactgtacaacagaagaacccggcaggatgagcctgccctgttcgtggccctgaccttcgagcggcgggaggtcctggactcctccaatatcaaaccaatgaacctgatcggcgtggcaagaggcgaaaacatccccgccgtgatcgccctgaccgaccccgagggctgcccactgagccggtttaaggatagcctgggaaacccaacccacatcctgagaatcggcgagagctataaggagaagcagcggaccatccaggccaagaaggaggtggagcagcggagagccggcggctacagccggaagtacgccagcaaagccaagaatctggcagacgatatggtgagaaacaccgctagagatctgctgtactacgccgtgacccaggatgccatgctgatcttcgccaacctgagccggggcttcggccggcagggcaagcggaccttcatggccgagagacagtacacacggatggaggactggctgaccgccaagctggcctacgagggcctgagcaagacctacctgtccaagacactggcccagtacacctccaagacatgcagcaactgtgggtttaccatcaccagcgccgactacgacagggtgctggagaagctgaagaagacagcaacaggctggatgaccacaattaacggcaaggagctgaaggtggagggccagattacctactacaacagatacaagagacagaacgtagtcaaggacctgtccgtcgagctggatagactgagcgaagaatctgtgaacaacgacatctcctcctggacaaagggcagaagcggagaagctctgagcctcctgaagaaaagattctcccatagacccgtgcaggagaagttcgtgtgcctgaactgcggcttcgagacacacgcagccgagcaagccgccctgaacatcgccagatcctggctgttcctgcggagccaggagtacaagaaataccagacaaacaagacaaccggcaacaccgataagagagccttcgtcgagacctggcagtccttttaccggaagaagcttaaggaggtgtggaaacctgccgtgcggtctggcggatctggcggaggctccacaagcagccacaccctggtgaccttcaaggacatcctggtgaacttcaccagggaggagtggaagctgctggacaccgcccagcagatcatgtacaaggacgtgatgctggagaactacaggaacctggtgagcctgggccaccagctgcccaagcccgacgtgatcctgaggctggagaagggcgaggagccctggctggtggagaaggagatccaccaggagacccaccccgacctggagacccccaccagccccaagaaaaagagaaaagtctaagctgccttctgcggggcttgccttctggccatgcccttcttctctcccttgcacctgtacctcttggtctttgaataaagcctgagtaggaaggctagcaaaaaaaaaaaaaaaaaaaaaaaaaaaaaaaaaaaaaaaaaaaaaaaaaaaaaaaaaaaaaaaaaaaaaaaaaaaaaaaa

SEQ ID NO: 3115 - RNA, 5419 nt, synthetic construct
  source 1..5419: mol_type = other RNA
aggaaataagagagaaaagaagagtaagaagaaatataagagccaccatggcccctaagaagaagcgtaaagtgagccgggtgaacggcagcggcagcggcggcggcatgaaccacgaccaggagttcgacccccctaaggtgtaccctcccgtccccgccgagaagagaaagcccatccgggtcctgagcctgttcgatggcatcgccaccggtctgctggtgctgaaggacctgggcatccaggtggataggtacattgcctccgaggtgtgcgaggactccatcaccgtgggaatggtgcgtcatcagggcaagatcatgtacgtgggcgacgtgcggagcgtgacacagaagcatatccaggagtggggccctttcgacctggtgatcggcggcagcccttgcaatgacctgagcatcgtgaacccagcccggaagggcctgtacgagggaaccggcagactgttcttcgagttttacagactgctgcacgacgcccggcctaaggaaggcgacgaccggcccttcttttggctgttcgagaatgtggtggccatgggagtcagcgacaagcgggatattagccggttcctggagagcaaccccgtgatgatcgatgccaaggaagtgagcgccgcccaccgggccagatacttctggggcaatctgcctggcatgaacagacccctggccagcaccgtgaacgacaagctggagctgcaggagtgcctggagcacggccggatcgccaagttcagcaaggtgagaaccatcaccacccgaagcaacagcatcaaacaaggcaaggaccagcactttcctgtgttcatgaacgagaaggaggacatcctgtggtgtaccgagatggagagagtgttcgggttcccagtccactacacagatgtcagcaacatgtctagactggccagacagagactgctgggaagaagctggtccgtccctgtgatcagacacctgttcgcccctctgaaggagtacttcgcctgcgtgagcagcggcaacagcaacgccaacagccggggccccagcttctctagcggcctggtgccactgtccctgagagggagccacatgggccccatggagatctacaaaaccgtgagcgcctggaagcggcagcctgtgcgcgtgctgagcctgtttcggaatatcgataaagtcctgaaaagcctgggattcctggagagcggctctggctccggcggtggcaccctgaagtacgtggaggatgtgacaaacgtggtcagacgggatgtggagaagtggggccccttcgatctggtgtacggcagcacccaacccctgggcagctcttgtgaccggtgccctggctggtacatgtttcagttccaccggatcctgcagtacgccctgccgagacaggagtcccagcggccattcttttggattttcatggacaacttgctgctgaccgaggatgaccaggaaactaccactcggttcctgcagaccgaagccgtgaccctgcaggacgtgagaggccgggactaccagaacgccatgcgggtgtggtccaacatccctggactgaaaagcaagcacgcacctctgacccctaaagaagaggagtacctgcaggcccaggtgcggagcagaagcaagctggacgcccctaaggtggatctgctggtgaagaattgcctcctgcccctgagagagtacttcaagtatttcagccagaatagtctgcccctgggcggcccaagcagcggcgcccctcctcccagcggcggcagcccagccggctccccaacctctaccgaggagggcacctctgagtccgccacccccgagagcggccctggcacctccaccgagcccagcgagggcagcgcacccggcagccctgccggcagccccacctccacagaggagggaaccagcaccgagcccagcgaaggcagcgccccaggcaccagcaccgagcctagtgagggcggctctggcggcggcagcgcccaggagattaaacggatcaacaagatcagaagaagacttgtgaaagacagcaacaccaagaaggccggcaagacaggccccatgaaaaccctgctggttagagtgatgacacccgatctgagagagcggctggaaaacctgagaaagaagcctgaaaatatcccccagcccatcagcaatacatctagagccaacctgaataagctgctgaccgattacaccgaaatgaagaaggcgatcctgcatgtgtactgggaagagttccagaaggaccctgtgggcctgatgagccgggtggcccagcctgccagcaagaagatcgatcagaacaagctgaaacctgagatggacgagaagggcaacctgaccaccgccggctttgcctgctctcagtgtggccagcccctgttcgtgtacaagctggagcaggtgtctgagaagggcaaggcttacaccaactacttcggacggtgcaatgtggccgagcacgaaaagctgatcctgctggcccagctgaagcccgagaaggatagcgacgaagccgtgacatatagcctgggaaagtttgggcagagggccctggatttctacagcattcatgtgaccaaggagtccacccaccccgtgaagcccctggcccagatcgccggaaacagatacgcctccggacctgtgggaaaggccctgagcgacgcatgtatgggcacaatcgcctccttcctgtctaagtaccaggacatcatcatcgaacaccagaaggtggtgaagggcaaccagaagagactggagagcctgcgggagctggccggcaaggaaaacctggaataccctagcgtgaccctgccacctcagcctcacaccaaggagggcgttgatgcctacaacgaagtgatcgcccgggtgcgaatgtgggtgaacctgaacctgtggcagaagctgaagctaagcagagatgatgccaagcctctgctgagactgaagggattcccttcctttcctctggtcgagagacaggccaacgaagtggactggtgggacatggtgtgtaacgtgaagaagctgatcaacgagaaaaaggaggatggcaaggtgttttggcagaatctggctggctacaagagacaggaagccctgagaccatacctgagcagcgaggaagatcggaagaagggaaagaaattcgctcggtaccagctgggcgacctgctgctgcacctggaaaagaagcacggcgaggactggggaaaggtgtacgacgaggcctgggagcggattgacaagaaagtggaaggcctgagcaagcacatcaagctggaagaggaacggagaagcgaggacgcccagagcaaggccgccctgaccgactggctgcgggctaaggccagcttcgtgatcgagggcctgaaggaggccgacaaggacgagttctgcagatgcgagctgaagctgcagaagtggtacggggacctgcggggaaagcccttcgccatcgaagccgagaacagcatcctggacatcagcggcttcagcaagcagtacaactgtgccttcatctggcagaaggacggcgtgaagaagctgaacctgtacctgatcatcaactacttcaagggcggcaagctgcggttcaagaagatcaaacctgaagccttcgaagccaacagattctacaccgtgatcaacaaaaagagcggcgagatcgtgcccatggaggtgaacttcaacttcgacgaccccaacctgatcatcctgcctctggcctttggcaagagacagggcagagaattcatctggaacgacctgctgtccctggaaaccggcagcctgaagctggccaacggaagagtgatcgagaagacactgtacaacagaagaacccggcaggatgagcctgccctgttcgtggccctgaccttcgagcggcgggaggtcctggactcctccaatatcaaaccaatgaacctgatcggcgtggcaagaggcgaaaacatccccgccgtgatcgccctgaccgaccccgagggctgcccactgagccggtttaaggatagcctgggaaacccaacccacatcctgagaatcggcgagagctataaggagaagcagcggaccatccaggccaagaaggaggtggagcagcggagagccggcggctacagccggaagtacgccagcaaagccaagaatctggcagacgatatggtgagaaacaccgctagagatctgctgtactacgccgtgacccaggatgccatgctgatcttcgccaacctgagccggggcttcggccggcagggcaagcggaccttcatggccgagagacagtacacacggatggaggactggctgaccgccaagctggcctacgagggcctgagcaagacctacctgtccaagacactggcccagtacacctccaagacatgcagcaactgtgggtttaccatcaccagcgccgactacgacagggtgctggagaagctgaagaagacagcaacaggctggatgaccacaattaacggcaaggagctgaaggtggagggccagattacctactacaacagatacaagagacagaacgtagtcaaggacctgtccgtcgagctggatagactgagcgaagaatctgtgaacaacgacatctcctcctggacaaagggcagaagcggagaagctctgagcctcctgaagaaaagattctcccatagacccgtgcaggagaagttcgtgtgcctgaactgcggcttcgagacacacgcagccgagcaagccgccctgaacatcgccagatcctggctgttcctgcggagccaggagtacaagaaataccagacaaacaagacaaccggcaacaccgataagagagccttcgtcgagacctggcagtccttttaccggaagaagcttaaggaggtgtggaaacctgccgtgcggtctggcggatctggcggaggctccacaagcatgaacatggagggcctggtgatgttccaggacctgagcatcgacttcagccaggaggagtgggagtgcctgaaccccgcccagaaggacctgtacagggacgtgatgatggagaactacagcagcctgctgagcctgggcctgagcatccccaagcccgacgtgatcagcctgctggagcagggcaaggagccctggatggtgagcagggacatcctgggcggctggtgccccgacaggctgaccagccccaagaaaaagagaaaagtctaagctgccttctgcggggcttgccttctggccatgcccttcttctctcccttgcacctgtacctcttggtctttgaataaagcctgagtaggaaggctagcaaaaaaaaaaaaaaaaaaaaaaaaaaaaaaaaaaaaaaaaaaaaaaaaaaaaaaaaaaaaaaaaaaaaaaaaaaaaaaaa

SEQ ID NO: 3116 - RNA, 5419 nt, synthetic construct
  source 1..5419: mol_type = other RNA
aggaaataagagagaaaagaagagtaagaagaaatataagagccaccatggcccctaagaagaagcgtaaagtgagccgggtgaacggcagcggcagcggcggcggcatgaaccacgaccaggagttcgacccccctaaggtgtaccctcccgtccccgccgagaagagaaagcccatccgggtcctgagcctgttcgatggcatcgccaccggtctgctggtgctgaaggacctgggcatccaggtggataggtacattgcctccgaggtgtgcgaggactccatcaccgtgggaatggtgcgtcatcagggcaagatcatgtacgtgggcgacgtgcggagcgtgacacagaagcatatccaggagtggggccctttcgacctggtgatcggcggcagcccttgcaatgacctgagcatcgtgaacccagcccggaagggcctgtacgagggaaccggcagactgttcttcgagttttacagactgctgcacgacgcccggcctaaggaaggcgacgaccggcccttcttttggctgttcgagaatgtggtggccatgggagtcagcgacaagcgggatattagccggttcctggagagcaaccccgtgatgatcgatgccaaggaagtgagcgccgcccaccgggccagatacttctggggcaatctgcctggcatgaacagacccctggccagcaccgtgaacgacaagctggagctgcaggagtgcctggagcacggccggatcgccaagttcagcaaggtgagaaccatcaccacccgaagcaacagcatcaaacaaggcaaggaccagcactttcctgtgttcatgaacgagaaggaggacatcctgtggtgtaccgagatggagagagtgttcgggttcccagtccactacacagatgtcagcaacatgtctagactggccagacagagactgctgggaagaagctggtccgtccctgtgatcagacacctgttcgcccctctgaaggagtacttcgcctgcgtgagcagcggcaacagcaacgccaacagccggggccccagcttctctagcggcctggtgccactgtccctgagagggagccacatgggccccatggagatctacaaaaccgtgagcgcctggaagcggcagcctgtgcgcgtgctgagcctgtttcggaatatcgataaagtcctgaaaagcctgggattcctggagagcggctctggctccggcggtggcaccctgaagtacgtggaggatgtgacaaacgtggtcagacgggatgtggagaagtggggccccttcgatctggtgtacggcagcacccaacccctgggcagctcttgtgaccggtgccctggctggtacatgtttcagttccaccggatcctgcagtacgccctgccgagacaggagtcccagcggccattcttttggattttcatggacaacttgctgctgaccgaggatgaccaggaaactaccactcggttcctgcagaccgaagccgtgaccctgcaggacgtgagaggccgggactaccagaacgccatgcgggtgtggtccaacatccctggactgaaaagcaagcacgcacctctgacccctaaagaagaggagtacctgcaggcccaggtgcggagcagaagcaagctggacgcccctaaggtggatctgctggtgaagaattgcctcctgcccctgagagagtacttcaagtatttcagccagaatagtctgcccctgggcggcccaagcagcggcgcccctcctcccagcggcggcagcccagccggctccccaacctctaccgaggagggcacctctgagtccgccacccccgagagcggccctggcacctccaccgagcccagcgagggcagcgcacccggcagccctgccggcagccccacctccacagaggagggaaccagcaccgagcccagcgaaggcagcgccccaggcaccagcaccgagcctagtgagggcggctctggcggcggcagcgcccaggagattaaacggatcaacaagatcagaagaagacttgtgaaagacagcaacaccaagaaggccggcaagacaggccccatgaaaaccctgctggttagagtgatgacacccgatctgagagagcggctggaaaacctgagaaagaagcctgaaaatatcccccagcccatcagcaatacatctagagccaacctgaataagctgctgaccgattacaccgaaatgaagaaggcgatcctgcatgtgtactgggaagagttccagaaggaccctgtgggcctgatgagccgggtggcccagcctgccagcaagaagatcgatcagaacaagctgaaacctgagatggacgagaagggcaacctgaccaccgccggctttgcctgctctcagtgtggccagcccctgttcgtgtacaagctggagcaggtgtctgagaagggcaaggcttacaccaactacttcggacggtgcaatgtggccgagcacgaaaagctgatcctgctggcccagctgaagcccgagaaggatagcgacgaagccgtgacatatagcctgggaaagtttgggcagagggccctggatttctacagcattcatgtgaccaaggagtccacccaccccgtgaagcccctggcccagatcgccggaaacagatacgcctccggacctgtgggaaaggccctgagcgacgcatgtatgggcacaatcgcctccttcctgtctaagtaccaggacatcatcatcgaacaccagaaggtggtgaagggcaaccagaagagactggagagcctgcgggagctggccggcaaggaaaacctggaataccctagcgtgaccctgccacctcagcctcacaccaaggagggcgttgatgcctacaacgaagtgatcgcccgggtgcgaatgtgggtgaacctgaacctgtggcagaagctgaagctaagcagagatgatgccaagcctctgctgagactgaagggattcccttcctttcctctggtcgagagacaggccaacgaagtggactggtgggacatggtgtgtaacgtgaagaagctgatcaacgagaaaaaggaggatggcaaggtgttttggcagaatctggctggctacaagagacaggaagccctgagaccatacctgagcagcgaggaagatcggaagaagggaaagaaattcgctcggtaccagctgggcgacctgctgctgcacctggaaaagaagcacggcgaggactggggaaaggtgtacgacgaggcctgggagcggattgacaagaaagtggaaggcctgagcaagcacatcaagctggaagaggaacggagaagcgaggacgcccagagcaaggccgccctgaccgactggctgcgggctaaggccagcttcgtgatcgagggcctgaaggaggccgacaaggacgagttctgcagatgcgagctgaagctgcagaagtggtacggggacctgcggggaaagcccttcgccatcgaagccgagaacagcatcctggacatcagcggcttcagcaagcagtacaactgtgccttcatctggcagaaggacggcgtgaagaagctgaacctgtacctgatcatcaactacttcaagggcggcaagctgcggttcaagaagatcaaacctgaagccttcgaagccaacagattctacaccgtgatcaacaaaaagagcggcgagatcgtgcccatggaggtgaacttcaacttcgacgaccccaacctgatcatcctgcctctggcctttggcaagagacagggcagagaattcatctggaacgacctgctgtccctggaaaccggcagcctgaagctggccaacggaagagtgatcgagaagacactgtacaacagaagaacccggcaggatgagcctgccctgttcgtggccctgaccttcgagcggcgggaggtcctggactcctccaatatcaaaccaatgaacctgatcggcgtggcaagaggcgaaaacatccccgccgtgatcgccctgaccgaccccgagggctgcccactgagccggtttaaggatagcctgggaaacccaacccacatcctgagaatcggcgagagctataaggagaagcagcggaccatccaggccaagaaggaggtggagcagcggagagccggcggctacagccggaagtacgccagcaaagccaagaatctggcagacgatatggtgagaaacaccgctagagatctgctgtactacgccgtgacccaggatgccatgctgatcttcgccaacctgagccggggcttcggccggcagggcaagcggaccttcatggccgagagacagtacacacggatggaggactggctgaccgccaagctggcctacgagggcctgagcaagacctacctgtccaagacactggcccagtacacctccaagacatgcagcaactgtgggtttaccatcaccagcgccgactacgacagggtgctggagaagctgaagaagacagcaacaggctggatgaccacaattaacggcaaggagctgaaggtggagggccagattacctactacaacagatacaagagacagaacgtagtcaaggacctgtccgtcgagctggatagactgagcgaagaatctgtgaacaacgacatctcctcctggacaaagggcagaagcggagaagctctgagcctcctgaagaaaagattctcccatagacccgtgcaggagaagttcgtgtgcctgaactgcggcttcgagacacacgcagccgagcaagccgccctgaacatcgccagatcctggctgttcctgcggagccaggagtacaagaaataccagacaaacaagacaaccggcaacaccgataagagagccttcgtcgagacctggcagtccttttaccggaagaagcttaaggaggtgtggaaacctgccgtgcggtctggcggatctggcggaggctccacaagcaggcaggagcccgtgaccttcgaggacgtggccgtgtacttcacccagaacgagtgggccagcctggacagcgtgcagagggccctgtacagggaggtgatgctggagaactacgccaacgtggccagcctggccttccccttcaccacccccgtgctggtgagccagctggagcagggcgagctgccctggggcctggacccctgggagcccatgggcagggaggccctgaggggcatctgcaccagccccaagaaaaagagaaaagtctaagctgccttctgcggggcttgccttctggccatgcccttcttctctcccttgcacctgtacctcttggtctttgaataaagcctgagtaggaaggctagcaaaaaaaaaaaaaaaaaaaaaaaaaaaaaaaaaaaaaaaaaaaaaaaaaaaaaaaaaaaaaaaaaaaaaaaaaaaaaaaa

SEQ ID NO: 3117 - RNA, 5419 nt, synthetic construct
  source 1..5419: mol_type = other RNA
aggaaataagagagaaaagaagagtaagaagaaatataagagccaccatggcccctaagaagaagcgtaaagtgagccgggtgaacggcagcggcagcggcggcggcatgaaccacgaccaggagttcgacccccctaaggtgtaccctcccgtccccgccgagaagagaaagcccatccgggtcctgagcctgttcgatggcatcgccaccggtctgctggtgctgaaggacctgggcatccaggtggataggtacattgcctccgaggtgtgcgaggactccatcaccgtgggaatggtgcgtcatcagggcaagatcatgtacgtgggcgacgtgcggagcgtgacacagaagcatatccaggagtggggccctttcgacctggtgatcggcggcagcccttgcaatgacctgagcatcgtgaacccagcccggaagggcctgtacgagggaaccggcagactgttcttcgagttttacagactgctgcacgacgcccggcctaaggaaggcgacgaccggcccttcttttggctgttcgagaatgtggtggccatgggagtcagcgacaagcgggatattagccggttcctggagagcaaccccgtgatgatcgatgccaaggaagtgagcgccgcccaccgggccagatacttctggggcaatctgcctggcatgaacagacccctggccagcaccgtgaacgacaagctggagctgcaggagtgcctggagcacggccggatcgccaagttcagcaaggtgagaaccatcaccacccgaagcaacagcatcaaacaaggcaaggaccagcactttcctgtgttcatgaacgagaaggaggacatcctgtggtgtaccgagatggagagagtgttcgggttcccagtccactacacagatgtcagcaacatgtctagactggccagacagagactgctgggaagaagctggtccgtccctgtgatcagacacctgttcgcccctctgaaggagtacttcgcctgcgtgagcagcggcaacagcaacgccaacagccggggccccagcttctctagcggcctggtgccactgtccctgagagggagccacatgggccccatggagatctacaaaaccgtgagcgcctggaagcggcagcctgtgcgcgtgctgagcctgtttcggaatatcgataaagtcctgaaaagcctgggattcctggagagcggctctggctccggcggtggcaccctgaagtacgtggaggatgtgacaaacgtggtcagacgggatgtggagaagtggggccccttcgatctggtgtacggcagcacccaacccctgggcagctcttgtgaccggtgccctggctggtacatgtttcagttccaccggatcctgcagtacgccctgccgagacaggagtcccagcggccattcttttggattttcatggacaacttgctgctgaccgaggatgaccaggaaactaccactcggttcctgcagaccgaagccgtgaccctgcaggacgtgagaggccgggactaccagaacgccatgcgggtgtggtccaacatccctggactgaaaagcaagcacgcacctctgacccctaaagaagaggagtacctgcaggcccaggtgcggagcagaagcaagctggacgcccctaaggtggatctgctggtgaagaattgcctcctgcccctgagagagtacttcaagtatttcagccagaatagtctgcccctgggcggcccaagcagcggcgcccctcctcccagcggcggcagcccagccggctccccaacctctaccgaggagggcacctctgagtccgccacccccgagagcggccctggcacctccaccgagcccagcgagggcagcgcacccggcagccctgccggcagccccacctccacagaggagggaaccagcaccgagcccagcgaaggcagcgccccaggcaccagcaccgagcctagtgagggcggctctggcggcggcagcgcccaggagattaaacggatcaacaagatcagaagaagacttgtgaaagacagcaacaccaagaaggccggcaagacaggccccatgaaaaccctgctggttagagtgatgacacccgatctgagagagcggctggaaaacctgagaaagaagcctgaaaatatcccccagcccatcagcaatacatctagagccaacctgaataagctgctgaccgattacaccgaaatgaagaaggcgatcctgcatgtgtactgggaagagttccagaaggaccctgtgggcctgatgagccgggtggcccagcctgccagcaagaagatcgatcagaacaagctgaaacctgagatggacgagaagggcaacctgaccaccgccggctttgcctgctctcagtgtggccagcccctgttcgtgtacaagctggagcaggtgtctgagaagggcaaggcttacaccaactacttcggacggtgcaatgtggccgagcacgaaaagctgatcctgctggcccagctgaagcccgagaaggatagcgacgaagccgtgacatatagcctgggaaagtttgggcagagggccctggatttctacagcattcatgtgaccaaggagtccacccaccccgtgaagcccctggcccagatcgccggaaacagatacgcctccggacctgtgggaaaggccctgagcgacgcatgtatgggcacaatcgcctccttcctgtctaagtaccaggacatcatcatcgaacaccagaaggtggtgaagggcaaccagaagagactggagagcctgcgggagctggccggcaaggaaaacctggaataccctagcgtgaccctgccacctcagcctcacaccaaggagggcgttgatgcctacaacgaagtgatcgcccgggtgcgaatgtgggtgaacctgaacctgtggcagaagctgaagctaagcagagatgatgccaagcctctgctgagactgaagggattcccttcctttcctctggtcgagagacaggccaacgaagtggactggtgggacatggtgtgtaacgtgaagaagctgatcaacgagaaaaaggaggatggcaaggtgttttggcagaatctggctggctacaagagacaggaagccctgagaccatacctgagcagcgaggaagatcggaagaagggaaagaaattcgctcggtaccagctgggcgacctgctgctgcacctggaaaagaagcacggcgaggactggggaaaggtgtacgacgaggcctgggagcggattgacaagaaagtggaaggcctgagcaagcacatcaagctggaagaggaacggagaagcgaggacgcccagagcaaggccgccctgaccgactggctgcgggctaaggccagcttcgtgatcgagggcctgaaggaggccgacaaggacgagttctgcagatgcgagctgaagctgcagaagtggtacggggacctgcggggaaagcccttcgccatcgaagccgagaacagcatcctggacatcagcggcttcagcaagcagtacaactgtgccttcatctggcagaaggacggcgtgaagaagctgaacctgtacctgatcatcaactacttcaagggcggcaagctgcggttcaagaagatcaaacctgaagccttcgaagccaacagattctacaccgtgatcaacaaaaagagcggcgagatcgtgcccatggaggtgaacttcaacttcgacgaccccaacctgatcatcctgcctctggcctttggcaagagacagggcagagaattcatctggaacgacctgctgtccctggaaaccggcagcctgaagctggccaacggaagagtgatcgagaagacactgtacaacagaagaacccggcaggatgagcctgccctgttcgtggccctgaccttcgagcggcgggaggtcctggactcctccaatatcaaaccaatgaacctgatcggcgtggcaagaggcgaaaacatccccgccgtgatcgccctgaccgaccccgagggctgcccactgagccggtttaaggatagcctgggaaacccaacccacatcctgagaatcggcgagagctataaggagaagcagcggaccatccaggccaagaaggaggtggagcagcggagagccggcggctacagccggaagtacgccagcaaagccaagaatctggcagacgatatggtgagaaacaccgctagagatctgctgtactacgccgtgacccaggatgccatgctgatcttcgccaacctgagccggggcttcggccggcagggcaagcggaccttcatggccgagagacagtacacacggatggaggactggctgaccgccaagctggcctacgagggcctgagcaagacctacctgtccaagacactggcccagtacacctccaagacatgcagcaactgtgggtttaccatcaccagcgccgactacgacagggtgctggagaagctgaagaagacagcaacaggctggatgaccacaattaacggcaaggagctgaaggtggagggccagattacctactacaacagatacaagagacagaacgtagtcaaggacctgtccgtcgagctggatagactgagcgaagaatctgtgaacaacgacatctcctcctggacaaagggcagaagcggagaagctctgagcctcctgaagaaaagattctcccatagacccgtgcaggagaagttcgtgtgcctgaactgcggcttcgagacacacgcagccgagcaagccgccctgaacatcgccagatcctggctgttcctgcggagccaggagtacaagaaataccagacaaacaagacaaccggcaacaccgataagagagccttcgtcgagacctggcagtccttttaccggaagaagcttaaggaggtgtggaaacctgccgtgcggtctggcggatctggcggaggctccacaagcgtgaccttcgaggaggtggccgtgtacttcagcgccgaggagtgggccctgctgggccccgcccagagggccctgtacagggaggtgatgagggagaactacgaggccgtgaccagcctggcctgggccggcctgcccatcagcaagcccgacctgatcagctgcatggagaggggcgaggagccctgggtggcccacctgcagagccagaggaggagggagctgcccaggggcaggaacagcaccagccccaagaaaaagagaaaagtctaagctgccttctgcggggcttgccttctggccatgcccttcttctctcccttgcacctgtacctcttggtctttgaataaagcctgagtaggaaggctagcaaaaaaaaaaaaaaaaaaaaaaaaaaaaaaaaaaaaaaaaaaaaaaaaaaaaaaaaaaaaaaaaaaaaaaaaaaaaaaaa

SEQ ID NO: 3118 - RNA, 5419 nt, synthetic construct
  source 1..5419: mol_type = other RNA
aggaaataagagagaaaagaagagtaagaagaaatataagagccaccatggcccctaagaagaagcgtaaagtgagccgggtgaacggcagcggcagcggcggcggcatgaaccacgaccaggagttcgacccccctaaggtgtaccctcccgtccccgccgagaagagaaagcccatccgggtcctgagcctgttcgatggcatcgccaccggtctgctggtgctgaaggacctgggcatccaggtggataggtacattgcctccgaggtgtgcgaggactccatcaccgtgggaatggtgcgtcatcagggcaagatcatgtacgtgggcgacgtgcggagcgtgacacagaagcatatccaggagtggggccctttcgacctggtgatcggcggcagcccttgcaatgacctgagcatcgtgaacccagcccggaagggcctgtacgagggaaccggcagactgttcttcgagttttacagactgctgcacgacgcccggcctaaggaaggcgacgaccggcccttcttttggctgttcgagaatgtggtggccatgggagtcagcgacaagcgggatattagccggttcctggagagcaaccccgtgatgatcgatgccaaggaagtgagcgccgcccaccgggccagatacttctggggcaatctgcctggcatgaacagacccctggccagcaccgtgaacgacaagctggagctgcaggagtgcctggagcacggccggatcgccaagttcagcaaggtgagaaccatcaccacccgaagcaacagcatcaaacaaggcaaggaccagcactttcctgtgttcatgaacgagaaggaggacatcctgtggtgtaccgagatggagagagtgttcgggttcccagtccactacacagatgtcagcaacatgtctagactggccagacagagactgctgggaagaagctggtccgtccctgtgatcagacacctgttcgcccctctgaaggagtacttcgcctgcgtgagcagcggcaacagcaacgccaacagccggggccccagcttctctagcggcctggtgccactgtccctgagagggagccacatgggccccatggagatctacaaaaccgtgagcgcctggaagcggcagcctgtgcgcgtgctgagcctgtttcggaatatcgataaagtcctgaaaagcctgggattcctggagagcggctctggctccggcggtggcaccctgaagtacgtggaggatgtgacaaacgtggtcagacgggatgtggagaagtggggccccttcgatctggtgtacggcagcacccaacccctgggcagctcttgtgaccggtgccctggctggtacatgtttcagttccaccggatcctgcagtacgccctgccgagacaggagtcccagcggccattcttttggattttcatggacaacttgctgctgaccgaggatgaccaggaaactaccactcggttcctgcagaccgaagccgtgaccctgcaggacgtgagaggccgggactaccagaacgccatgcgggtgtggtccaacatccctggactgaaaagcaagcacgcacctctgacccctaaagaagaggagtacctgcaggcccaggtgcggagcagaagcaagctggacgcccctaaggtggatctgctggtgaagaattgcctcctgcccctgagagagtacttcaagtatttcagccagaatagtctgcccctgggcggcccaagcagcggcgcccctcctcccagcggcggcagcccagccggctccccaacctctaccgaggagggcacctctgagtccgccacccccgagagcggccctggcacctccaccgagcccagcgagggcagcgcacccggcagccctgccggcagccccacctccacagaggagggaaccagcaccgagcccagcgaaggcagcgccccaggcaccagcaccgagcctagtgagggcggctctggcggcggcagcgcccaggagattaaacggatcaacaagatcagaagaagacttgtgaaagacagcaacaccaagaaggccggcaagacaggccccatgaaaaccctgctggttagagtgatgacacccgatctgagagagcggctggaaaacctgagaaagaagcctgaaaatatcccccagcccatcagcaatacatctagagccaacctgaataagctgctgaccgattacaccgaaatgaagaaggcgatcctgcatgtgtactgggaagagttccagaaggaccctgtgggcctgatgagccgggtggcccagcctgccagcaagaagatcgatcagaacaagctgaaacctgagatggacgagaagggcaacctgaccaccgccggctttgcctgctctcagtgtggccagcccctgttcgtgtacaagctggagcaggtgtctgagaagggcaaggcttacaccaactacttcggacggtgcaatgtggccgagcacgaaaagctgatcctgctggcccagctgaagcccgagaaggatagcgacgaagccgtgacatatagcctgggaaagtttgggcagagggccctggatttctacagcattcatgtgaccaaggagtccacccaccccgtgaagcccctggcccagatcgccggaaacagatacgcctccggacctgtgggaaaggccctgagcgacgcatgtatgggcacaatcgcctccttcctgtctaagtaccaggacatcatcatcgaacaccagaaggtggtgaagggcaaccagaagagactggagagcctgcgggagctggccggcaaggaaaacctggaataccctagcgtgaccctgccacctcagcctcacaccaaggagggcgttgatgcctacaacgaagtgatcgcccgggtgcgaatgtgggtgaacctgaacctgtggcagaagctgaagctaagcagagatgatgccaagcctctgctgagactgaagggattcccttcctttcctctggtcgagagacaggccaacgaagtggactggtgggacatggtgtgtaacgtgaagaagctgatcaacgagaaaaaggaggatggcaaggtgttttggcagaatctggctggctacaagagacaggaagccctgagaccatacctgagcagcgaggaagatcggaagaagggaaagaaattcgctcggtaccagctgggcgacctgctgctgcacctggaaaagaagcacggcgaggactggggaaaggtgtacgacgaggcctgggagcggattgacaagaaagtggaaggcctgagcaagcacatcaagctggaagaggaacggagaagcgaggacgcccagagcaaggccgccctgaccgactggctgcgggctaaggccagcttcgtgatcgagggcctgaaggaggccgacaaggacgagttctgcagatgcgagctgaagctgcagaagtggtacggggacctgcggggaaagcccttcgccatcgaagccgagaacagcatcctggacatcagcggcttcagcaagcagtacaactgtgccttcatctggcagaaggacggcgtgaagaagctgaacctgtacctgatcatcaactacttcaagggcggcaagctgcggttcaagaagatcaaacctgaagccttcgaagccaacagattctacaccgtgatcaacaaaaagagcggcgagatcgtgcccatggaggtgaacttcaacttcgacgaccccaacctgatcatcctgcctctggcctttggcaagagacagggcagagaattcatctggaacgacctgctgtccctggaaaccggcagcctgaagctggccaacggaagagtgatcgagaagacactgtacaacagaagaacccggcaggatgagcctgccctgttcgtggccctgaccttcgagcggcgggaggtcctggactcctccaatatcaaaccaatgaacctgatcggcgtggcaagaggcgaaaacatccccgccgtgatcgccctgaccgaccccgagggctgcccactgagccggtttaaggatagcctgggaaacccaacccacatcctgagaatcggcgagagctataaggagaagcagcggaccatccaggccaagaaggaggtggagcagcggagagccggcggctacagccggaagtacgccagcaaagccaagaatctggcagacgatatggtgagaaacaccgctagagatctgctgtactacgccgtgacccaggatgccatgctgatcttcgccaacctgagccggggcttcggccggcagggcaagcggaccttcatggccgagagacagtacacacggatggaggactggctgaccgccaagctggcctacgagggcctgagcaagacctacctgtccaagacactggcccagtacacctccaagacatgcagcaactgtgggtttaccatcaccagcgccgactacgacagggtgctggagaagctgaagaagacagcaacaggctggatgaccacaattaacggcaaggagctgaaggtggagggccagattacctactacaacagatacaagagacagaacgtagtcaaggacctgtccgtcgagctggatagactgagcgaagaatctgtgaacaacgacatctcctcctggacaaagggcagaagcggagaagctctgagcctcctgaagaaaagattctcccatagacccgtgcaggagaagttcgtgtgcctgaactgcggcttcgagacacacgcagccgagcaagccgccctgaacatcgccagatcctggctgttcctgcggagccaggagtacaagaaataccagacaaacaagacaaccggcaacaccgataagagagccttcgtcgagacctggcagtccttttaccggaagaagcttaaggaggtgtggaaacctgccgtgcggtctggcggatctggcggaggctccacaagcgtgcagggcagcatgagcttcgaggacgtgatcgtggagttcacccaggacgagtggcagtacatgagccccgcccagaggatcctgtacagggacgtgatgctggagaactacagccacctgatcagcgtgggctactgcaccaccaagcccgagatgatcttcaagctggagcagggcgaggagccctggagcctggaggaggagttcctgaaccagaggtaccccggctacttcagcgtgaccagccccaagaaaaagagaaaagtctaagctgccttctgcggggcttgccttctggccatgcccttcttctctcccttgcacctgtacctcttggtctttgaataaagcctgagtaggaaggctagcaaaaaaaaaaaaaaaaaaaaaaaaaaaaaaaaaaaaaaaaaaaaaaaaaaaaaaaaaaaaaaaaaaaaaaaaaaaaaaaa

SEQ ID NO: 3119 - RNA, 5419 nt, synthetic construct
  source 1..5419: mol_type = other RNA
aggaaataagagagaaaagaagagtaagaagaaatataagagccaccatggcccctaagaagaagcgtaaagtgagccgggtgaacggcagcggcagcggcggcggcatgaaccacgaccaggagttcgacccccctaaggtgtaccctcccgtccccgccgagaagagaaagcccatccgggtcctgagcctgttcgatggcatcgccaccggtctgctggtgctgaaggacctgggcatccaggtggataggtacattgcctccgaggtgtgcgaggactccatcaccgtgggaatggtgcgtcatcagggcaagatcatgtacgtgggcgacgtgcggagcgtgacacagaagcatatccaggagtggggccctttcgacctggtgatcggcggcagcccttgcaatgacctgagcatcgtgaacccagcccggaagggcctgtacgagggaaccggcagactgttcttcgagttttacagactgctgcacgacgcccggcctaaggaaggcgacgaccggcccttcttttggctgttcgagaatgtggtggccatgggagtcagcgacaagcgggatattagccggttcctggagagcaaccccgtgatgatcgatgccaaggaagtgagcgccgcccaccgggccagatacttctggggcaatctgcctggcatgaacagacccctggccagcaccgtgaacgacaagctggagctgcaggagtgcctggagcacggccggatcgccaagttcagcaaggtgagaaccatcaccacccgaagcaacagcatcaaacaaggcaaggaccagcactttcctgtgttcatgaacgagaaggaggacatcctgtggtgtaccgagatggagagagtgttcgggttcccagtccactacacagatgtcagcaacatgtctagactggccagacagagactgctgggaagaagctggtccgtccctgtgatcagacacctgttcgcccctctgaaggagtacttcgcctgcgtgagcagcggcaacagcaacgccaacagccggggccccagcttctctagcggcctggtgccactgtccctgagagggagccacatgggccccatggagatctacaaaaccgtgagcgcctggaagcggcagcctgtgcgcgtgctgagcctgtttcggaatatcgataaagtcctgaaaagcctgggattcctggagagcggctctggctccggcggtggcaccctgaagtacgtggaggatgtgacaaacgtggtcagacgggatgtggagaagtggggccccttcgatctggtgtacggcagcacccaacccctgggcagctcttgtgaccggtgccctggctggtacatgtttcagttccaccggatcctgcagtacgccctgccgagacaggagtcccagcggccattcttttggattttcatggacaacttgctgctgaccgaggatgaccaggaaactaccactcggttcctgcagaccgaagccgtgaccctgcaggacgtgagaggccgggactaccagaacgccatgcgggtgtggtccaacatccctggactgaaaagcaagcacgcacctctgacccctaaagaagaggagtacctgcaggcccaggtgcggagcagaagcaagctggacgcccctaaggtggatctgctggtgaagaattgcctcctgcccctgagagagtacttcaagtatttcagccagaatagtctgcccctgggcggcccaagcagcggcgcccctcctcccagcggcggcagcccagccggctccccaacctctaccgaggagggcacctctgagtccgccacccccgagagcggccctggcacctccaccgagcccagcgagggcagcgcacccggcagccctgccggcagccccacctccacagaggagggaaccagcaccgagcccagcgaaggcagcgccccaggcaccagcaccgagcctagtgagggcggctctggcggcggcagcgcccaggagattaaacggatcaacaagatcagaagaagacttgtgaaagacagcaacaccaagaaggccggcaagacaggccccatgaaaaccctgctggttagagtgatgacacccgatctgagagagcggctggaaaacctgagaaagaagcctgaaaatatcccccagcccatcagcaatacatctagagccaacctgaataagctgctgaccgattacaccgaaatgaagaaggcgatcctgcatgtgtactgggaagagttccagaaggaccctgtgggcctgatgagccgggtggcccagcctgccagcaagaagatcgatcagaacaagctgaaacctgagatggacgagaagggcaacctgaccaccgccggctttgcctgctctcagtgtggccagcccctgttcgtgtacaagctggagcaggtgtctgagaagggcaaggcttacaccaactacttcggacggtgcaatgtggccgagcacgaaaagctgatcctgctggcccagctgaagcccgagaaggatagcgacgaagccgtgacatatagcctgggaaagtttgggcagagggccctggatttctacagcattcatgtgaccaaggagtccacccaccccgtgaagcccctggcccagatcgccggaaacagatacgcctccggacctgtgggaaaggccctgagcgacgcatgtatgggcacaatcgcctccttcctgtctaagtaccaggacatcatcatcgaacaccagaaggtggtgaagggcaaccagaagagactggagagcctgcgggagctggccggcaaggaaaacctggaataccctagcgtgaccctgccacctcagcctcacaccaaggagggcgttgatgcctacaacgaagtgatcgcccgggtgcgaatgtgggtgaacctgaacctgtggcagaagctgaagctaagcagagatgatgccaagcctctgctgagactgaagggattcccttcctttcctctggtcgagagacaggccaacgaagtggactggtgggacatggtgtgtaacgtgaagaagctgatcaacgagaaaaaggaggatggcaaggtgttttggcagaatctggctggctacaagagacaggaagccctgagaccatacctgagcagcgaggaagatcggaagaagggaaagaaattcgctcggtaccagctgggcgacctgctgctgcacctggaaaagaagcacggcgaggactggggaaaggtgtacgacgaggcctgggagcggattgacaagaaagtggaaggcctgagcaagcacatcaagctggaagaggaacggagaagcgaggacgcccagagcaaggccgccctgaccgactggctgcgggctaaggccagcttcgtgatcgagggcctgaaggaggccgacaaggacgagttctgcagatgcgagctgaagctgcagaagtggtacggggacctgcggggaaagcccttcgccatcgaagccgagaacagcatcctggacatcagcggcttcagcaagcagtacaactgtgccttcatctggcagaaggacggcgtgaagaagctgaacctgtacctgatcatcaactacttcaagggcggcaagctgcggttcaagaagatcaaacctgaagccttcgaagccaacagattctacaccgtgatcaacaaaaagagcggcgagatcgtgcccatggaggtgaacttcaacttcgacgaccccaacctgatcatcctgcctctggcctttggcaagagacagggcagagaattcatctggaacgacctgctgtccctggaaaccggcagcctgaagctggccaacggaagagtgatcgagaagacactgtacaacagaagaacccggcaggatgagcctgccctgttcgtggccctgaccttcgagcggcgggaggtcctggactcctccaatatcaaaccaatgaacctgatcggcgtggcaagaggcgaaaacatccccgccgtgatcgccctgaccgaccccgagggctgcccactgagccggtttaaggatagcctgggaaacccaacccacatcctgagaatcggcgagagctataaggagaagcagcggaccatccaggccaagaaggaggtggagcagcggagagccggcggctacagccggaagtacgccagcaaagccaagaatctggcagacgatatggtgagaaacaccgctagagatctgctgtactacgccgtgacccaggatgccatgctgatcttcgccaacctgagccggggcttcggccggcagggcaagcggaccttcatggccgagagacagtacacacggatggaggactggctgaccgccaagctggcctacgagggcctgagcaagacctacctgtccaagacactggcccagtacacctccaagacatgcagcaactgtgggtttaccatcaccagcgccgactacgacagggtgctggagaagctgaagaagacagcaacaggctggatgaccacaattaacggcaaggagctgaaggtggagggccagattacctactacaacagatacaagagacagaacgtagtcaaggacctgtccgtcgagctggatagactgagcgaagaatctgtgaacaacgacatctcctcctggacaaagggcagaagcggagaagctctgagcctcctgaagaaaagattctcccatagacccgtgcaggagaagttcgtgtgcctgaactgcggcttcgagacacacgcagccgagcaagccgccctgaacatcgccagatcctggctgttcctgcggagccaggagtacaagaaataccagacaaacaagacaaccggcaacaccgataagagagccttcgtcgagacctggcagtccttttaccggaagaagcttaaggaggtgtggaaacctgccgtgcggtctggcggatctggcggaggctccacaagcatggcccacctgatgttcagggacgtggccatcgacttcagccaggaggagtgggagggcctggacctgaagcagagggacctgtacagggacgtgatgctggagaactacagcaacatggtgagcctgggcctgtgcatctaccagcccgacgtgttcagcctgctggagaagggcaaggagccctggaagatcctgagggacgagaccaggggcccctgccccgacatgcagagcaggtgcaccagccccaagaaaaagagaaaagtctaagctgccttctgcggggcttgccttctggccatgcccttcttctctcccttgcacctgtacctcttggtctttgaataaagcctgagtaggaaggctagcaaaaaaaaaaaaaaaaaaaaaaaaaaaaaaaaaaaaaaaaaaaaaaaaaaaaaaaaaaaaaaaaaaaaaaaaaaaaaaaa

SEQ ID NO: 3120 - RNA, 5419 nt, synthetic construct
  source 1..5419: mol_type = other RNA
aggaaataagagagaaaagaagagtaagaagaaatataagagccaccatggcccctaagaagaagcgtaaagtgagccgggtgaacggcagcggcagcggcggcggcatgaaccacgaccaggagttcgacccccctaaggtgtaccctcccgtccccgccgagaagagaaagcccatccgggtcctgagcctgttcgatggcatcgccaccggtctgctggtgctgaaggacctgggcatccaggtggataggtacattgcctccgaggtgtgcgaggactccatcaccgtgggaatggtgcgtcatcagggcaagatcatgtacgtgggcgacgtgcggagcgtgacacagaagcatatccaggagtggggccctttcgacctggtgatcggcggcagcccttgcaatgacctgagcatcgtgaacccagcccggaagggcctgtacgagggaaccggcagactgttcttcgagttttacagactgctgcacgacgcccggcctaaggaaggcgacgaccggcccttcttttggctgttcgagaatgtggtggccatgggagtcagcgacaagcgggatattagccggttcctggagagcaaccccgtgatgatcgatgccaaggaagtgagcgccgcccaccgggccagatacttctggggcaatctgcctggcatgaacagacccctggccagcaccgtgaacgacaagctggagctgcaggagtgcctggagcacggccggatcgccaagttcagcaaggtgagaaccatcaccacccgaagcaacagcatcaaacaaggcaaggaccagcactttcctgtgttcatgaacgagaaggaggacatcctgtggtgtaccgagatggagagagtgttcgggttcccagtccactacacagatgtcagcaacatgtctagactggccagacagagactgctgggaagaagctggtccgtccctgtgatcagacacctgttcgcccctctgaaggagtacttcgcctgcgtgagcagcggcaacagcaacgccaacagccggggccccagcttctctagcggcctggtgccactgtccctgagagggagccacatgggccccatggagatctacaaaaccgtgagcgcctggaagcggcagcctgtgcgcgtgctgagcctgtttcggaatatcgataaagtcctgaaaagcctgggattcctggagagcggctctggctccggcggtggcaccctgaagtacgtggaggatgtgacaaacgtggtcagacgggatgtggagaagtggggccccttcgatctggtgtacggcagcacccaacccctgggcagctcttgtgaccggtgccctggctggtacatgtttcagttccaccggatcctgcagtacgccctgccgagacaggagtcccagcggccattcttttggattttcatggacaacttgctgctgaccgaggatgaccaggaaactaccactcggttcctgcagaccgaagccgtgaccctgcaggacgtgagaggccgggactaccagaacgccatgcgggtgtggtccaacatccctggactgaaaagcaagcacgcacctctgacccctaaagaagaggagtacctgcaggcccaggtgcggagcagaagcaagctggacgcccctaaggtggatctgctggtgaagaattgcctcctgcccctgagagagtacttcaagtatttcagccagaatagtctgcccctgggcggcccaagcagcggcgcccctcctcccagcggcggcagcccagccggctccccaacctctaccgaggagggcacctctgagtccgccacccccgagagcggccctggcacctccaccgagcccagcgagggcagcgcacccggcagccctgccggcagccccacctccacagaggagggaaccagcaccgagcccagcgaaggcagcgccccaggcaccagcaccgagcctagtgagggcggctctggcggcggcagcgcccaggagattaaacggatcaacaagatcagaagaagacttgtgaaagacagcaacaccaagaaggccggcaagacaggccccatgaaaaccctgctggttagagtgatgacacccgatctgagagagcggctggaaaacctgagaaagaagcctgaaaatatcccccagcccatcagcaatacatctagagccaacctgaataagctgctgaccgattacaccgaaatgaagaaggcgatcctgcatgtgtactgggaagagttccagaaggaccctgtgggcctgatgagccgggtggcccagcctgccagcaagaagatcgatcagaacaagctgaaacctgagatggacgagaagggcaacctgaccaccgccggctttgcctgctctcagtgtggccagcccctgttcgtgtacaagctggagcaggtgtctgagaagggcaaggcttacaccaactacttcggacggtgcaatgtggccgagcacgaaaagctgatcctgctggcccagctgaagcccgagaaggatagcgacgaagccgtgacatatagcctgggaaagtttgggcagagggccctggatttctacagcattcatgtgaccaaggagtccacccaccccgtgaagcccctggcccagatcgccggaaacagatacgcctccggacctgtgggaaaggccctgagcgacgcatgtatgggcacaatcgcctccttcctgtctaagtaccaggacatcatcatcgaacaccagaaggtggtgaagggcaaccagaagagactggagagcctgcgggagctggccggcaaggaaaacctggaataccctagcgtgaccctgccacctcagcctcacaccaaggagggcgttgatgcctacaacgaagtgatcgcccgggtgcgaatgtgggtgaacctgaacctgtggcagaagctgaagctaagcagagatgatgccaagcctctgctgagactgaagggattcccttcctttcctctggtcgagagacaggccaacgaagtggactggtgggacatggtgtgtaacgtgaagaagctgatcaacgagaaaaaggaggatggcaaggtgttttggcagaatctggctggctacaagagacaggaagccctgagaccatacctgagcagcgaggaagatcggaagaagggaaagaaattcgctcggtaccagctgggcgacctgctgctgcacctggaaaagaagcacggcgaggactggggaaaggtgtacgacgaggcctgggagcggattgacaagaaagtggaaggcctgagcaagcacatcaagctggaagaggaacggagaagcgaggacgcccagagcaaggccgccctgaccgactggctgcgggctaaggccagcttcgtgatcgagggcctgaaggaggccgacaaggacgagttctgcagatgcgagctgaagctgcagaagtggtacggggacctgcggggaaagcccttcgccatcgaagccgagaacagcatcctggacatcagcggcttcagcaagcagtacaactgtgccttcatctggcagaaggacggcgtgaagaagctgaacctgtacctgatcatcaactacttcaagggcggcaagctgcggttcaagaagatcaaacctgaagccttcgaagccaacagattctacaccgtgatcaacaaaaagagcggcgagatcgtgcccatggaggtgaacttcaacttcgacgaccccaacctgatcatcctgcctctggcctttggcaagagacagggcagagaattcatctggaacgacctgctgtccctggaaaccggcagcctgaagctggccaacggaagagtgatcgagaagacactgtacaacagaagaacccggcaggatgagcctgccctgttcgtggccctgaccttcgagcggcgggaggtcctggactcctccaatatcaaaccaatgaacctgatcggcgtggcaagaggcgaaaacatccccgccgtgatcgccctgaccgaccccgagggctgcccactgagccggtttaaggatagcctgggaaacccaacccacatcctgagaatcggcgagagctataaggagaagcagcggaccatccaggccaagaaggaggtggagcagcggagagccggcggctacagccggaagtacgccagcaaagccaagaatctggcagacgatatggtgagaaacaccgctagagatctgctgtactacgccgtgacccaggatgccatgctgatcttcgccaacctgagccggggcttcggccggcagggcaagcggaccttcatggccgagagacagtacacacggatggaggactggctgaccgccaagctggcctacgagggcctgagcaagacctacctgtccaagacactggcccagtacacctccaagacatgcagcaactgtgggtttaccatcaccagcgccgactacgacagggtgctggagaagctgaagaagacagcaacaggctggatgaccacaattaacggcaaggagctgaaggtggagggccagattacctactacaacagatacaagagacagaacgtagtcaaggacctgtccgtcgagctggatagactgagcgaagaatctgtgaacaacgacatctcctcctggacaaagggcagaagcggagaagctctgagcctcctgaagaaaagattctcccatagacccgtgcaggagaagttcgtgtgcctgaactgcggcttcgagacacacgcagccgagcaagccgccctgaacatcgccagatcctggctgttcctgcggagccaggagtacaagaaataccagacaaacaagacaaccggcaacaccgataagagagccttcgtcgagacctggcagtccttttaccggaagaagcttaaggaggtgtggaaacctgccgtgcggtctggcggatctggcggaggctccacaagcgcccacggcctggtgatgttcaaggacgtggccatcgacgtgagccaggaggagtgggagtgcctgaaccccacccagaggagcctgtacaaggacgtgatgctggagaactacagcaacctggtgagcctgggcctgagcatcagcaagcccgccgtgatcagcagcctggagcagggcaaggagccctggatggtggtgagggaggtgaccggcgagcagtgccccgacctggtgagcaggaccagccccaagaaaaagagaaaagtctaagctgccttctgcggggcttgccttctggccatgcccttcttctctcccttgcacctgtacctcttggtctttgaataaagcctgagtaggaaggctagcaaaaaaaaaaaaaaaaaaaaaaaaaaaaaaaaaaaaaaaaaaaaaaaaaaaaaaaaaaaaaaaaaaaaaaaaaaaaaaaa

SEQ ID NO: 3121 - RNA, 5419 nt, synthetic construct
  source 1..5419: mol_type = other RNA
aggaaataagagagaaaagaagagtaagaagaaatataagagccaccatggcccctaagaagaagcgtaaagtgagccgggtgaacggcagcggcagcggcggcggcatgaaccacgaccaggagttcgacccccctaaggtgtaccctcccgtccccgccgagaagagaaagcccatccgggtcctgagcctgttcgatggcatcgccaccggtctgctggtgctgaaggacctgggcatccaggtggataggtacattgcctccgaggtgtgcgaggactccatcaccgtgggaatggtgcgtcatcagggcaagatcatgtacgtgggcgacgtgcggagcgtgacacagaagcatatccaggagtggggccctttcgacctggtgatcggcggcagcccttgcaatgacctgagcatcgtgaacccagcccggaagggcctgtacgagggaaccggcagactgttcttcgagttttacagactgctgcacgacgcccggcctaaggaaggcgacgaccggcccttcttttggctgttcgagaatgtggtggccatgggagtcagcgacaagcgggatattagccggttcctggagagcaaccccgtgatgatcgatgccaaggaagtgagcgccgcccaccgggccagatacttctggggcaatctgcctggcatgaacagacccctggccagcaccgtgaacgacaagctggagctgcaggagtgcctggagcacggccggatcgccaagttcagcaaggtgagaaccatcaccacccgaagcaacagcatcaaacaaggcaaggaccagcactttcctgtgttcatgaacgagaaggaggacatcctgtggtgtaccgagatggagagagtgttcgggttcccagtccactacacagatgtcagcaacatgtctagactggccagacagagactgctgggaagaagctggtccgtccctgtgatcagacacctgttcgcccctctgaaggagtacttcgcctgcgtgagcagcggcaacagcaacgccaacagccggggccccagcttctctagcggcctggtgccactgtccctgagagggagccacatgggccccatggagatctacaaaaccgtgagcgcctggaagcggcagcctgtgcgcgtgctgagcctgtttcggaatatcgataaagtcctgaaaagcctgggattcctggagagcggctctggctccggcggtggcaccctgaagtacgtggaggatgtgacaaacgtggtcagacgggatgtggagaagtggggccccttcgatctggtgtacggcagcacccaacccctgggcagctcttgtgaccggtgccctggctggtacatgtttcagttccaccggatcctgcagtacgccctgccgagacaggagtcccagcggccattcttttggattttcatggacaacttgctgctgaccgaggatgaccaggaaactaccactcggttcctgcagaccgaagccgtgaccctgcaggacgtgagaggccgggactaccagaacgccatgcgggtgtggtccaacatccctggactgaaaagcaagcacgcacctctgacccctaaagaagaggagtacctgcaggcccaggtgcggagcagaagcaagctggacgcccctaaggtggatctgctggtgaagaattgcctcctgcccctgagagagtacttcaagtatttcagccagaatagtctgcccctgggcggcccaagcagcggcgcccctcctcccagcggcggcagcccagccggctccccaacctctaccgaggagggcacctctgagtccgccacccccgagagcggccctggcacctccaccgagcccagcgagggcagcgcacccggcagccctgccggcagccccacctccacagaggagggaaccagcaccgagcccagcgaaggcagcgccccaggcaccagcaccgagcctagtgagggcggctctggcggcggcagcgcccaggagattaaacggatcaacaagatcagaagaagacttgtgaaagacagcaacaccaagaaggccggcaagacaggccccatgaaaaccctgctggttagagtgatgacacccgatctgagagagcggctggaaaacctgagaaagaagcctgaaaatatcccccagcccatcagcaatacatctagagccaacctgaataagctgctgaccgattacaccgaaatgaagaaggcgatcctgcatgtgtactgggaagagttccagaaggaccctgtgggcctgatgagccgggtggcccagcctgccagcaagaagatcgatcagaacaagctgaaacctgagatggacgagaagggcaacctgaccaccgccggctttgcctgctctcagtgtggccagcccctgttcgtgtacaagctggagcaggtgtctgagaagggcaaggcttacaccaactacttcggacggtgcaatgtggccgagcacgaaaagctgatcctgctggcccagctgaagcccgagaaggatagcgacgaagccgtgacatatagcctgggaaagtttgggcagagggccctggatttctacagcattcatgtgaccaaggagtccacccaccccgtgaagcccctggcccagatcgccggaaacagatacgcctccggacctgtgggaaaggccctgagcgacgcatgtatgggcacaatcgcctccttcctgtctaagtaccaggacatcatcatcgaacaccagaaggtggtgaagggcaaccagaagagactggagagcctgcgggagctggccggcaaggaaaacctggaataccctagcgtgaccctgccacctcagcctcacaccaaggagggcgttgatgcctacaacgaagtgatcgcccgggtgcgaatgtgggtgaacctgaacctgtggcagaagctgaagctaagcagagatgatgccaagcctctgctgagactgaagggattcccttcctttcctctggtcgagagacaggccaacgaagtggactggtgggacatggtgtgtaacgtgaagaagctgatcaacgagaaaaaggaggatggcaaggtgttttggcagaatctggctggctacaagagacaggaagccctgagaccatacctgagcagcgaggaagatcggaagaagggaaagaaattcgctcggtaccagctgggcgacctgctgctgcacctggaaaagaagcacggcgaggactggggaaaggtgtacgacgaggcctgggagcggattgacaagaaagtggaaggcctgagcaagcacatcaagctggaagaggaacggagaagcgaggacgcccagagcaaggccgccctgaccgactggctgcgggctaaggccagcttcgtgatcgagggcctgaaggaggccgacaaggacgagttctgcagatgcgagctgaagctgcagaagtggtacggggacctgcggggaaagcccttcgccatcgaagccgagaacagcatcctggacatcagcggcttcagcaagcagtacaactgtgccttcatctggcagaaggacggcgtgaagaagctgaacctgtacctgatcatcaactacttcaagggcggcaagctgcggttcaagaagatcaaacctgaagccttcgaagccaacagattctacaccgtgatcaacaaaaagagcggcgagatcgtgcccatggaggtgaacttcaacttcgacgaccccaacctgatcatcctgcctctggcctttggcaagagacagggcagagaattcatctggaacgacctgctgtccctggaaaccggcagcctgaagctggccaacggaagagtgatcgagaagacactgtacaacagaagaacccggcaggatgagcctgccctgttcgtggccctgaccttcgagcggcgggaggtcctggactcctccaatatcaaaccaatgaacctgatcggcgtggcaagaggcgaaaacatccccgccgtgatcgccctgaccgaccccgagggctgcccactgagccggtttaaggatagcctgggaaacccaacccacatcctgagaatcggcgagagctataaggagaagcagcggaccatccaggccaagaaggaggtggagcagcggagagccggcggctacagccggaagtacgccagcaaagccaagaatctggcagacgatatggtgagaaacaccgctagagatctgctgtactacgccgtgacccaggatgccatgctgatcttcgccaacctgagccggggcttcggccggcagggcaagcggaccttcatggccgagagacagtacacacggatggaggactggctgaccgccaagctggcctacgagggcctgagcaagacctacctgtccaagacactggcccagtacacctccaagacatgcagcaactgtgggtttaccatcaccagcgccgactacgacagggtgctggagaagctgaagaagacagcaacaggctggatgaccacaattaacggcaaggagctgaaggtggagggccagattacctactacaacagatacaagagacagaacgtagtcaaggacctgtccgtcgagctggatagactgagcgaagaatctgtgaacaacgacatctcctcctggacaaagggcagaagcggagaagctctgagcctcctgaagaaaagattctcccatagacccgtgcaggagaagttcgtgtgcctgaactgcggcttcgagacacacgcagccgagcaagccgccctgaacatcgccagatcctggctgttcctgcggagccaggagtacaagaaataccagacaaacaagacaaccggcaacaccgataagagagccttcgtcgagacctggcagtccttttaccggaagaagcttaaggaggtgtggaaacctgccgtgcggtctggcggatctggcggaggctccacaagccaggagcaggtgagcttcaaggacgtgtgcgtggacttcacccaggaggagtggtacctgctggaccccgcccagaagatcctgtacagggacgtgatcctggagaactacagccacctggtgagcgtgggcaactgcatcaccaagcccgaggtgatcttcaagatcgagcagggcgaggagccctggatcctggaggagaggttccccaagcagtggcacagcggcaagagctacaagtacaccagccccaagaaaaagagaaaagtctaagctgccttctgcggggcttgccttctggccatgcccttcttctctcccttgcacctgtacctcttggtctttgaataaagcctgagtaggaaggctagcaaaaaaaaaaaaaaaaaaaaaaaaaaaaaaaaaaaaaaaaaaaaaaaaaaaaaaaaaaaaaaaaaaaaaaaaaaaaaaaa

SEQ ID NO: 3122 - RNA, 5419 nt, synthetic construct
  source 1..5419: mol_type = other RNA
aggaaataagagagaaaagaagagtaagaagaaatataagagccaccatggcccctaagaagaagcgtaaagtgagccgggtgaacggcagcggcagcggcggcggcatgaaccacgaccaggagttcgacccccctaaggtgtaccctcccgtccccgccgagaagagaaagcccatccgggtcctgagcctgttcgatggcatcgccaccggtctgctggtgctgaaggacctgggcatccaggtggataggtacattgcctccgaggtgtgcgaggactccatcaccgtgggaatggtgcgtcatcagggcaagatcatgtacgtgggcgacgtgcggagcgtgacacagaagcatatccaggagtggggccctttcgacctggtgatcggcggcagcccttgcaatgacctgagcatcgtgaacccagcccggaagggcctgtacgagggaaccggcagactgttcttcgagttttacagactgctgcacgacgcccggcctaaggaaggcgacgaccggcccttcttttggctgttcgagaatgtggtggccatgggagtcagcgacaagcgggatattagccggttcctggagagcaaccccgtgatgatcgatgccaaggaagtgagcgccgcccaccgggccagatacttctggggcaatctgcctggcatgaacagacccctggccagcaccgtgaacgacaagctggagctgcaggagtgcctggagcacggccggatcgccaagttcagcaaggtgagaaccatcaccacccgaagcaacagcatcaaacaaggcaaggaccagcactttcctgtgttcatgaacgagaaggaggacatcctgtggtgtaccgagatggagagagtgttcgggttcccagtccactacacagatgtcagcaacatgtctagactggccagacagagactgctgggaagaagctggtccgtccctgtgatcagacacctgttcgcccctctgaaggagtacttcgcctgcgtgagcagcggcaacagcaacgccaacagccggggccccagcttctctagcggcctggtgccactgtccctgagagggagccacatgggccccatggagatctacaaaaccgtgagcgcctggaagcggcagcctgtgcgcgtgctgagcctgtttcggaatatcgataaagtcctgaaaagcctgggattcctggagagcggctctggctccggcggtggcaccctgaagtacgtggaggatgtgacaaacgtggtcagacgggatgtggagaagtggggccccttcgatctggtgtacggcagcacccaacccctgggcagctcttgtgaccggtgccctggctggtacatgtttcagttccaccggatcctgcagtacgccctgccgagacaggagtcccagcggccattcttttggattttcatggacaacttgctgctgaccgaggatgaccaggaaactaccactcggttcctgcagaccgaagccgtgaccctgcaggacgtgagaggccgggactaccagaacgccatgcgggtgtggtccaacatccctggactgaaaagcaagcacgcacctctgacccctaaagaagaggagtacctgcaggcccaggtgcggagcagaagcaagctggacgcccctaaggtggatctgctggtgaagaattgcctcctgcccctgagagagtacttcaagtatttcagccagaatagtctgcccctgggcggcccaagcagcggcgcccctcctcccagcggcggcagcccagccggctccccaacctctaccgaggagggcacctctgagtccgccacccccgagagcggccctggcacctccaccgagcccagcgagggcagcgcacccggcagccctgccggcagccccacctccacagaggagggaaccagcaccgagcccagcgaaggcagcgccccaggcaccagcaccgagcctagtgagggcggctctggcggcggcagcgcccaggagattaaacggatcaacaagatcagaagaagacttgtgaaagacagcaacaccaagaaggccggcaagacaggccccatgaaaaccctgctggttagagtgatgacacccgatctgagagagcggctggaaaacctgagaaagaagcctgaaaatatcccccagcccatcagcaatacatctagagccaacctgaataagctgctgaccgattacaccgaaatgaagaaggcgatcctgcatgtgtactgggaagagttccagaaggaccctgtgggcctgatgagccgggtggcccagcctgccagcaagaagatcgatcagaacaagctgaaacctgagatggacgagaagggcaacctgaccaccgccggctttgcctgctctcagtgtggccagcccctgttcgtgtacaagctggagcaggtgtctgagaagggcaaggcttacaccaactacttcggacggtgcaatgtggccgagcacgaaaagctgatcctgctggcccagctgaagcccgagaaggatagcgacgaagccgtgacatatagcctgggaaagtttgggcagagggccctggatttctacagcattcatgtgaccaaggagtccacccaccccgtgaagcccctggcccagatcgccggaaacagatacgcctccggacctgtgggaaaggccctgagcgacgcatgtatgggcacaatcgcctccttcctgtctaagtaccaggacatcatcatcgaacaccagaaggtggtgaagggcaaccagaagagactggagagcctgcgggagctggccggcaaggaaaacctggaataccctagcgtgaccctgccacctcagcctcacaccaaggagggcgttgatgcctacaacgaagtgatcgcccgggtgcgaatgtgggtgaacctgaacctgtggcagaagctgaagctaagcagagatgatgccaagcctctgctgagactgaagggattcccttcctttcctctggtcgagagacaggccaacgaagtggactggtgggacatggtgtgtaacgtgaagaagctgatcaacgagaaaaaggaggatggcaaggtgttttggcagaatctggctggctacaagagacaggaagccctgagaccatacctgagcagcgaggaagatcggaagaagggaaagaaattcgctcggtaccagctgggcgacctgctgctgcacctggaaaagaagcacggcgaggactggggaaaggtgtacgacgaggcctgggagcggattgacaagaaagtggaaggcctgagcaagcacatcaagctggaagaggaacggagaagcgaggacgcccagagcaaggccgccctgaccgactggctgcgggctaaggccagcttcgtgatcgagggcctgaaggaggccgacaaggacgagttctgcagatgcgagctgaagctgcagaagtggtacggggacctgcggggaaagcccttcgccatcgaagccgagaacagcatcctggacatcagcggcttcagcaagcagtacaactgtgccttcatctggcagaaggacggcgtgaagaagctgaacctgtacctgatcatcaactacttcaagggcggcaagctgcggttcaagaagatcaaacctgaagccttcgaagccaacagattctacaccgtgatcaacaaaaagagcggcgagatcgtgcccatggaggtgaacttcaacttcgacgaccccaacctgatcatcctgcctctggcctttggcaagagacagggcagagaattcatctggaacgacctgctgtccctggaaaccggcagcctgaagctggccaacggaagagtgatcgagaagacactgtacaacagaagaacccggcaggatgagcctgccctgttcgtggccctgaccttcgagcggcgggaggtcctggactcctccaatatcaaaccaatgaacctgatcggcgtggcaagaggcgaaaacatccccgccgtgatcgccctgaccgaccccgagggctgcccactgagccggtttaaggatagcctgggaaacccaacccacatcctgagaatcggcgagagctataaggagaagcagcggaccatccaggccaagaaggaggtggagcagcggagagccggcggctacagccggaagtacgccagcaaagccaagaatctggcagacgatatggtgagaaacaccgctagagatctgctgtactacgccgtgacccaggatgccatgctgatcttcgccaacctgagccggggcttcggccggcagggcaagcggaccttcatggccgagagacagtacacacggatggaggactggctgaccgccaagctggcctacgagggcctgagcaagacctacctgtccaagacactggcccagtacacctccaagacatgcagcaactgtgggtttaccatcaccagcgccgactacgacagggtgctggagaagctgaagaagacagcaacaggctggatgaccacaattaacggcaaggagctgaaggtggagggccagattacctactacaacagatacaagagacagaacgtagtcaaggacctgtccgtcgagctggatagactgagcgaagaatctgtgaacaacgacatctcctcctggacaaagggcagaagcggagaagctctgagcctcctgaagaaaagattctcccatagacccgtgcaggagaagttcgtgtgcctgaactgcggcttcgagacacacgcagccgagcaagccgccctgaacatcgccagatcctggctgttcctgcggagccaggagtacaagaaataccagacaaacaagacaaccggcaacaccgataagagagccttcgtcgagacctggcagtccttttaccggaagaagcttaaggaggtgtggaaacctgccgtgcggtctggcggatctggcggaggctccacaagcttcctgccccaggtgaccttcgaggacgtggccatctacttcagcagggaggagtgggacgagctgagcgagtggcagagggagctgtaccaggccgtgatgatggagaactacgaggccgtgctgagcctgggcaagaacgacttcatcgcccagtgcacctggggcctgagggagggcgagaagagggccagcggcaagagcgagaaggccaggaacaggcccgtgagcaacctgtggaggaccagccccaagaaaaagagaaaagtctaagctgccttctgcggggcttgccttctggccatgcccttcttctctcccttgcacctgtacctcttggtctttgaataaagcctgagtaggaaggctagcaaaaaaaaaaaaaaaaaaaaaaaaaaaaaaaaaaaaaaaaaaaaaaaaaaaaaaaaaaaaaaaaaaaaaaaaaaaaaaaa

SEQ ID NO: 3123 - RNA, 5419 nt, synthetic construct
  source 1..5419: mol_type = other RNA
aggaaataagagagaaaagaagagtaagaagaaatataagagccaccatggcccctaagaagaagcgtaaagtgagccgggtgaacggcagcggcagcggcggcggcatgaaccacgaccaggagttcgacccccctaaggtgtaccctcccgtccccgccgagaagagaaagcccatccgggtcctgagcctgttcgatggcatcgccaccggtctgctggtgctgaaggacctgggcatccaggtggataggtacattgcctccgaggtgtgcgaggactccatcaccgtgggaatggtgcgtcatcagggcaagatcatgtacgtgggcgacgtgcggagcgtgacacagaagcatatccaggagtggggccctttcgacctggtgatcggcggcagcccttgcaatgacctgagcatcgtgaacccagcccggaagggcctgtacgagggaaccggcagactgttcttcgagttttacagactgctgcacgacgcccggcctaaggaaggcgacgaccggcccttcttttggctgttcgagaatgtggtggccatgggagtcagcgacaagcgggatattagccggttcctggagagcaaccccgtgatgatcgatgccaaggaagtgagcgccgcccaccgggccagatacttctggggcaatctgcctggcatgaacagacccctggccagcaccgtgaacgacaagctggagctgcaggagtgcctggagcacggccggatcgccaagttcagcaaggtgagaaccatcaccacccgaagcaacagcatcaaacaaggcaaggaccagcactttcctgtgttcatgaacgagaaggaggacatcctgtggtgtaccgagatggagagagtgttcgggttcccagtccactacacagatgtcagcaacatgtctagactggccagacagagactgctgggaagaagctggtccgtccctgtgatcagacacctgttcgcccctctgaaggagtacttcgcctgcgtgagcagcggcaacagcaacgccaacagccggggccccagcttctctagcggcctggtgccactgtccctgagagggagccacatgggccccatggagatctacaaaaccgtgagcgcctggaagcggcagcctgtgcgcgtgctgagcctgtttcggaatatcgataaagtcctgaaaagcctgggattcctggagagcggctctggctccggcggtggcaccctgaagtacgtggaggatgtgacaaacgtggtcagacgggatgtggagaagtggggccccttcgatctggtgtacggcagcacccaacccctgggcagctcttgtgaccggtgccctggctggtacatgtttcagttccaccggatcctgcagtacgccctgccgagacaggagtcccagcggccattcttttggattttcatggacaacttgctgctgaccgaggatgaccaggaaactaccactcggttcctgcagaccgaagccgtgaccctgcaggacgtgagaggccgggactaccagaacgccatgcgggtgtggtccaacatccctggactgaaaagcaagcacgcacctctgacccctaaagaagaggagtacctgcaggcccaggtgcggagcagaagcaagctggacgcccctaaggtggatctgctggtgaagaattgcctcctgcccctgagagagtacttcaagtatttcagccagaatagtctgcccctgggcggcccaagcagcggcgcccctcctcccagcggcggcagcccagccggctccccaacctctaccgaggagggcacctctgagtccgccacccccgagagcggccctggcacctccaccgagcccagcgagggcagcgcacccggcagccctgccggcagccccacctccacagaggagggaaccagcaccgagcccagcgaaggcagcgccccaggcaccagcaccgagcctagtgagggcggctctggcggcggcagcgcccaggagattaaacggatcaacaagatcagaagaagacttgtgaaagacagcaacaccaagaaggccggcaagacaggccccatgaaaaccctgctggttagagtgatgacacccgatctgagagagcggctggaaaacctgagaaagaagcctgaaaatatcccccagcccatcagcaatacatctagagccaacctgaataagctgctgaccgattacaccgaaatgaagaaggcgatcctgcatgtgtactgggaagagttccagaaggaccctgtgggcctgatgagccgggtggcccagcctgccagcaagaagatcgatcagaacaagctgaaacctgagatggacgagaagggcaacctgaccaccgccggctttgcctgctctcagtgtggccagcccctgttcgtgtacaagctggagcaggtgtctgagaagggcaaggcttacaccaactacttcggacggtgcaatgtggccgagcacgaaaagctgatcctgctggcccagctgaagcccgagaaggatagcgacgaagccgtgacatatagcctgggaaagtttgggcagagggccctggatttctacagcattcatgtgaccaaggagtccacccaccccgtgaagcccctggcccagatcgccggaaacagatacgcctccggacctgtgggaaaggccctgagcgacgcatgtatgggcacaatcgcctccttcctgtctaagtaccaggacatcatcatcgaacaccagaaggtggtgaagggcaaccagaagagactggagagcctgcgggagctggccggcaaggaaaacctggaataccctagcgtgaccctgccacctcagcctcacaccaaggagggcgttgatgcctacaacgaagtgatcgcccgggtgcgaatgtgggtgaacctgaacctgtggcagaagctgaagctaagcagagatgatgccaagcctctgctgagactgaagggattcccttcctttcctctggtcgagagacaggccaacgaagtggactggtgggacatggtgtgtaacgtgaagaagctgatcaacgagaaaaaggaggatggcaaggtgttttggcagaatctggctggctacaagagacaggaagccctgagaccatacctgagcagcgaggaagatcggaagaagggaaagaaattcgctcggtaccagctgggcgacctgctgctgcacctggaaaagaagcacggcgaggactggggaaaggtgtacgacgaggcctgggagcggattgacaagaaagtggaaggcctgagcaagcacatcaagctggaagaggaacggagaagcgaggacgcccagagcaaggccgccctgaccgactggctgcgggctaaggccagcttcgtgatcgagggcctgaaggaggccgacaaggacgagttctgcagatgcgagctgaagctgcagaagtggtacggggacctgcggggaaagcccttcgccatcgaagccgagaacagcatcctggacatcagcggcttcagcaagcagtacaactgtgccttcatctggcagaaggacggcgtgaagaagctgaacctgtacctgatcatcaactacttcaagggcggcaagctgcggttcaagaagatcaaacctgaagccttcgaagccaacagattctacaccgtgatcaacaaaaagagcggcgagatcgtgcccatggaggtgaacttcaacttcgacgaccccaacctgatcatcctgcctctggcctttggcaagagacagggcagagaattcatctggaacgacctgctgtccctggaaaccggcagcctgaagctggccaacggaagagtgatcgagaagacactgtacaacagaagaacccggcaggatgagcctgccctgttcgtggccctgaccttcgagcggcgggaggtcctggactcctccaatatcaaaccaatgaacctgatcggcgtggcaagaggcgaaaacatccccgccgtgatcgccctgaccgaccccgagggctgcccactgagccggtttaaggatagcctgggaaacccaacccacatcctgagaatcggcgagagctataaggagaagcagcggaccatccaggccaagaaggaggtggagcagcggagagccggcggctacagccggaagtacgccagcaaagccaagaatctggcagacgatatggtgagaaacaccgctagagatctgctgtactacgccgtgacccaggatgccatgctgatcttcgccaacctgagccggggcttcggccggcagggcaagcggaccttcatggccgagagacagtacacacggatggaggactggctgaccgccaagctggcctacgagggcctgagcaagacctacctgtccaagacactggcccagtacacctccaagacatgcagcaactgtgggtttaccatcaccagcgccgactacgacagggtgctggagaagctgaagaagacagcaacaggctggatgaccacaattaacggcaaggagctgaaggtggagggccagattacctactacaacagatacaagagacagaacgtagtcaaggacctgtccgtcgagctggatagactgagcgaagaatctgtgaacaacgacatctcctcctggacaaagggcagaagcggagaagctctgagcctcctgaagaaaagattctcccatagacccgtgcaggagaagttcgtgtgcctgaactgcggcttcgagacacacgcagccgagcaagccgccctgaacatcgccagatcctggctgttcctgcggagccaggagtacaagaaataccagacaaacaagacaaccggcaacaccgataagagagccttcgtcgagacctggcagtccttttaccggaagaagcttaaggaggtgtggaaacctgccgtgcggtctggcggatctggcggaggctccacaagcagccaggagcccgtgaccttcgccgacgtggccgtggtgttcacccccgaggagtgggtgttcctggacagcacccagaggagcctgtacagggacgtgatgctggagaactacaggaacctggccagcgtggccgaccagctgtgcaagcccaacgccctgagctacctggaggagaggggcgagcagtggaccaccgacaggggcgtgctgcccgacacctgcgccgagccccagtgccagaccagccccaagaaaaagagaaaagtctaagctgccttctgcggggcttgccttctggccatgcccttcttctctcccttgcacctgtacctcttggtctttgaataaagcctgagtaggaaggctagcaaaaaaaaaaaaaaaaaaaaaaaaaaaaaaaaaaaaaaaaaaaaaaaaaaaaaaaaaaaaaaaaaaaaaaaaaaaaaaaa

SEQ ID NO: 3124 - RNA, 5419 nt, synthetic construct
  source 1..5419: mol_type = other RNA
aggaaataagagagaaaagaagagtaagaagaaatataagagccaccatggcccctaagaagaagcgtaaagtgagccgggtgaacggcagcggcagcggcggcggcatgaaccacgaccaggagttcgacccccctaaggtgtaccctcccgtccccgccgagaagagaaagcccatccgggtcctgagcctgttcgatggcatcgccaccggtctgctggtgctgaaggacctgggcatccaggtggataggtacattgcctccgaggtgtgcgaggactccatcaccgtgggaatggtgcgtcatcagggcaagatcatgtacgtgggcgacgtgcggagcgtgacacagaagcatatccaggagtggggccctttcgacctggtgatcggcggcagcccttgcaatgacctgagcatcgtgaacccagcccggaagggcctgtacgagggaaccggcagactgttcttcgagttttacagactgctgcacgacgcccggcctaaggaaggcgacgaccggcccttcttttggctgttcgagaatgtggtggccatgggagtcagcgacaagcgggatattagccggttcctggagagcaaccccgtgatgatcgatgccaaggaagtgagcgccgcccaccgggccagatacttctggggcaatctgcctggcatgaacagacccctggccagcaccgtgaacgacaagctggagctgcaggagtgcctggagcacggccggatcgccaagttcagcaaggtgagaaccatcaccacccgaagcaacagcatcaaacaaggcaaggaccagcactttcctgtgttcatgaacgagaaggaggacatcctgtggtgtaccgagatggagagagtgttcgggttcccagtccactacacagatgtcagcaacatgtctagactggccagacagagactgctgggaagaagctggtccgtccctgtgatcagacacctgttcgcccctctgaaggagtacttcgcctgcgtgagcagcggcaacagcaacgccaacagccggggccccagcttctctagcggcctggtgccactgtccctgagagggagccacatgggccccatggagatctacaaaaccgtgagcgcctggaagcggcagcctgtgcgcgtgctgagcctgtttcggaatatcgataaagtcctgaaaagcctgggattcctggagagcggctctggctccggcggtggcaccctgaagtacgtggaggatgtgacaaacgtggtcagacgggatgtggagaagtggggccccttcgatctggtgtacggcagcacccaacccctgggcagctcttgtgaccggtgccctggctggtacatgtttcagttccaccggatcctgcagtacgccctgccgagacaggagtcccagcggccattcttttggattttcatggacaacttgctgctgaccgaggatgaccaggaaactaccactcggttcctgcagaccgaagccgtgaccctgcaggacgtgagaggccgggactaccagaacgccatgcgggtgtggtccaacatccctggactgaaaagcaagcacgcacctctgacccctaaagaagaggagtacctgcaggcccaggtgcggagcagaagcaagctggacgcccctaaggtggatctgctggtgaagaattgcctcctgcccctgagagagtacttcaagtatttcagccagaatagtctgcccctgggcggcccaagcagcggcgcccctcctcccagcggcggcagcccagccggctccccaacctctaccgaggagggcacctctgagtccgccacccccgagagcggccctggcacctccaccgagcccagcgagggcagcgcacccggcagccctgccggcagccccacctccacagaggagggaaccagcaccgagcccagcgaaggcagcgccccaggcaccagcaccgagcctagtgagggcggctctggcggcggcagcgcccaggagattaaacggatcaacaagatcagaagaagacttgtgaaagacagcaacaccaagaaggccggcaagacaggccccatgaaaaccctgctggttagagtgatgacacccgatctgagagagcggctggaaaacctgagaaagaagcctgaaaatatcccccagcccatcagcaatacatctagagccaacctgaataagctgctgaccgattacaccgaaatgaagaaggcgatcctgcatgtgtactgggaagagttccagaaggaccctgtgggcctgatgagccgggtggcccagcctgccagcaagaagatcgatcagaacaagctgaaacctgagatggacgagaagggcaacctgaccaccgccggctttgcctgctctcagtgtggccagcccctgttcgtgtacaagctggagcaggtgtctgagaagggcaaggcttacaccaactacttcggacggtgcaatgtggccgagcacgaaaagctgatcctgctggcccagctgaagcccgagaaggatagcgacgaagccgtgacatatagcctgggaaagtttgggcagagggccctggatttctacagcattcatgtgaccaaggagtccacccaccccgtgaagcccctggcccagatcgccggaaacagatacgcctccggacctgtgggaaaggccctgagcgacgcatgtatgggcacaatcgcctccttcctgtctaagtaccaggacatcatcatcgaacaccagaaggtggtgaagggcaaccagaagagactggagagcctgcgggagctggccggcaaggaaaacctggaataccctagcgtgaccctgccacctcagcctcacaccaaggagggcgttgatgcctacaacgaagtgatcgcccgggtgcgaatgtgggtgaacctgaacctgtggcagaagctgaagctaagcagagatgatgccaagcctctgctgagactgaagggattcccttcctttcctctggtcgagagacaggccaacgaagtggactggtgggacatggtgtgtaacgtgaagaagctgatcaacgagaaaaaggaggatggcaaggtgttttggcagaatctggctggctacaagagacaggaagccctgagaccatacctgagcagcgaggaagatcggaagaagggaaagaaattcgctcggtaccagctgggcgacctgctgctgcacctggaaaagaagcacggcgaggactggggaaaggtgtacgacgaggcctgggagcggattgacaagaaagtggaaggcctgagcaagcacatcaagctggaagaggaacggagaagcgaggacgcccagagcaaggccgccctgaccgactggctgcgggctaaggccagcttcgtgatcgagggcctgaaggaggccgacaaggacgagttctgcagatgcgagctgaagctgcagaagtggtacggggacctgcggggaaagcccttcgccatcgaagccgagaacagcatcctggacatcagcggcttcagcaagcagtacaactgtgccttcatctggcagaaggacggcgtgaagaagctgaacctgtacctgatcatcaactacttcaagggcggcaagctgcggttcaagaagatcaaacctgaagccttcgaagccaacagattctacaccgtgatcaacaaaaagagcggcgagatcgtgcccatggaggtgaacttcaacttcgacgaccccaacctgatcatcctgcctctggcctttggcaagagacagggcagagaattcatctggaacgacctgctgtccctggaaaccggcagcctgaagctggccaacggaagagtgatcgagaagacactgtacaacagaagaacccggcaggatgagcctgccctgttcgtggccctgaccttcgagcggcgggaggtcctggactcctccaatatcaaaccaatgaacctgatcggcgtggcaagaggcgaaaacatccccgccgtgatcgccctgaccgaccccgagggctgcccactgagccggtttaaggatagcctgggaaacccaacccacatcctgagaatcggcgagagctataaggagaagcagcggaccatccaggccaagaaggaggtggagcagcggagagccggcggctacagccggaagtacgccagcaaagccaagaatctggcagacgatatggtgagaaacaccgctagagatctgctgtactacgccgtgacccaggatgccatgctgatcttcgccaacctgagccggggcttcggccggcagggcaagcggaccttcatggccgagagacagtacacacggatggaggactggctgaccgccaagctggcctacgagggcctgagcaagacctacctgtccaagacactggcccagtacacctccaagacatgcagcaactgtgggtttaccatcaccagcgccgactacgacagggtgctggagaagctgaagaagacagcaacaggctggatgaccacaattaacggcaaggagctgaaggtggagggccagattacctactacaacagatacaagagacagaacgtagtcaaggacctgtccgtcgagctggatagactgagcgaagaatctgtgaacaacgacatctcctcctggacaaagggcagaagcggagaagctctgagcctcctgaagaaaagattctcccatagacccgtgcaggagaagttcgtgtgcctgaactgcggcttcgagacacacgcagccgagcaagccgccctgaacatcgccagatcctggctgttcctgcggagccaggagtacaagaaataccagacaaacaagacaaccggcaacaccgataagagagccttcgtcgagacctggcagtccttttaccggaagaagcttaaggaggtgtggaaacctgccgtgcggtctggcggatctggcggaggctccacaagcttccagatgcccgtgaccttcgaggaggtggccgtgtacttcacccagggccagggcgccctgctggaccccgcccagagggccctgtacagggacgtgatgcaggagaactacgagatggtgaccagcctgggcttccccatccccaagcccgagctgatcgccaggctggagaggggcgaggagccctgggtgcccgacctgcaggcctgcaaggagaggaggctgcccaggtgcaccaggaccagccccaagaaaaagagaaaagtctaagctgccttctgcggggcttgccttctggccatgcccttcttctctcccttgcacctgtacctcttggtctttgaataaagcctgagtaggaaggctagcaaaaaaaaaaaaaaaaaaaaaaaaaaaaaaaaaaaaaaaaaaaaaaaaaaaaaaaaaaaaaaaaaaaaaaaaaaaaaaaa

SEQ ID NO: 3125 - RNA, 5419 nt, synthetic construct
  source 1..5419: mol_type = other RNA
aggaaataagagagaaaagaagagtaagaagaaatataagagccaccatggcccctaagaagaagcgtaaagtgagccgggtgaacggcagcggcagcggcggcggcatgaaccacgaccaggagttcgacccccctaaggtgtaccctcccgtccccgccgagaagagaaagcccatccgggtcctgagcctgttcgatggcatcgccaccggtctgctggtgctgaaggacctgggcatccaggtggataggtacattgcctccgaggtgtgcgaggactccatcaccgtgggaatggtgcgtcatcagggcaagatcatgtacgtgggcgacgtgcggagcgtgacacagaagcatatccaggagtggggccctttcgacctggtgatcggcggcagcccttgcaatgacctgagcatcgtgaacccagcccggaagggcctgtacgagggaaccggcagactgttcttcgagttttacagactgctgcacgacgcccggcctaaggaaggcgacgaccggcccttcttttggctgttcgagaatgtggtggccatgggagtcagcgacaagcgggatattagccggttcctggagagcaaccccgtgatgatcgatgccaaggaagtgagcgccgcccaccgggccagatacttctggggcaatctgcctggcatgaacagacccctggccagcaccgtgaacgacaagctggagctgcaggagtgcctggagcacggccggatcgccaagttcagcaaggtgagaaccatcaccacccgaagcaacagcatcaaacaaggcaaggaccagcactttcctgtgttcatgaacgagaaggaggacatcctgtggtgtaccgagatggagagagtgttcgggttcccagtccactacacagatgtcagcaacatgtctagactggccagacagagactgctgggaagaagctggtccgtccctgtgatcagacacctgttcgcccctctgaaggagtacttcgcctgcgtgagcagcggcaacagcaacgccaacagccggggccccagcttctctagcggcctggtgccactgtccctgagagggagccacatgggccccatggagatctacaaaaccgtgagcgcctggaagcggcagcctgtgcgcgtgctgagcctgtttcggaatatcgataaagtcctgaaaagcctgggattcctggagagcggctctggctccggcggtggcaccctgaagtacgtggaggatgtgacaaacgtggtcagacgggatgtggagaagtggggccccttcgatctggtgtacggcagcacccaacccctgggcagctcttgtgaccggtgccctggctggtacatgtttcagttccaccggatcctgcagtacgccctgccgagacaggagtcccagcggccattcttttggattttcatggacaacttgctgctgaccgaggatgaccaggaaactaccactcggttcctgcagaccgaagccgtgaccctgcaggacgtgagaggccgggactaccagaacgccatgcgggtgtggtccaacatccctggactgaaaagcaagcacgcacctctgacccctaaagaagaggagtacctgcaggcccaggtgcggagcagaagcaagctggacgcccctaaggtggatctgctggtgaagaattgcctcctgcccctgagagagtacttcaagtatttcagccagaatagtctgcccctgggcggcccaagcagcggcgcccctcctcccagcggcggcagcccagccggctccccaacctctaccgaggagggcacctctgagtccgccacccccgagagcggccctggcacctccaccgagcccagcgagggcagcgcacccggcagccctgccggcagccccacctccacagaggagggaaccagcaccgagcccagcgaaggcagcgccccaggcaccagcaccgagcctagtgagggcggctctggcggcggcagcgcccaggagattaaacggatcaacaagatcagaagaagacttgtgaaagacagcaacaccaagaaggccggcaagacaggccccatgaaaaccctgctggttagagtgatgacacccgatctgagagagcggctggaaaacctgagaaagaagcctgaaaatatcccccagcccatcagcaatacatctagagccaacctgaataagctgctgaccgattacaccgaaatgaagaaggcgatcctgcatgtgtactgggaagagttccagaaggaccctgtgggcctgatgagccgggtggcccagcctgccagcaagaagatcgatcagaacaagctgaaacctgagatggacgagaagggcaacctgaccaccgccggctttgcctgctctcagtgtggccagcccctgttcgtgtacaagctggagcaggtgtctgagaagggcaaggcttacaccaactacttcggacggtgcaatgtggccgagcacgaaaagctgatcctgctggcccagctgaagcccgagaaggatagcgacgaagccgtgacatatagcctgggaaagtttgggcagagggccctggatttctacagcattcatgtgaccaaggagtccacccaccccgtgaagcccctggcccagatcgccggaaacagatacgcctccggacctgtgggaaaggccctgagcgacgcatgtatgggcacaatcgcctccttcctgtctaagtaccaggacatcatcatcgaacaccagaaggtggtgaagggcaaccagaagagactggagagcctgcgggagctggccggcaaggaaaacctggaataccctagcgtgaccctgccacctcagcctcacaccaaggagggcgttgatgcctacaacgaagtgatcgcccgggtgcgaatgtgggtgaacctgaacctgtggcagaagctgaagctaagcagagatgatgccaagcctctgctgagactgaagggattcccttcctttcctctggtcgagagacaggccaacgaagtggactggtgggacatggtgtgtaacgtgaagaagctgatcaacgagaaaaaggaggatggcaaggtgttttggcagaatctggctggctacaagagacaggaagccctgagaccatacctgagcagcgaggaagatcggaagaagggaaagaaattcgctcggtaccagctgggcgacctgctgctgcacctggaaaagaagcacggcgaggactggggaaaggtgtacgacgaggcctgggagcggattgacaagaaagtggaaggcctgagcaagcacatcaagctggaagaggaacggagaagcgaggacgcccagagcaaggccgccctgaccgactggctgcgggctaaggccagcttcgtgatcgagggcctgaaggaggccgacaaggacgagttctgcagatgcgagctgaagctgcagaagtggtacggggacctgcggggaaagcccttcgccatcgaagccgagaacagcatcctggacatcagcggcttcagcaagcagtacaactgtgccttcatctggcagaaggacggcgtgaagaagctgaacctgtacctgatcatcaactacttcaagggcggcaagctgcggttcaagaagatcaaacctgaagccttcgaagccaacagattctacaccgtgatcaacaaaaagagcggcgagatcgtgcccatggaggtgaacttcaacttcgacgaccccaacctgatcatcctgcctctggcctttggcaagagacagggcagagaattcatctggaacgacctgctgtccctggaaaccggcagcctgaagctggccaacggaagagtgatcgagaagacactgtacaacagaagaacccggcaggatgagcctgccctgttcgtggccctgaccttcgagcggcgggaggtcctggactcctccaatatcaaaccaatgaacctgatcggcgtggcaagaggcgaaaacatccccgccgtgatcgccctgaccgaccccgagggctgcccactgagccggtttaaggatagcctgggaaacccaacccacatcctgagaatcggcgagagctataaggagaagcagcggaccatccaggccaagaaggaggtggagcagcggagagccggcggctacagccggaagtacgccagcaaagccaagaatctggcagacgatatggtgagaaacaccgctagagatctgctgtactacgccgtgacccaggatgccatgctgatcttcgccaacctgagccggggcttcggccggcagggcaagcggaccttcatggccgagagacagtacacacggatggaggactggctgaccgccaagctggcctacgagggcctgagcaagacctacctgtccaagacactggcccagtacacctccaagacatgcagcaactgtgggtttaccatcaccagcgccgactacgacagggtgctggagaagctgaagaagacagcaacaggctggatgaccacaattaacggcaaggagctgaaggtggagggccagattacctactacaacagatacaagagacagaacgtagtcaaggacctgtccgtcgagctggatagactgagcgaagaatctgtgaacaacgacatctcctcctggacaaagggcagaagcggagaagctctgagcctcctgaagaaaagattctcccatagacccgtgcaggagaagttcgtgtgcctgaactgcggcttcgagacacacgcagccgagcaagccgccctgaacatcgccagatcctggctgttcctgcggagccaggagtacaagaaataccagacaaacaagacaaccggcaacaccgataagagagccttcgtcgagacctggcagtccttttaccggaagaagcttaaggaggtgtggaaacctgccgtgcggtctggcggatctggcggaggctccacaagcttccaggagcccgtgaccttcgaggacgtggccgtgtacttcacccagaacgagtgggccagcctgcaccccatgcagagggccctgcacagggaggtgatgctggagaactacgccaacgtgaccagcctgagcgccttccccttccccaagcccgacctgatcttccagctggagcagggcgaggccgcctggggccccgacccctggaccctggccggcggcgagaccctgaggggcatgaccagccccaagaaaaagagaaaagtctaagctgccttctgcggggcttgccttctggccatgcccttcttctctcccttgcacctgtacctcttggtctttgaataaagcctgagtaggaaggctagcaaaaaaaaaaaaaaaaaaaaaaaaaaaaaaaaaaaaaaaaaaaaaaaaaaaaaaaaaaaaaaaaaaaaaaaaaaaaaaaa

SEQ ID NO: 3126 - RNA, 5419 nt, synthetic construct
  source 1..5419: mol_type = other RNA
aggaaataagagagaaaagaagagtaagaagaaatataagagccaccatggcccctaagaagaagcgtaaagtgagccgggtgaacggcagcggcagcggcggcggcatgaaccacgaccaggagttcgacccccctaaggtgtaccctcccgtccccgccgagaagagaaagcccatccgggtcctgagcctgttcgatggcatcgccaccggtctgctggtgctgaaggacctgggcatccaggtggataggtacattgcctccgaggtgtgcgaggactccatcaccgtgggaatggtgcgtcatcagggcaagatcatgtacgtgggcgacgtgcggagcgtgacacagaagcatatccaggagtggggccctttcgacctggtgatcggcggcagcccttgcaatgacctgagcatcgtgaacccagcccggaagggcctgtacgagggaaccggcagactgttcttcgagttttacagactgctgcacgacgcccggcctaaggaaggcgacgaccggcccttcttttggctgttcgagaatgtggtggccatgggagtcagcgacaagcgggatattagccggttcctggagagcaaccccgtgatgatcgatgccaaggaagtgagcgccgcccaccgggccagatacttctggggcaatctgcctggcatgaacagacccctggccagcaccgtgaacgacaagctggagctgcaggagtgcctggagcacggccggatcgccaagttcagcaaggtgagaaccatcaccacccgaagcaacagcatcaaacaaggcaaggaccagcactttcctgtgttcatgaacgagaaggaggacatcctgtggtgtaccgagatggagagagtgttcgggttcccagtccactacacagatgtcagcaacatgtctagactggccagacagagactgctgggaagaagctggtccgtccctgtgatcagacacctgttcgcccctctgaaggagtacttcgcctgcgtgagcagcggcaacagcaacgccaacagccggggccccagcttctctagcggcctggtgccactgtccctgagagggagccacatgggccccatggagatctacaaaaccgtgagcgcctggaagcggcagcctgtgcgcgtgctgagcctgtttcggaatatcgataaagtcctgaaaagcctgggattcctggagagcggctctggctccggcggtggcaccctgaagtacgtggaggatgtgacaaacgtggtcagacgggatgtggagaagtggggccccttcgatctggtgtacggcagcacccaacccctgggcagctcttgtgaccggtgccctggctggtacatgtttcagttccaccggatcctgcagtacgccctgccgagacaggagtcccagcggccattcttttggattttcatggacaacttgctgctgaccgaggatgaccaggaaactaccactcggttcctgcagaccgaagccgtgaccctgcaggacgtgagaggccgggactaccagaacgccatgcgggtgtggtccaacatccctggactgaaaagcaagcacgcacctctgacccctaaagaagaggagtacctgcaggcccaggtgcggagcagaagcaagctggacgcccctaaggtggatctgctggtgaagaattgcctcctgcccctgagagagtacttcaagtatttcagccagaatagtctgcccctgggcggcccaagcagcggcgcccctcctcccagcggcggcagcccagccggctccccaacctctaccgaggagggcacctctgagtccgccacccccgagagcggccctggcacctccaccgagcccagcgagggcagcgcacccggcagccctgccggcagccccacctccacagaggagggaaccagcaccgagcccagcgaaggcagcgccccaggcaccagcaccgagcctagtgagggcggctctggcggcggcagcgcccaggagattaaacggatcaacaagatcagaagaagacttgtgaaagacagcaacaccaagaaggccggcaagacaggccccatgaaaaccctgctggttagagtgatgacacccgatctgagagagcggctggaaaacctgagaaagaagcctgaaaatatcccccagcccatcagcaatacatctagagccaacctgaataagctgctgaccgattacaccgaaatgaagaaggcgatcctgcatgtgtactgggaagagttccagaaggaccctgtgggcctgatgagccgggtggcccagcctgccagcaagaagatcgatcagaacaagctgaaacctgagatggacgagaagggcaacctgaccaccgccggctttgcctgctctcagtgtggccagcccctgttcgtgtacaagctggagcaggtgtctgagaagggcaaggcttacaccaactacttcggacggtgcaatgtggccgagcacgaaaagctgatcctgctggcccagctgaagcccgagaaggatagcgacgaagccgtgacatatagcctgggaaagtttgggcagagggccctggatttctacagcattcatgtgaccaaggagtccacccaccccgtgaagcccctggcccagatcgccggaaacagatacgcctccggacctgtgggaaaggccctgagcgacgcatgtatgggcacaatcgcctccttcctgtctaagtaccaggacatcatcatcgaacaccagaaggtggtgaagggcaaccagaagagactggagagcctgcgggagctggccggcaaggaaaacctggaataccctagcgtgaccctgccacctcagcctcacaccaaggagggcgttgatgcctacaacgaagtgatcgcccgggtgcgaatgtgggtgaacctgaacctgtggcagaagctgaagctaagcagagatgatgccaagcctctgctgagactgaagggattcccttcctttcctctggtcgagagacaggccaacgaagtggactggtgggacatggtgtgtaacgtgaagaagctgatcaacgagaaaaaggaggatggcaaggtgttttggcagaatctggctggctacaagagacaggaagccctgagaccatacctgagcagcgaggaagatcggaagaagggaaagaaattcgctcggtaccagctgggcgacctgctgctgcacctggaaaagaagcacggcgaggactggggaaaggtgtacgacgaggcctgggagcggattgacaagaaagtggaaggcctgagcaagcacatcaagctggaagaggaacggagaagcgaggacgcccagagcaaggccgccctgaccgactggctgcgggctaaggccagcttcgtgatcgagggcctgaaggaggccgacaaggacgagttctgcagatgcgagctgaagctgcagaagtggtacggggacctgcggggaaagcccttcgccatcgaagccgagaacagcatcctggacatcagcggcttcagcaagcagtacaactgtgccttcatctggcagaaggacggcgtgaagaagctgaacctgtacctgatcatcaactacttcaagggcggcaagctgcggttcaagaagatcaaacctgaagccttcgaagccaacagattctacaccgtgatcaacaaaaagagcggcgagatcgtgcccatggaggtgaacttcaacttcgacgaccccaacctgatcatcctgcctctggcctttggcaagagacagggcagagaattcatctggaacgacctgctgtccctggaaaccggcagcctgaagctggccaacggaagagtgatcgagaagacactgtacaacagaagaacccggcaggatgagcctgccctgttcgtggccctgaccttcgagcggcgggaggtcctggactcctccaatatcaaaccaatgaacctgatcggcgtggcaagaggcgaaaacatccccgccgtgatcgccctgaccgaccccgagggctgcccactgagccggtttaaggatagcctgggaaacccaacccacatcctgagaatcggcgagagctataaggagaagcagcggaccatccaggccaagaaggaggtggagcagcggagagccggcggctacagccggaagtacgccagcaaagccaagaatctggcagacgatatggtgagaaacaccgctagagatctgctgtactacgccgtgacccaggatgccatgctgatcttcgccaacctgagccggggcttcggccggcagggcaagcggaccttcatggccgagagacagtacacacggatggaggactggctgaccgccaagctggcctacgagggcctgagcaagacctacctgtccaagacactggcccagtacacctccaagacatgcagcaactgtgggtttaccatcaccagcgccgactacgacagggtgctggagaagctgaagaagacagcaacaggctggatgaccacaattaacggcaaggagctgaaggtggagggccagattacctactacaacagatacaagagacagaacgtagtcaaggacctgtccgtcgagctggatagactgagcgaagaatctgtgaacaacgacatctcctcctggacaaagggcagaagcggagaagctctgagcctcctgaagaaaagattctcccatagacccgtgcaggagaagttcgtgtgcctgaactgcggcttcgagacacacgcagccgagcaagccgccctgaacatcgccagatcctggctgttcctgcggagccaggagtacaagaaataccagacaaacaagacaaccggcaacaccgataagagagccttcgtcgagacctggcagtccttttaccggaagaagcttaaggaggtgtggaaacctgccgtgcggtctggcggatctggcggaggctccacaagcatggccctgacccagggccagctgagcttcagcgacgtggccatcgagttcagccaggaggagtggaagtgcctggaccccggccagaaggccctgtacagggacgtgatgctggagaactacaggaacctgatcagcctgggcatctgcctgcccgacctgagcgtgaccagcatcttcttcaccagcggcctgggcagggccaggctgcagggcggcagcctggccagggtgagcagggtgaccagccccaagaaaaagagaaaagtctaagctgccttctgcggggcttgccttctggccatgcccttcttctctcccttgcacctgtacctcttggtctttgaataaagcctgagtaggaaggctagcaaaaaaaaaaaaaaaaaaaaaaaaaaaaaaaaaaaaaaaaaaaaaaaaaaaaaaaaaaaaaaaaaaaaaaaaaaaaaaaa

SEQ ID NO: 3127 - RNA, 5419 nt, synthetic construct
  source 1..5419: mol_type = other RNA
aggaaataagagagaaaagaagagtaagaagaaatataagagccaccatggcccctaagaagaagcgtaaagtgagccgggtgaacggcagcggcagcggcggcggcatgaaccacgaccaggagttcgacccccctaaggtgtaccctcccgtccccgccgagaagagaaagcccatccgggtcctgagcctgttcgatggcatcgccaccggtctgctggtgctgaaggacctgggcatccaggtggataggtacattgcctccgaggtgtgcgaggactccatcaccgtgggaatggtgcgtcatcagggcaagatcatgtacgtgggcgacgtgcggagcgtgacacagaagcatatccaggagtggggccctttcgacctggtgatcggcggcagcccttgcaatgacctgagcatcgtgaacccagcccggaagggcctgtacgagggaaccggcagactgttcttcgagttttacagactgctgcacgacgcccggcctaaggaaggcgacgaccggcccttcttttggctgttcgagaatgtggtggccatgggagtcagcgacaagcgggatattagccggttcctggagagcaaccccgtgatgatcgatgccaaggaagtgagcgccgcccaccgggccagatacttctggggcaatctgcctggcatgaacagacccctggccagcaccgtgaacgacaagctggagctgcaggagtgcctggagcacggccggatcgccaagttcagcaaggtgagaaccatcaccacccgaagcaacagcatcaaacaaggcaaggaccagcactttcctgtgttcatgaacgagaaggaggacatcctgtggtgtaccgagatggagagagtgttcgggttcccagtccactacacagatgtcagcaacatgtctagactggccagacagagactgctgggaagaagctggtccgtccctgtgatcagacacctgttcgcccctctgaaggagtacttcgcctgcgtgagcagcggcaacagcaacgccaacagccggggccccagcttctctagcggcctggtgccactgtccctgagagggagccacatgggccccatggagatctacaaaaccgtgagcgcctggaagcggcagcctgtgcgcgtgctgagcctgtttcggaatatcgataaagtcctgaaaagcctgggattcctggagagcggctctggctccggcggtggcaccctgaagtacgtggaggatgtgacaaacgtggtcagacgggatgtggagaagtggggccccttcgatctggtgtacggcagcacccaacccctgggcagctcttgtgaccggtgccctggctggtacatgtttcagttccaccggatcctgcagtacgccctgccgagacaggagtcccagcggccattcttttggattttcatggacaacttgctgctgaccgaggatgaccaggaaactaccactcggttcctgcagaccgaagccgtgaccctgcaggacgtgagaggccgggactaccagaacgccatgcgggtgtggtccaacatccctggactgaaaagcaagcacgcacctctgacccctaaagaagaggagtacctgcaggcccaggtgcggagcagaagcaagctggacgcccctaaggtggatctgctggtgaagaattgcctcctgcccctgagagagtacttcaagtatttcagccagaatagtctgcccctgggcggcccaagcagcggcgcccctcctcccagcggcggcagcccagccggctccccaacctctaccgaggagggcacctctgagtccgccacccccgagagcggccctggcacctccaccgagcccagcgagggcagcgcacccggcagccctgccggcagccccacctccacagaggagggaaccagcaccgagcccagcgaaggcagcgccccaggcaccagcaccgagcctagtgagggcggctctggcggcggcagcgcccaggagattaaacggatcaacaagatcagaagaagacttgtgaaagacagcaacaccaagaaggccggcaagacaggccccatgaaaaccctgctggttagagtgatgacacccgatctgagagagcggctggaaaacctgagaaagaagcctgaaaatatcccccagcccatcagcaatacatctagagccaacctgaataagctgctgaccgattacaccgaaatgaagaaggcgatcctgcatgtgtactgggaagagttccagaaggaccctgtgggcctgatgagccgggtggcccagcctgccagcaagaagatcgatcagaacaagctgaaacctgagatggacgagaagggcaacctgaccaccgccggctttgcctgctctcagtgtggccagcccctgttcgtgtacaagctggagcaggtgtctgagaagggcaaggcttacaccaactacttcggacggtgcaatgtggccgagcacgaaaagctgatcctgctggcccagctgaagcccgagaaggatagcgacgaagccgtgacatatagcctgggaaagtttgggcagagggccctggatttctacagcattcatgtgaccaaggagtccacccaccccgtgaagcccctggcccagatcgccggaaacagatacgcctccggacctgtgggaaaggccctgagcgacgcatgtatgggcacaatcgcctccttcctgtctaagtaccaggacatcatcatcgaacaccagaaggtggtgaagggcaaccagaagagactggagagcctgcgggagctggccggcaaggaaaacctggaataccctagcgtgaccctgccacctcagcctcacaccaaggagggcgttgatgcctacaacgaagtgatcgcccgggtgcgaatgtgggtgaacctgaacctgtggcagaagctgaagctaagcagagatgatgccaagcctctgctgagactgaagggattcccttcctttcctctggtcgagagacaggccaacgaagtggactggtgggacatggtgtgtaacgtgaagaagctgatcaacgagaaaaaggaggatggcaaggtgttttggcagaatctggctggctacaagagacaggaagccctgagaccatacctgagcagcgaggaagatcggaagaagggaaagaaattcgctcggtaccagctgggcgacctgctgctgcacctggaaaagaagcacggcgaggactggggaaaggtgtacgacgaggcctgggagcggattgacaagaaagtggaaggcctgagcaagcacatcaagctggaagaggaacggagaagcgaggacgcccagagcaaggccgccctgaccgactggctgcgggctaaggccagcttcgtgatcgagggcctgaaggaggccgacaaggacgagttctgcagatgcgagctgaagctgcagaagtggtacggggacctgcggggaaagcccttcgccatcgaagccgagaacagcatcctggacatcagcggcttcagcaagcagtacaactgtgccttcatctggcagaaggacggcgtgaagaagctgaacctgtacctgatcatcaactacttcaagggcggcaagctgcggttcaagaagatcaaacctgaagccttcgaagccaacagattctacaccgtgatcaacaaaaagagcggcgagatcgtgcccatggaggtgaacttcaacttcgacgaccccaacctgatcatcctgcctctggcctttggcaagagacagggcagagaattcatctggaacgacctgctgtccctggaaaccggcagcctgaagctggccaacggaagagtgatcgagaagacactgtacaacagaagaacccggcaggatgagcctgccctgttcgtggccctgaccttcgagcggcgggaggtcctggactcctccaatatcaaaccaatgaacctgatcggcgtggcaagaggcgaaaacatccccgccgtgatcgccctgaccgaccccgagggctgcccactgagccggtttaaggatagcctgggaaacccaacccacatcctgagaatcggcgagagctataaggagaagcagcggaccatccaggccaagaaggaggtggagcagcggagagccggcggctacagccggaagtacgccagcaaagccaagaatctggcagacgatatggtgagaaacaccgctagagatctgctgtactacgccgtgacccaggatgccatgctgatcttcgccaacctgagccggggcttcggccggcagggcaagcggaccttcatggccgagagacagtacacacggatggaggactggctgaccgccaagctggcctacgagggcctgagcaagacctacctgtccaagacactggcccagtacacctccaagacatgcagcaactgtgggtttaccatcaccagcgccgactacgacagggtgctggagaagctgaagaagacagcaacaggctggatgaccacaattaacggcaaggagctgaaggtggagggccagattacctactacaacagatacaagagacagaacgtagtcaaggacctgtccgtcgagctggatagactgagcgaagaatctgtgaacaacgacatctcctcctggacaaagggcagaagcggagaagctctgagcctcctgaagaaaagattctcccatagacccgtgcaggagaagttcgtgtgcctgaactgcggcttcgagacacacgcagccgagcaagccgccctgaacatcgccagatcctggctgttcctgcggagccaggagtacaagaaataccagacaaacaagacaaccggcaacaccgataagagagccttcgtcgagacctggcagtccttttaccggaagaagcttaaggaggtgtggaaacctgccgtgcggtctggcggatctggcggaggctccacaagctaccaggaggccctgaccttccaggacgtgaaggtgaccttcagccaggaggagtggggctgcctggacagcgcccagaggaacctgtacagggacgtgatgctggagaactacggcaacgtggtgagcgtggtgggcagcagccccaagcccgccctgatcagctggctggaggccaggaagcccagcaccgtgaacatctgcaaggtgcagcccaagagggacagcggcaccgcccccgagaccagccccaagaaaaagagaaaagtctaagctgccttctgcggggcttgccttctggccatgcccttcttctctcccttgcacctgtacctcttggtctttgaataaagcctgagtaggaaggctagcaaaaaaaaaaaaaaaaaaaaaaaaaaaaaaaaaaaaaaaaaaaaaaaaaaaaaaaaaaaaaaaaaaaaaaaaaaaaaaaa

SEQ ID NO: 3128 - RNA, 5419 nt, synthetic construct
  source 1..5419: mol_type = other RNA
aggaaataagagagaaaagaagagtaagaagaaatataagagccaccatggcccctaagaagaagcgtaaagtgagccgggtgaacggcagcggcagcggcggcggcatgaaccacgaccaggagttcgacccccctaaggtgtaccctcccgtccccgccgagaagagaaagcccatccgggtcctgagcctgttcgatggcatcgccaccggtctgctggtgctgaaggacctgggcatccaggtggataggtacattgcctccgaggtgtgcgaggactccatcaccgtgggaatggtgcgtcatcagggcaagatcatgtacgtgggcgacgtgcggagcgtgacacagaagcatatccaggagtggggccctttcgacctggtgatcggcggcagcccttgcaatgacctgagcatcgtgaacccagcccggaagggcctgtacgagggaaccggcagactgttcttcgagttttacagactgctgcacgacgcccggcctaaggaaggcgacgaccggcccttcttttggctgttcgagaatgtggtggccatgggagtcagcgacaagcgggatattagccggttcctggagagcaaccccgtgatgatcgatgccaaggaagtgagcgccgcccaccgggccagatacttctggggcaatctgcctggcatgaacagacccctggccagcaccgtgaacgacaagctggagctgcaggagtgcctggagcacggccggatcgccaagttcagcaaggtgagaaccatcaccacccgaagcaacagcatcaaacaaggcaaggaccagcactttcctgtgttcatgaacgagaaggaggacatcctgtggtgtaccgagatggagagagtgttcgggttcccagtccactacacagatgtcagcaacatgtctagactggccagacagagactgctgggaagaagctggtccgtccctgtgatcagacacctgttcgcccctctgaaggagtacttcgcctgcgtgagcagcggcaacagcaacgccaacagccggggccccagcttctctagcggcctggtgccactgtccctgagagggagccacatgggccccatggagatctacaaaaccgtgagcgcctggaagcggcagcctgtgcgcgtgctgagcctgtttcggaatatcgataaagtcctgaaaagcctgggattcctggagagcggctctggctccggcggtggcaccctgaagtacgtggaggatgtgacaaacgtggtcagacgggatgtggagaagtggggccccttcgatctggtgtacggcagcacccaacccctgggcagctcttgtgaccggtgccctggctggtacatgtttcagttccaccggatcctgcagtacgccctgccgagacaggagtcccagcggccattcttttggattttcatggacaacttgctgctgaccgaggatgaccaggaaactaccactcggttcctgcagaccgaagccgtgaccctgcaggacgtgagaggccgggactaccagaacgccatgcgggtgtggtccaacatccctggactgaaaagcaagcacgcacctctgacccctaaagaagaggagtacctgcaggcccaggtgcggagcagaagcaagctggacgcccctaaggtggatctgctggtgaagaattgcctcctgcccctgagagagtacttcaagtatttcagccagaatagtctgcccctgggcggcccaagcagcggcgcccctcctcccagcggcggcagcccagccggctccccaacctctaccgaggagggcacctctgagtccgccacccccgagagcggccctggcacctccaccgagcccagcgagggcagcgcacccggcagccctgccggcagccccacctccacagaggagggaaccagcaccgagcccagcgaaggcagcgccccaggcaccagcaccgagcctagtgagggcggctctggcggcggcagcgcccaggagattaaacggatcaacaagatcagaagaagacttgtgaaagacagcaacaccaagaaggccggcaagacaggccccatgaaaaccctgctggttagagtgatgacacccgatctgagagagcggctggaaaacctgagaaagaagcctgaaaatatcccccagcccatcagcaatacatctagagccaacctgaataagctgctgaccgattacaccgaaatgaagaaggcgatcctgcatgtgtactgggaagagttccagaaggaccctgtgggcctgatgagccgggtggcccagcctgccagcaagaagatcgatcagaacaagctgaaacctgagatggacgagaagggcaacctgaccaccgccggctttgcctgctctcagtgtggccagcccctgttcgtgtacaagctggagcaggtgtctgagaagggcaaggcttacaccaactacttcggacggtgcaatgtggccgagcacgaaaagctgatcctgctggcccagctgaagcccgagaaggatagcgacgaagccgtgacatatagcctgggaaagtttgggcagagggccctggatttctacagcattcatgtgaccaaggagtccacccaccccgtgaagcccctggcccagatcgccggaaacagatacgcctccggacctgtgggaaaggccctgagcgacgcatgtatgggcacaatcgcctccttcctgtctaagtaccaggacatcatcatcgaacaccagaaggtggtgaagggcaaccagaagagactggagagcctgcgggagctggccggcaaggaaaacctggaataccctagcgtgaccctgccacctcagcctcacaccaaggagggcgttgatgcctacaacgaagtgatcgcccgggtgcgaatgtgggtgaacctgaacctgtggcagaagctgaagctaagcagagatgatgccaagcctctgctgagactgaagggattcccttcctttcctctggtcgagagacaggccaacgaagtggactggtgggacatggtgtgtaacgtgaagaagctgatcaacgagaaaaaggaggatggcaaggtgttttggcagaatctggctggctacaagagacaggaagccctgagaccatacctgagcagcgaggaagatcggaagaagggaaagaaattcgctcggtaccagctgggcgacctgctgctgcacctggaaaagaagcacggcgaggactggggaaaggtgtacgacgaggcctgggagcggattgacaagaaagtggaaggcctgagcaagcacatcaagctggaagaggaacggagaagcgaggacgcccagagcaaggccgccctgaccgactggctgcgggctaaggccagcttcgtgatcgagggcctgaaggaggccgacaaggacgagttctgcagatgcgagctgaagctgcagaagtggtacggggacctgcggggaaagcccttcgccatcgaagccgagaacagcatcctggacatcagcggcttcagcaagcagtacaactgtgccttcatctggcagaaggacggcgtgaagaagctgaacctgtacctgatcatcaactacttcaagggcggcaagctgcggttcaagaagatcaaacctgaagccttcgaagccaacagattctacaccgtgatcaacaaaaagagcggcgagatcgtgcccatggaggtgaacttcaacttcgacgaccccaacctgatcatcctgcctctggcctttggcaagagacagggcagagaattcatctggaacgacctgctgtccctggaaaccggcagcctgaagctggccaacggaagagtgatcgagaagacactgtacaacagaagaacccggcaggatgagcctgccctgttcgtggccctgaccttcgagcggcgggaggtcctggactcctccaatatcaaaccaatgaacctgatcggcgtggcaagaggcgaaaacatccccgccgtgatcgccctgaccgaccccgagggctgcccactgagccggtttaaggatagcctgggaaacccaacccacatcctgagaatcggcgagagctataaggagaagcagcggaccatccaggccaagaaggaggtggagcagcggagagccggcggctacagccggaagtacgccagcaaagccaagaatctggcagacgatatggtgagaaacaccgctagagatctgctgtactacgccgtgacccaggatgccatgctgatcttcgccaacctgagccggggcttcggccggcagggcaagcggaccttcatggccgagagacagtacacacggatggaggactggctgaccgccaagctggcctacgagggcctgagcaagacctacctgtccaagacactggcccagtacacctccaagacatgcagcaactgtgggtttaccatcaccagcgccgactacgacagggtgctggagaagctgaagaagacagcaacaggctggatgaccacaattaacggcaaggagctgaaggtggagggccagattacctactacaacagatacaagagacagaacgtagtcaaggacctgtccgtcgagctggatagactgagcgaagaatctgtgaacaacgacatctcctcctggacaaagggcagaagcggagaagctctgagcctcctgaagaaaagattctcccatagacccgtgcaggagaagttcgtgtgcctgaactgcggcttcgagacacacgcagccgagcaagccgccctgaacatcgccagatcctggctgttcctgcggagccaggagtacaagaaataccagacaaacaagacaaccggcaacaccgataagagagccttcgtcgagacctggcagtccttttaccggaagaagcttaaggaggtgtggaaacctgccgtgcggtctggcggatctggcggaggctccacaagccagggcagcgtgagcttcgaggacgtggccgtgtacttcaccgaggaggagtgggccctgctggacagcagccagagggccctgcacagggaggtgatgctggagaacagcaggaacctggccgccgtgggctacggccaggagcacaagaactaccaggagcccagcctggccctgttccagagcgaggagaggatgctgggcatccagagggtgctgcagaagaccaggaggagctgcctgaccagccccaagaaaaagagaaaagtctaagctgccttctgcggggcttgccttctggccatgcccttcttctctcccttgcacctgtacctcttggtctttgaataaagcctgagtaggaaggctagcaaaaaaaaaaaaaaaaaaaaaaaaaaaaaaaaaaaaaaaaaaaaaaaaaaaaaaaaaaaaaaaaaaaaaaaaaaaaaaaa

SEQ ID NO: 3129 - RNA, 5419 nt, synthetic construct
  source 1..5419: mol_type = other RNA
aggaaataagagagaaaagaagagtaagaagaaatataagagccaccatggcccctaagaagaagcgtaaagtgagccgggtgaacggcagcggcagcggcggcggcatgaaccacgaccaggagttcgacccccctaaggtgtaccctcccgtccccgccgagaagagaaagcccatccgggtcctgagcctgttcgatggcatcgccaccggtctgctggtgctgaaggacctgggcatccaggtggataggtacattgcctccgaggtgtgcgaggactccatcaccgtgggaatggtgcgtcatcagggcaagatcatgtacgtgggcgacgtgcggagcgtgacacagaagcatatccaggagtggggccctttcgacctggtgatcggcggcagcccttgcaatgacctgagcatcgtgaacccagcccggaagggcctgtacgagggaaccggcagactgttcttcgagttttacagactgctgcacgacgcccggcctaaggaaggcgacgaccggcccttcttttggctgttcgagaatgtggtggccatgggagtcagcgacaagcgggatattagccggttcctggagagcaaccccgtgatgatcgatgccaaggaagtgagcgccgcccaccgggccagatacttctggggcaatctgcctggcatgaacagacccctggccagcaccgtgaacgacaagctggagctgcaggagtgcctggagcacggccggatcgccaagttcagcaaggtgagaaccatcaccacccgaagcaacagcatcaaacaaggcaaggaccagcactttcctgtgttcatgaacgagaaggaggacatcctgtggtgtaccgagatggagagagtgttcgggttcccagtccactacacagatgtcagcaacatgtctagactggccagacagagactgctgggaagaagctggtccgtccctgtgatcagacacctgttcgcccctctgaaggagtacttcgcctgcgtgagcagcggcaacagcaacgccaacagccggggccccagcttctctagcggcctggtgccactgtccctgagagggagccacatgggccccatggagatctacaaaaccgtgagcgcctggaagcggcagcctgtgcgcgtgctgagcctgtttcggaatatcgataaagtcctgaaaagcctgggattcctggagagcggctctggctccggcggtggcaccctgaagtacgtggaggatgtgacaaacgtggtcagacgggatgtggagaagtggggccccttcgatctggtgtacggcagcacccaacccctgggcagctcttgtgaccggtgccctggctggtacatgtttcagttccaccggatcctgcagtacgccctgccgagacaggagtcccagcggccattcttttggattttcatggacaacttgctgctgaccgaggatgaccaggaaactaccactcggttcctgcagaccgaagccgtgaccctgcaggacgtgagaggccgggactaccagaacgccatgcgggtgtggtccaacatccctggactgaaaagcaagcacgcacctctgacccctaaagaagaggagtacctgcaggcccaggtgcggagcagaagcaagctggacgcccctaaggtggatctgctggtgaagaattgcctcctgcccctgagagagtacttcaagtatttcagccagaatagtctgcccctgggcggcccaagcagcggcgcccctcctcccagcggcggcagcccagccggctccccaacctctaccgaggagggcacctctgagtccgccacccccgagagcggccctggcacctccaccgagcccagcgagggcagcgcacccggcagccctgccggcagccccacctccacagaggagggaaccagcaccgagcccagcgaaggcagcgccccaggcaccagcaccgagcctagtgagggcggctctggcggcggcagcgcccaggagattaaacggatcaacaagatcagaagaagacttgtgaaagacagcaacaccaagaaggccggcaagacaggccccatgaaaaccctgctggttagagtgatgacacccgatctgagagagcggctggaaaacctgagaaagaagcctgaaaatatcccccagcccatcagcaatacatctagagccaacctgaataagctgctgaccgattacaccgaaatgaagaaggcgatcctgcatgtgtactgggaagagttccagaaggaccctgtgggcctgatgagccgggtggcccagcctgccagcaagaagatcgatcagaacaagctgaaacctgagatggacgagaagggcaacctgaccaccgccggctttgcctgctctcagtgtggccagcccctgttcgtgtacaagctggagcaggtgtctgagaagggcaaggcttacaccaactacttcggacggtgcaatgtggccgagcacgaaaagctgatcctgctggcccagctgaagcccgagaaggatagcgacgaagccgtgacatatagcctgggaaagtttgggcagagggccctggatttctacagcattcatgtgaccaaggagtccacccaccccgtgaagcccctggcccagatcgccggaaacagatacgcctccggacctgtgggaaaggccctgagcgacgcatgtatgggcacaatcgcctccttcctgtctaagtaccaggacatcatcatcgaacaccagaaggtggtgaagggcaaccagaagagactggagagcctgcgggagctggccggcaaggaaaacctggaataccctagcgtgaccctgccacctcagcctcacaccaaggagggcgttgatgcctacaacgaagtgatcgcccgggtgcgaatgtgggtgaacctgaacctgtggcagaagctgaagctaagcagagatgatgccaagcctctgctgagactgaagggattcccttcctttcctctggtcgagagacaggccaacgaagtggactggtgggacatggtgtgtaacgtgaagaagctgatcaacgagaaaaaggaggatggcaaggtgttttggcagaatctggctggctacaagagacaggaagccctgagaccatacctgagcagcgaggaagatcggaagaagggaaagaaattcgctcggtaccagctgggcgacctgctgctgcacctggaaaagaagcacggcgaggactggggaaaggtgtacgacgaggcctgggagcggattgacaagaaagtggaaggcctgagcaagcacatcaagctggaagaggaacggagaagcgaggacgcccagagcaaggccgccctgaccgactggctgcgggctaaggccagcttcgtgatcgagggcctgaaggaggccgacaaggacgagttctgcagatgcgagctgaagctgcagaagtggtacggggacctgcggggaaagcccttcgccatcgaagccgagaacagcatcctggacatcagcggcttcagcaagcagtacaactgtgccttcatctggcagaaggacggcgtgaagaagctgaacctgtacctgatcatcaactacttcaagggcggcaagctgcggttcaagaagatcaaacctgaagccttcgaagccaacagattctacaccgtgatcaacaaaaagagcggcgagatcgtgcccatggaggtgaacttcaacttcgacgaccccaacctgatcatcctgcctctggcctttggcaagagacagggcagagaattcatctggaacgacctgctgtccctggaaaccggcagcctgaagctggccaacggaagagtgatcgagaagacactgtacaacagaagaacccggcaggatgagcctgccctgttcgtggccctgaccttcgagcggcgggaggtcctggactcctccaatatcaaaccaatgaacctgatcggcgtggcaagaggcgaaaacatccccgccgtgatcgccctgaccgaccccgagggctgcccactgagccggtttaaggatagcctgggaaacccaacccacatcctgagaatcggcgagagctataaggagaagcagcggaccatccaggccaagaaggaggtggagcagcggagagccggcggctacagccggaagtacgccagcaaagccaagaatctggcagacgatatggtgagaaacaccgctagagatctgctgtactacgccgtgacccaggatgccatgctgatcttcgccaacctgagccggggcttcggccggcagggcaagcggaccttcatggccgagagacagtacacacggatggaggactggctgaccgccaagctggcctacgagggcctgagcaagacctacctgtccaagacactggcccagtacacctccaagacatgcagcaactgtgggtttaccatcaccagcgccgactacgacagggtgctggagaagctgaagaagacagcaacaggctggatgaccacaattaacggcaaggagctgaaggtggagggccagattacctactacaacagatacaagagacagaacgtagtcaaggacctgtccgtcgagctggatagactgagcgaagaatctgtgaacaacgacatctcctcctggacaaagggcagaagcggagaagctctgagcctcctgaagaaaagattctcccatagacccgtgcaggagaagttcgtgtgcctgaactgcggcttcgagacacacgcagccgagcaagccgccctgaacatcgccagatcctggctgttcctgcggagccaggagtacaagaaataccagacaaacaagacaaccggcaacaccgataagagagccttcgtcgagacctggcagtccttttaccggaagaagcttaaggaggtgtggaaacctgccgtgcggtctggcggatctggcggaggctccacaagcggccaggaggaggtgaccttcaaggacgtggccgtggacttcaccagggaggagtggaggctgctgagccccccccagaaggagctgtacaaggaggtgatggtggagaacgccaggaacctgctgagcgtgggcctgcccgcccccaccaaggacgtgctgagctacctgaagaagaggggcgcccccgtgatgctggagcaggagggcctgaggaactacttccccgagggcgagatcaggaccagccccaagaaaaagagaaaagtctaagctgccttctgcggggcttgccttctggccatgcccttcttctctcccttgcacctgtacctcttggtctttgaataaagcctgagtaggaaggctagcaaaaaaaaaaaaaaaaaaaaaaaaaaaaaaaaaaaaaaaaaaaaaaaaaaaaaaaaaaaaaaaaaaaaaaaaaaaaaaaa

SEQ ID NO: 3130 - RNA, 5419 nt, synthetic construct
  source 1..5419: mol_type = other RNA
aggaaataagagagaaaagaagagtaagaagaaatataagagccaccatggcccctaagaagaagcgtaaagtgagccgggtgaacggcagcggcagcggcggcggcatgaaccacgaccaggagttcgacccccctaaggtgtaccctcccgtccccgccgagaagagaaagcccatccgggtcctgagcctgttcgatggcatcgccaccggtctgctggtgctgaaggacctgggcatccaggtggataggtacattgcctccgaggtgtgcgaggactccatcaccgtgggaatggtgcgtcatcagggcaagatcatgtacgtgggcgacgtgcggagcgtgacacagaagcatatccaggagtggggccctttcgacctggtgatcggcggcagcccttgcaatgacctgagcatcgtgaacccagcccggaagggcctgtacgagggaaccggcagactgttcttcgagttttacagactgctgcacgacgcccggcctaaggaaggcgacgaccggcccttcttttggctgttcgagaatgtggtggccatgggagtcagcgacaagcgggatattagccggttcctggagagcaaccccgtgatgatcgatgccaaggaagtgagcgccgcccaccgggccagatacttctggggcaatctgcctggcatgaacagacccctggccagcaccgtgaacgacaagctggagctgcaggagtgcctggagcacggccggatcgccaagttcagcaaggtgagaaccatcaccacccgaagcaacagcatcaaacaaggcaaggaccagcactttcctgtgttcatgaacgagaaggaggacatcctgtggtgtaccgagatggagagagtgttcgggttcccagtccactacacagatgtcagcaacatgtctagactggccagacagagactgctgggaagaagctggtccgtccctgtgatcagacacctgttcgcccctctgaaggagtacttcgcctgcgtgagcagcggcaacagcaacgccaacagccggggccccagcttctctagcggcctggtgccactgtccctgagagggagccacatgggccccatggagatctacaaaaccgtgagcgcctggaagcggcagcctgtgcgcgtgctgagcctgtttcggaatatcgataaagtcctgaaaagcctgggattcctggagagcggctctggctccggcggtggcaccctgaagtacgtggaggatgtgacaaacgtggtcagacgggatgtggagaagtggggccccttcgatctggtgtacggcagcacccaacccctgggcagctcttgtgaccggtgccctggctggtacatgtttcagttccaccggatcctgcagtacgccctgccgagacaggagtcccagcggccattcttttggattttcatggacaacttgctgctgaccgaggatgaccaggaaactaccactcggttcctgcagaccgaagccgtgaccctgcaggacgtgagaggccgggactaccagaacgccatgcgggtgtggtccaacatccctggactgaaaagcaagcacgcacctctgacccctaaagaagaggagtacctgcaggcccaggtgcggagcagaagcaagctggacgcccctaaggtggatctgctggtgaagaattgcctcctgcccctgagagagtacttcaagtatttcagccagaatagtctgcccctgggcggcccaagcagcggcgcccctcctcccagcggcggcagcccagccggctccccaacctctaccgaggagggcacctctgagtccgccacccccgagagcggccctggcacctccaccgagcccagcgagggcagcgcacccggcagccctgccggcagccccacctccacagaggagggaaccagcaccgagcccagcgaaggcagcgccccaggcaccagcaccgagcctagtgagggcggctctggcggcggcagcgcccaggagattaaacggatcaacaagatcagaagaagacttgtgaaagacagcaacaccaagaaggccggcaagacaggccccatgaaaaccctgctggttagagtgatgacacccgatctgagagagcggctggaaaacctgagaaagaagcctgaaaatatcccccagcccatcagcaatacatctagagccaacctgaataagctgctgaccgattacaccgaaatgaagaaggcgatcctgcatgtgtactgggaagagttccagaaggaccctgtgggcctgatgagccgggtggcccagcctgccagcaagaagatcgatcagaacaagctgaaacctgagatggacgagaagggcaacctgaccaccgccggctttgcctgctctcagtgtggccagcccctgttcgtgtacaagctggagcaggtgtctgagaagggcaaggcttacaccaactacttcggacggtgcaatgtggccgagcacgaaaagctgatcctgctggcccagctgaagcccgagaaggatagcgacgaagccgtgacatatagcctgggaaagtttgggcagagggccctggatttctacagcattcatgtgaccaaggagtccacccaccccgtgaagcccctggcccagatcgccggaaacagatacgcctccggacctgtgggaaaggccctgagcgacgcatgtatgggcacaatcgcctccttcctgtctaagtaccaggacatcatcatcgaacaccagaaggtggtgaagggcaaccagaagagactggagagcctgcgggagctggccggcaaggaaaacctggaataccctagcgtgaccctgccacctcagcctcacaccaaggagggcgttgatgcctacaacgaagtgatcgcccgggtgcgaatgtgggtgaacctgaacctgtggcagaagctgaagctaagcagagatgatgccaagcctctgctgagactgaagggattcccttcctttcctctggtcgagagacaggccaacgaagtggactggtgggacatggtgtgtaacgtgaagaagctgatcaacgagaaaaaggaggatggcaaggtgttttggcagaatctggctggctacaagagacaggaagccctgagaccatacctgagcagcgaggaagatcggaagaagggaaagaaattcgctcggtaccagctgggcgacctgctgctgcacctggaaaagaagcacggcgaggactggggaaaggtgtacgacgaggcctgggagcggattgacaagaaagtggaaggcctgagcaagcacatcaagctggaagaggaacggagaagcgaggacgcccagagcaaggccgccctgaccgactggctgcgggctaaggccagcttcgtgatcgagggcctgaaggaggccgacaaggacgagttctgcagatgcgagctgaagctgcagaagtggtacggggacctgcggggaaagcccttcgccatcgaagccgagaacagcatcctggacatcagcggcttcagcaagcagtacaactgtgccttcatctggcagaaggacggcgtgaagaagctgaacctgtacctgatcatcaactacttcaagggcggcaagctgcggttcaagaagatcaaacctgaagccttcgaagccaacagattctacaccgtgatcaacaaaaagagcggcgagatcgtgcccatggaggtgaacttcaacttcgacgaccccaacctgatcatcctgcctctggcctttggcaagagacagggcagagaattcatctggaacgacctgctgtccctggaaaccggcagcctgaagctggccaacggaagagtgatcgagaagacactgtacaacagaagaacccggcaggatgagcctgccctgttcgtggccctgaccttcgagcggcgggaggtcctggactcctccaatatcaaaccaatgaacctgatcggcgtggcaagaggcgaaaacatccccgccgtgatcgccctgaccgaccccgagggctgcccactgagccggtttaaggatagcctgggaaacccaacccacatcctgagaatcggcgagagctataaggagaagcagcggaccatccaggccaagaaggaggtggagcagcggagagccggcggctacagccggaagtacgccagcaaagccaagaatctggcagacgatatggtgagaaacaccgctagagatctgctgtactacgccgtgacccaggatgccatgctgatcttcgccaacctgagccggggcttcggccggcagggcaagcggaccttcatggccgagagacagtacacacggatggaggactggctgaccgccaagctggcctacgagggcctgagcaagacctacctgtccaagacactggcccagtacacctccaagacatgcagcaactgtgggtttaccatcaccagcgccgactacgacagggtgctggagaagctgaagaagacagcaacaggctggatgaccacaattaacggcaaggagctgaaggtggagggccagattacctactacaacagatacaagagacagaacgtagtcaaggacctgtccgtcgagctggatagactgagcgaagaatctgtgaacaacgacatctcctcctggacaaagggcagaagcggagaagctctgagcctcctgaagaaaagattctcccatagacccgtgcaggagaagttcgtgtgcctgaactgcggcttcgagacacacgcagccgagcaagccgccctgaacatcgccagatcctggctgttcctgcggagccaggagtacaagaaataccagacaaacaagacaaccggcaacaccgataagagagccttcgtcgagacctggcagtccttttaccggaagaagcttaaggaggtgtggaaacctgccgtgcggtctggcggatctggcggaggctccacaagcgagccctgggccgtgaccttcgccgacgtggccgtgtacttcagcagcgaggagtggaggtgcctgaggcccgcccagagggccctgtacagggacgtgatgagggacacctacggcctgctgagcgccctgggcggcggcggcaccaagcccgccctgatcagctgggtggagggcgaggccgagctgtgggaccccgacgcccaggaccccgaggtggtgaggtggcccgccgaggccgacaccagccccaagaaaaagagaaaagtctaagctgccttctgcggggcttgccttctggccatgcccttcttctctcccttgcacctgtacctcttggtctttgaataaagcctgagtaggaaggctagcaaaaaaaaaaaaaaaaaaaaaaaaaaaaaaaaaaaaaaaaaaaaaaaaaaaaaaaaaaaaaaaaaaaaaaaaaaaaaaaa

SEQ ID NO: 3131 - RNA, 5419 nt, synthetic construct
  source 1..5419: mol_type = other RNA
aggaaataagagagaaaagaagagtaagaagaaatataagagccaccatggcccctaagaagaagcgtaaagtgagccgggtgaacggcagcggcagcggcggcggcatgaaccacgaccaggagttcgacccccctaaggtgtaccctcccgtccccgccgagaagagaaagcccatccgggtcctgagcctgttcgatggcatcgccaccggtctgctggtgctgaaggacctgggcatccaggtggataggtacattgcctccgaggtgtgcgaggactccatcaccgtgggaatggtgcgtcatcagggcaagatcatgtacgtgggcgacgtgcggagcgtgacacagaagcatatccaggagtggggccctttcgacctggtgatcggcggcagcccttgcaatgacctgagcatcgtgaacccagcccggaagggcctgtacgagggaaccggcagactgttcttcgagttttacagactgctgcacgacgcccggcctaaggaaggcgacgaccggcccttcttttggctgttcgagaatgtggtggccatgggagtcagcgacaagcgggatattagccggttcctggagagcaaccccgtgatgatcgatgccaaggaagtgagcgccgcccaccgggccagatacttctggggcaatctgcctggcatgaacagacccctggccagcaccgtgaacgacaagctggagctgcaggagtgcctggagcacggccggatcgccaagttcagcaaggtgagaaccatcaccacccgaagcaacagcatcaaacaaggcaaggaccagcactttcctgtgttcatgaacgagaaggaggacatcctgtggtgtaccgagatggagagagtgttcgggttcccagtccactacacagatgtcagcaacatgtctagactggccagacagagactgctgggaagaagctggtccgtccctgtgatcagacacctgttcgcccctctgaaggagtacttcgcctgcgtgagcagcggcaacagcaacgccaacagccggggccccagcttctctagcggcctggtgccactgtccctgagagggagccacatgggccccatggagatctacaaaaccgtgagcgcctggaagcggcagcctgtgcgcgtgctgagcctgtttcggaatatcgataaagtcctgaaaagcctgggattcctggagagcggctctggctccggcggtggcaccctgaagtacgtggaggatgtgacaaacgtggtcagacgggatgtggagaagtggggccccttcgatctggtgtacggcagcacccaacccctgggcagctcttgtgaccggtgccctggctggtacatgtttcagttccaccggatcctgcagtacgccctgccgagacaggagtcccagcggccattcttttggattttcatggacaacttgctgctgaccgaggatgaccaggaaactaccactcggttcctgcagaccgaagccgtgaccctgcaggacgtgagaggccgggactaccagaacgccatgcgggtgtggtccaacatccctggactgaaaagcaagcacgcacctctgacccctaaagaagaggagtacctgcaggcccaggtgcggagcagaagcaagctggacgcccctaaggtggatctgctggtgaagaattgcctcctgcccctgagagagtacttcaagtatttcagccagaatagtctgcccctgggcggcccaagcagcggcgcccctcctcccagcggcggcagcccagccggctccccaacctctaccgaggagggcacctctgagtccgccacccccgagagcggccctggcacctccaccgagcccagcgagggcagcgcacccggcagccctgccggcagccccacctccacagaggagggaaccagcaccgagcccagcgaaggcagcgccccaggcaccagcaccgagcctagtgagggcggctctggcggcggcagcgcccaggagattaaacggatcaacaagatcagaagaagacttgtgaaagacagcaacaccaagaaggccggcaagacaggccccatgaaaaccctgctggttagagtgatgacacccgatctgagagagcggctggaaaacctgagaaagaagcctgaaaatatcccccagcccatcagcaatacatctagagccaacctgaataagctgctgaccgattacaccgaaatgaagaaggcgatcctgcatgtgtactgggaagagttccagaaggaccctgtgggcctgatgagccgggtggcccagcctgccagcaagaagatcgatcagaacaagctgaaacctgagatggacgagaagggcaacctgaccaccgccggctttgcctgctctcagtgtggccagcccctgttcgtgtacaagctggagcaggtgtctgagaagggcaaggcttacaccaactacttcggacggtgcaatgtggccgagcacgaaaagctgatcctgctggcccagctgaagcccgagaaggatagcgacgaagccgtgacatatagcctgggaaagtttgggcagagggccctggatttctacagcattcatgtgaccaaggagtccacccaccccgtgaagcccctggcccagatcgccggaaacagatacgcctccggacctgtgggaaaggccctgagcgacgcatgtatgggcacaatcgcctccttcctgtctaagtaccaggacatcatcatcgaacaccagaaggtggtgaagggcaaccagaagagactggagagcctgcgggagctggccggcaaggaaaacctggaataccctagcgtgaccctgccacctcagcctcacaccaaggagggcgttgatgcctacaacgaagtgatcgcccgggtgcgaatgtgggtgaacctgaacctgtggcagaagctgaagctaagcagagatgatgccaagcctctgctgagactgaagggattcccttcctttcctctggtcgagagacaggccaacgaagtggactggtgggacatggtgtgtaacgtgaagaagctgatcaacgagaaaaaggaggatggcaaggtgttttggcagaatctggctggctacaagagacaggaagccctgagaccatacctgagcagcgaggaagatcggaagaagggaaagaaattcgctcggtaccagctgggcgacctgctgctgcacctggaaaagaagcacggcgaggactggggaaaggtgtacgacgaggcctgggagcggattgacaagaaagtggaaggcctgagcaagcacatcaagctggaagaggaacggagaagcgaggacgcccagagcaaggccgccctgaccgactggctgcgggctaaggccagcttcgtgatcgagggcctgaaggaggccgacaaggacgagttctgcagatgcgagctgaagctgcagaagtggtacggggacctgcggggaaagcccttcgccatcgaagccgagaacagcatcctggacatcagcggcttcagcaagcagtacaactgtgccttcatctggcagaaggacggcgtgaagaagctgaacctgtacctgatcatcaactacttcaagggcggcaagctgcggttcaagaagatcaaacctgaagccttcgaagccaacagattctacaccgtgatcaacaaaaagagcggcgagatcgtgcccatggaggtgaacttcaacttcgacgaccccaacctgatcatcctgcctctggcctttggcaagagacagggcagagaattcatctggaacgacctgctgtccctggaaaccggcagcctgaagctggccaacggaagagtgatcgagaagacactgtacaacagaagaacccggcaggatgagcctgccctgttcgtggccctgaccttcgagcggcgggaggtcctggactcctccaatatcaaaccaatgaacctgatcggcgtggcaagaggcgaaaacatccccgccgtgatcgccctgaccgaccccgagggctgcccactgagccggtttaaggatagcctgggaaacccaacccacatcctgagaatcggcgagagctataaggagaagcagcggaccatccaggccaagaaggaggtggagcagcggagagccggcggctacagccggaagtacgccagcaaagccaagaatctggcagacgatatggtgagaaacaccgctagagatctgctgtactacgccgtgacccaggatgccatgctgatcttcgccaacctgagccggggcttcggccggcagggcaagcggaccttcatggccgagagacagtacacacggatggaggactggctgaccgccaagctggcctacgagggcctgagcaagacctacctgtccaagacactggcccagtacacctccaagacatgcagcaactgtgggtttaccatcaccagcgccgactacgacagggtgctggagaagctgaagaagacagcaacaggctggatgaccacaattaacggcaaggagctgaaggtggagggccagattacctactacaacagatacaagagacagaacgtagtcaaggacctgtccgtcgagctggatagactgagcgaagaatctgtgaacaacgacatctcctcctggacaaagggcagaagcggagaagctctgagcctcctgaagaaaagattctcccatagacccgtgcaggagaagttcgtgtgcctgaactgcggcttcgagacacacgcagccgagcaagccgccctgaacatcgccagatcctggctgttcctgcggagccaggagtacaagaaataccagacaaacaagacaaccggcaacaccgataagagagccttcgtcgagacctggcagtccttttaccggaagaagcttaaggaggtgtggaaacctgccgtgcggtctggcggatctggcggaggctccacaagcgtgcagagccacgtggtgttcgaggacgtggccatctacttcagccaggaggagtggggcctgctggacgaggcccagaggttcctgtaccacgccgtgatgctggagaacttcgccctgctgagcagcctgggctgctggcacggcgcccaggacgagcaggccctgagcgagcagggcgtgagcgtgggcggcagccaggtgaggacccccaagcccgcccccagcatccagaagagccagaccagccccaagaaaaagagaaaagtctaagctgccttctgcggggcttgccttctggccatgcccttcttctctcccttgcacctgtacctcttggtctttgaataaagcctgagtaggaaggctagcaaaaaaaaaaaaaaaaaaaaaaaaaaaaaaaaaaaaaaaaaaaaaaaaaaaaaaaaaaaaaaaaaaaaaaaaaaaaaaaa

SEQ ID NO: 3132 - RNA, 5419 nt, synthetic construct
  source 1..5419: mol_type = other RNA
aggaaataagagagaaaagaagagtaagaagaaatataagagccaccatggcccctaagaagaagcgtaaagtgagccgggtgaacggcagcggcagcggcggcggcatgaaccacgaccaggagttcgacccccctaaggtgtaccctcccgtccccgccgagaagagaaagcccatccgggtcctgagcctgttcgatggcatcgccaccggtctgctggtgctgaaggacctgggcatccaggtggataggtacattgcctccgaggtgtgcgaggactccatcaccgtgggaatggtgcgtcatcagggcaagatcatgtacgtgggcgacgtgcggagcgtgacacagaagcatatccaggagtggggccctttcgacctggtgatcggcggcagcccttgcaatgacctgagcatcgtgaacccagcccggaagggcctgtacgagggaaccggcagactgttcttcgagttttacagactgctgcacgacgcccggcctaaggaaggcgacgaccggcccttcttttggctgttcgagaatgtggtggccatgggagtcagcgacaagcgggatattagccggttcctggagagcaaccccgtgatgatcgatgccaaggaagtgagcgccgcccaccgggccagatacttctggggcaatctgcctggcatgaacagacccctggccagcaccgtgaacgacaagctggagctgcaggagtgcctggagcacggccggatcgccaagttcagcaaggtgagaaccatcaccacccgaagcaacagcatcaaacaaggcaaggaccagcactttcctgtgttcatgaacgagaaggaggacatcctgtggtgtaccgagatggagagagtgttcgggttcccagtccactacacagatgtcagcaacatgtctagactggccagacagagactgctgggaagaagctggtccgtccctgtgatcagacacctgttcgcccctctgaaggagtacttcgcctgcgtgagcagcggcaacagcaacgccaacagccggggccccagcttctctagcggcctggtgccactgtccctgagagggagccacatgggccccatggagatctacaaaaccgtgagcgcctggaagcggcagcctgtgcgcgtgctgagcctgtttcggaatatcgataaagtcctgaaaagcctgggattcctggagagcggctctggctccggcggtggcaccctgaagtacgtggaggatgtgacaaacgtggtcagacgggatgtggagaagtggggccccttcgatctggtgtacggcagcacccaacccctgggcagctcttgtgaccggtgccctggctggtacatgtttcagttccaccggatcctgcagtacgccctgccgagacaggagtcccagcggccattcttttggattttcatggacaacttgctgctgaccgaggatgaccaggaaactaccactcggttcctgcagaccgaagccgtgaccctgcaggacgtgagaggccgggactaccagaacgccatgcgggtgtggtccaacatccctggactgaaaagcaagcacgcacctctgacccctaaagaagaggagtacctgcaggcccaggtgcggagcagaagcaagctggacgcccctaaggtggatctgctggtgaagaattgcctcctgcccctgagagagtacttcaagtatttcagccagaatagtctgcccctgggcggcccaagcagcggcgcccctcctcccagcggcggcagcccagccggctccccaacctctaccgaggagggcacctctgagtccgccacccccgagagcggccctggcacctccaccgagcccagcgagggcagcgcacccggcagccctgccggcagccccacctccacagaggagggaaccagcaccgagcccagcgaaggcagcgccccaggcaccagcaccgagcctagtgagggcggctctggcggcggcagcgcccaggagattaaacggatcaacaagatcagaagaagacttgtgaaagacagcaacaccaagaaggccggcaagacaggccccatgaaaaccctgctggttagagtgatgacacccgatctgagagagcggctggaaaacctgagaaagaagcctgaaaatatcccccagcccatcagcaatacatctagagccaacctgaataagctgctgaccgattacaccgaaatgaagaaggcgatcctgcatgtgtactgggaagagttccagaaggaccctgtgggcctgatgagccgggtggcccagcctgccagcaagaagatcgatcagaacaagctgaaacctgagatggacgagaagggcaacctgaccaccgccggctttgcctgctctcagtgtggccagcccctgttcgtgtacaagctggagcaggtgtctgagaagggcaaggcttacaccaactacttcggacggtgcaatgtggccgagcacgaaaagctgatcctgctggcccagctgaagcccgagaaggatagcgacgaagccgtgacatatagcctgggaaagtttgggcagagggccctggatttctacagcattcatgtgaccaaggagtccacccaccccgtgaagcccctggcccagatcgccggaaacagatacgcctccggacctgtgggaaaggccctgagcgacgcatgtatgggcacaatcgcctccttcctgtctaagtaccaggacatcatcatcgaacaccagaaggtggtgaagggcaaccagaagagactggagagcctgcgggagctggccggcaaggaaaacctggaataccctagcgtgaccctgccacctcagcctcacaccaaggagggcgttgatgcctacaacgaagtgatcgcccgggtgcgaatgtgggtgaacctgaacctgtggcagaagctgaagctaagcagagatgatgccaagcctctgctgagactgaagggattcccttcctttcctctggtcgagagacaggccaacgaagtggactggtgggacatggtgtgtaacgtgaagaagctgatcaacgagaaaaaggaggatggcaaggtgttttggcagaatctggctggctacaagagacaggaagccctgagaccatacctgagcagcgaggaagatcggaagaagggaaagaaattcgctcggtaccagctgggcgacctgctgctgcacctggaaaagaagcacggcgaggactggggaaaggtgtacgacgaggcctgggagcggattgacaagaaagtggaaggcctgagcaagcacatcaagctggaagaggaacggagaagcgaggacgcccagagcaaggccgccctgaccgactggctgcgggctaaggccagcttcgtgatcgagggcctgaaggaggccgacaaggacgagttctgcagatgcgagctgaagctgcagaagtggtacggggacctgcggggaaagcccttcgccatcgaagccgagaacagcatcctggacatcagcggcttcagcaagcagtacaactgtgccttcatctggcagaaggacggcgtgaagaagctgaacctgtacctgatcatcaactacttcaagggcggcaagctgcggttcaagaagatcaaacctgaagccttcgaagccaacagattctacaccgtgatcaacaaaaagagcggcgagatcgtgcccatggaggtgaacttcaacttcgacgaccccaacctgatcatcctgcctctggcctttggcaagagacagggcagagaattcatctggaacgacctgctgtccctggaaaccggcagcctgaagctggccaacggaagagtgatcgagaagacactgtacaacagaagaacccggcaggatgagcctgccctgttcgtggccctgaccttcgagcggcgggaggtcctggactcctccaatatcaaaccaatgaacctgatcggcgtggcaagaggcgaaaacatccccgccgtgatcgccctgaccgaccccgagggctgcccactgagccggtttaaggatagcctgggaaacccaacccacatcctgagaatcggcgagagctataaggagaagcagcggaccatccaggccaagaaggaggtggagcagcggagagccggcggctacagccggaagtacgccagcaaagccaagaatctggcagacgatatggtgagaaacaccgctagagatctgctgtactacgccgtgacccaggatgccatgctgatcttcgccaacctgagccggggcttcggccggcagggcaagcggaccttcatggccgagagacagtacacacggatggaggactggctgaccgccaagctggcctacgagggcctgagcaagacctacctgtccaagacactggcccagtacacctccaagacatgcagcaactgtgggtttaccatcaccagcgccgactacgacagggtgctggagaagctgaagaagacagcaacaggctggatgaccacaattaacggcaaggagctgaaggtggagggccagattacctactacaacagatacaagagacagaacgtagtcaaggacctgtccgtcgagctggatagactgagcgaagaatctgtgaacaacgacatctcctcctggacaaagggcagaagcggagaagctctgagcctcctgaagaaaagattctcccatagacccgtgcaggagaagttcgtgtgcctgaactgcggcttcgagacacacgcagccgagcaagccgccctgaacatcgccagatcctggctgttcctgcggagccaggagtacaagaaataccagacaaacaagacaaccggcaacaccgataagagagccttcgtcgagacctggcagtccttttaccggaagaagcttaaggaggtgtggaaacctgccgtgcggtctggcggatctggcggaggctccacaagcctgcaggagctgctgagcttcgaggacctgagcgtggacttcacccagaaggagtggcagctgctgaacccctaccagaagaacctgtacaaggacgtgatgctggagaactacagcagcctggtgagcctgggctacgaggtgatcaagcccgacgtgatcttcaagctggagcagggcgaggagccctggatcagggacgccgagatgcccagcagccccagcctggaggtgtggcaggtgaccagccccaagaaaaagagaaaagtctaagctgccttctgcggggcttgccttctggccatgcccttcttctctcccttgcacctgtacctcttggtctttgaataaagcctgagtaggaaggctagcaaaaaaaaaaaaaaaaaaaaaaaaaaaaaaaaaaaaaaaaaaaaaaaaaaaaaaaaaaaaaaaaaaaaaaaaaaaaaaaa

SEQ ID NO: 3133 - RNA, 5419 nt, synthetic construct
  source 1..5419: mol_type = other RNA
aggaaataagagagaaaagaagagtaagaagaaatataagagccaccatggcccctaagaagaagcgtaaagtgagccgggtgaacggcagcggcagcggcggcggcatgaaccacgaccaggagttcgacccccctaaggtgtaccctcccgtccccgccgagaagagaaagcccatccgggtcctgagcctgttcgatggcatcgccaccggtctgctggtgctgaaggacctgggcatccaggtggataggtacattgcctccgaggtgtgcgaggactccatcaccgtgggaatggtgcgtcatcagggcaagatcatgtacgtgggcgacgtgcggagcgtgacacagaagcatatccaggagtggggccctttcgacctggtgatcggcggcagcccttgcaatgacctgagcatcgtgaacccagcccggaagggcctgtacgagggaaccggcagactgttcttcgagttttacagactgctgcacgacgcccggcctaaggaaggcgacgaccggcccttcttttggctgttcgagaatgtggtggccatgggagtcagcgacaagcgggatattagccggttcctggagagcaaccccgtgatgatcgatgccaaggaagtgagcgccgcccaccgggccagatacttctggggcaatctgcctggcatgaacagacccctggccagcaccgtgaacgacaagctggagctgcaggagtgcctggagcacggccggatcgccaagttcagcaaggtgagaaccatcaccacccgaagcaacagcatcaaacaaggcaaggaccagcactttcctgtgttcatgaacgagaaggaggacatcctgtggtgtaccgagatggagagagtgttcgggttcccagtccactacacagatgtcagcaacatgtctagactggccagacagagactgctgggaagaagctggtccgtccctgtgatcagacacctgttcgcccctctgaaggagtacttcgcctgcgtgagcagcggcaacagcaacgccaacagccggggccccagcttctctagcggcctggtgccactgtccctgagagggagccacatgggccccatggagatctacaaaaccgtgagcgcctggaagcggcagcctgtgcgcgtgctgagcctgtttcggaatatcgataaagtcctgaaaagcctgggattcctggagagcggctctggctccggcggtggcaccctgaagtacgtggaggatgtgacaaacgtggtcagacgggatgtggagaagtggggccccttcgatctggtgtacggcagcacccaacccctgggcagctcttgtgaccggtgccctggctggtacatgtttcagttccaccggatcctgcagtacgccctgccgagacaggagtcccagcggccattcttttggattttcatggacaacttgctgctgaccgaggatgaccaggaaactaccactcggttcctgcagaccgaagccgtgaccctgcaggacgtgagaggccgggactaccagaacgccatgcgggtgtggtccaacatccctggactgaaaagcaagcacgcacctctgacccctaaagaagaggagtacctgcaggcccaggtgcggagcagaagcaagctggacgcccctaaggtggatctgctggtgaagaattgcctcctgcccctgagagagtacttcaagtatttcagccagaatagtctgcccctgggcggcccaagcagcggcgcccctcctcccagcggcggcagcccagccggctccccaacctctaccgaggagggcacctctgagtccgccacccccgagagcggccctggcacctccaccgagcccagcgagggcagcgcacccggcagccctgccggcagccccacctccacagaggagggaaccagcaccgagcccagcgaaggcagcgccccaggcaccagcaccgagcctagtgagggcggctctggcggcggcagcgcccaggagattaaacggatcaacaagatcagaagaagacttgtgaaagacagcaacaccaagaaggccggcaagacaggccccatgaaaaccctgctggttagagtgatgacacccgatctgagagagcggctggaaaacctgagaaagaagcctgaaaatatcccccagcccatcagcaatacatctagagccaacctgaataagctgctgaccgattacaccgaaatgaagaaggcgatcctgcatgtgtactgggaagagttccagaaggaccctgtgggcctgatgagccgggtggcccagcctgccagcaagaagatcgatcagaacaagctgaaacctgagatggacgagaagggcaacctgaccaccgccggctttgcctgctctcagtgtggccagcccctgttcgtgtacaagctggagcaggtgtctgagaagggcaaggcttacaccaactacttcggacggtgcaatgtggccgagcacgaaaagctgatcctgctggcccagctgaagcccgagaaggatagcgacgaagccgtgacatatagcctgggaaagtttgggcagagggccctggatttctacagcattcatgtgaccaaggagtccacccaccccgtgaagcccctggcccagatcgccggaaacagatacgcctccggacctgtgggaaaggccctgagcgacgcatgtatgggcacaatcgcctccttcctgtctaagtaccaggacatcatcatcgaacaccagaaggtggtgaagggcaaccagaagagactggagagcctgcgggagctggccggcaaggaaaacctggaataccctagcgtgaccctgccacctcagcctcacaccaaggagggcgttgatgcctacaacgaagtgatcgcccgggtgcgaatgtgggtgaacctgaacctgtggcagaagctgaagctaagcagagatgatgccaagcctctgctgagactgaagggattcccttcctttcctctggtcgagagacaggccaacgaagtggactggtgggacatggtgtgtaacgtgaagaagctgatcaacgagaaaaaggaggatggcaaggtgttttggcagaatctggctggctacaagagacaggaagccctgagaccatacctgagcagcgaggaagatcggaagaagggaaagaaattcgctcggtaccagctgggcgacctgctgctgcacctggaaaagaagcacggcgaggactggggaaaggtgtacgacgaggcctgggagcggattgacaagaaagtggaaggcctgagcaagcacatcaagctggaagaggaacggagaagcgaggacgcccagagcaaggccgccctgaccgactggctgcgggctaaggccagcttcgtgatcgagggcctgaaggaggccgacaaggacgagttctgcagatgcgagctgaagctgcagaagtggtacggggacctgcggggaaagcccttcgccatcgaagccgagaacagcatcctggacatcagcggcttcagcaagcagtacaactgtgccttcatctggcagaaggacggcgtgaagaagctgaacctgtacctgatcatcaactacttcaagggcggcaagctgcggttcaagaagatcaaacctgaagccttcgaagccaacagattctacaccgtgatcaacaaaaagagcggcgagatcgtgcccatggaggtgaacttcaacttcgacgaccccaacctgatcatcctgcctctggcctttggcaagagacagggcagagaattcatctggaacgacctgctgtccctggaaaccggcagcctgaagctggccaacggaagagtgatcgagaagacactgtacaacagaagaacccggcaggatgagcctgccctgttcgtggccctgaccttcgagcggcgggaggtcctggactcctccaatatcaaaccaatgaacctgatcggcgtggcaagaggcgaaaacatccccgccgtgatcgccctgaccgaccccgagggctgcccactgagccggtttaaggatagcctgggaaacccaacccacatcctgagaatcggcgagagctataaggagaagcagcggaccatccaggccaagaaggaggtggagcagcggagagccggcggctacagccggaagtacgccagcaaagccaagaatctggcagacgatatggtgagaaacaccgctagagatctgctgtactacgccgtgacccaggatgccatgctgatcttcgccaacctgagccggggcttcggccggcagggcaagcggaccttcatggccgagagacagtacacacggatggaggactggctgaccgccaagctggcctacgagggcctgagcaagacctacctgtccaagacactggcccagtacacctccaagacatgcagcaactgtgggtttaccatcaccagcgccgactacgacagggtgctggagaagctgaagaagacagcaacaggctggatgaccacaattaacggcaaggagctgaaggtggagggccagattacctactacaacagatacaagagacagaacgtagtcaaggacctgtccgtcgagctggatagactgagcgaagaatctgtgaacaacgacatctcctcctggacaaagggcagaagcggagaagctctgagcctcctgaagaaaagattctcccatagacccgtgcaggagaagttcgtgtgcctgaactgcggcttcgagacacacgcagccgagcaagccgccctgaacatcgccagatcctggctgttcctgcggagccaggagtacaagaaataccagacaaacaagacaaccggcaacaccgataagagagccttcgtcgagacctggcagtccttttaccggaagaagcttaaggaggtgtggaaacctgccgtgcggtctggcggatctggcggaggctccacaagccaggccgccgtgaccttcgaggacgtggccgtgctgctgagcagggaggagtggtgcaggctggcccccgcccagagggacctgtacagggacgtgatgctggagacctacaggaacctgatcagcctgggcaccggcctgaccggccccaagcccggcgtgatcagccagctggagaggggccacgagccctgggtgctggacgtgcagagcaccaagggcagggtggacggcagcgactgcaccagccccaagaaaaagagaaaagtctaagctgccttctgcggggcttgccttctggccatgcccttcttctctcccttgcacctgtacctcttggtctttgaataaagcctgagtaggaaggctagcaaaaaaaaaaaaaaaaaaaaaaaaaaaaaaaaaaaaaaaaaaaaaaaaaaaaaaaaaaaaaaaaaaaaaaaaaaaaaaaa

SEQ ID NO: 3134 - RNA, 5419 nt, synthetic construct
  source 1..5419: mol_type = other RNA
aggaaataagagagaaaagaagagtaagaagaaatataagagccaccatggcccctaagaagaagcgtaaagtgagccgggtgaacggcagcggcagcggcggcggcatgaaccacgaccaggagttcgacccccctaaggtgtaccctcccgtccccgccgagaagagaaagcccatccgggtcctgagcctgttcgatggcatcgccaccggtctgctggtgctgaaggacctgggcatccaggtggataggtacattgcctccgaggtgtgcgaggactccatcaccgtgggaatggtgcgtcatcagggcaagatcatgtacgtgggcgacgtgcggagcgtgacacagaagcatatccaggagtggggccctttcgacctggtgatcggcggcagcccttgcaatgacctgagcatcgtgaacccagcccggaagggcctgtacgagggaaccggcagactgttcttcgagttttacagactgctgcacgacgcccggcctaaggaaggcgacgaccggcccttcttttggctgttcgagaatgtggtggccatgggagtcagcgacaagcgggatattagccggttcctggagagcaaccccgtgatgatcgatgccaaggaagtgagcgccgcccaccgggccagatacttctggggcaatctgcctggcatgaacagacccctggccagcaccgtgaacgacaagctggagctgcaggagtgcctggagcacggccggatcgccaagttcagcaaggtgagaaccatcaccacccgaagcaacagcatcaaacaaggcaaggaccagcactttcctgtgttcatgaacgagaaggaggacatcctgtggtgtaccgagatggagagagtgttcgggttcccagtccactacacagatgtcagcaacatgtctagactggccagacagagactgctgggaagaagctggtccgtccctgtgatcagacacctgttcgcccctctgaaggagtacttcgcctgcgtgagcagcggcaacagcaacgccaacagccggggccccagcttctctagcggcctggtgccactgtccctgagagggagccacatgggccccatggagatctacaaaaccgtgagcgcctggaagcggcagcctgtgcgcgtgctgagcctgtttcggaatatcgataaagtcctgaaaagcctgggattcctggagagcggctctggctccggcggtggcaccctgaagtacgtggaggatgtgacaaacgtggtcagacgggatgtggagaagtggggccccttcgatctggtgtacggcagcacccaacccctgggcagctcttgtgaccggtgccctggctggtacatgtttcagttccaccggatcctgcagtacgccctgccgagacaggagtcccagcggccattcttttggattttcatggacaacttgctgctgaccgaggatgaccaggaaactaccactcggttcctgcagaccgaagccgtgaccctgcaggacgtgagaggccgggactaccagaacgccatgcgggtgtggtccaacatccctggactgaaaagcaagcacgcacctctgacccctaaagaagaggagtacctgcaggcccaggtgcggagcagaagcaagctggacgcccctaaggtggatctgctggtgaagaattgcctcctgcccctgagagagtacttcaagtatttcagccagaatagtctgcccctgggcggcccaagcagcggcgcccctcctcccagcggcggcagcccagccggctccccaacctctaccgaggagggcacctctgagtccgccacccccgagagcggccctggcacctccaccgagcccagcgagggcagcgcacccggcagccctgccggcagccccacctccacagaggagggaaccagcaccgagcccagcgaaggcagcgccccaggcaccagcaccgagcctagtgagggcggctctggcggcggcagcgcccaggagattaaacggatcaacaagatcagaagaagacttgtgaaagacagcaacaccaagaaggccggcaagacaggccccatgaaaaccctgctggttagagtgatgacacccgatctgagagagcggctggaaaacctgagaaagaagcctgaaaatatcccccagcccatcagcaatacatctagagccaacctgaataagctgctgaccgattacaccgaaatgaagaaggcgatcctgcatgtgtactgggaagagttccagaaggaccctgtgggcctgatgagccgggtggcccagcctgccagcaagaagatcgatcagaacaagctgaaacctgagatggacgagaagggcaacctgaccaccgccggctttgcctgctctcagtgtggccagcccctgttcgtgtacaagctggagcaggtgtctgagaagggcaaggcttacaccaactacttcggacggtgcaatgtggccgagcacgaaaagctgatcctgctggcccagctgaagcccgagaaggatagcgacgaagccgtgacatatagcctgggaaagtttgggcagagggccctggatttctacagcattcatgtgaccaaggagtccacccaccccgtgaagcccctggcccagatcgccggaaacagatacgcctccggacctgtgggaaaggccctgagcgacgcatgtatgggcacaatcgcctccttcctgtctaagtaccaggacatcatcatcgaacaccagaaggtggtgaagggcaaccagaagagactggagagcctgcgggagctggccggcaaggaaaacctggaataccctagcgtgaccctgccacctcagcctcacaccaaggagggcgttgatgcctacaacgaagtgatcgcccgggtgcgaatgtgggtgaacctgaacctgtggcagaagctgaagctaagcagagatgatgccaagcctctgctgagactgaagggattcccttcctttcctctggtcgagagacaggccaacgaagtggactggtgggacatggtgtgtaacgtgaagaagctgatcaacgagaaaaaggaggatggcaaggtgttttggcagaatctggctggctacaagagacaggaagccctgagaccatacctgagcagcgaggaagatcggaagaagggaaagaaattcgctcggtaccagctgggcgacctgctgctgcacctggaaaagaagcacggcgaggactggggaaaggtgtacgacgaggcctgggagcggattgacaagaaagtggaaggcctgagcaagcacatcaagctggaagaggaacggagaagcgaggacgcccagagcaaggccgccctgaccgactggctgcgggctaaggccagcttcgtgatcgagggcctgaaggaggccgacaaggacgagttctgcagatgcgagctgaagctgcagaagtggtacggggacctgcggggaaagcccttcgccatcgaagccgagaacagcatcctggacatcagcggcttcagcaagcagtacaactgtgccttcatctggcagaaggacggcgtgaagaagctgaacctgtacctgatcatcaactacttcaagggcggcaagctgcggttcaagaagatcaaacctgaagccttcgaagccaacagattctacaccgtgatcaacaaaaagagcggcgagatcgtgcccatggaggtgaacttcaacttcgacgaccccaacctgatcatcctgcctctggcctttggcaagagacagggcagagaattcatctggaacgacctgctgtccctggaaaccggcagcctgaagctggccaacggaagagtgatcgagaagacactgtacaacagaagaacccggcaggatgagcctgccctgttcgtggccctgaccttcgagcggcgggaggtcctggactcctccaatatcaaaccaatgaacctgatcggcgtggcaagaggcgaaaacatccccgccgtgatcgccctgaccgaccccgagggctgcccactgagccggtttaaggatagcctgggaaacccaacccacatcctgagaatcggcgagagctataaggagaagcagcggaccatccaggccaagaaggaggtggagcagcggagagccggcggctacagccggaagtacgccagcaaagccaagaatctggcagacgatatggtgagaaacaccgctagagatctgctgtactacgccgtgacccaggatgccatgctgatcttcgccaacctgagccggggcttcggccggcagggcaagcggaccttcatggccgagagacagtacacacggatggaggactggctgaccgccaagctggcctacgagggcctgagcaagacctacctgtccaagacactggcccagtacacctccaagacatgcagcaactgtgggtttaccatcaccagcgccgactacgacagggtgctggagaagctgaagaagacagcaacaggctggatgaccacaattaacggcaaggagctgaaggtggagggccagattacctactacaacagatacaagagacagaacgtagtcaaggacctgtccgtcgagctggatagactgagcgaagaatctgtgaacaacgacatctcctcctggacaaagggcagaagcggagaagctctgagcctcctgaagaaaagattctcccatagacccgtgcaggagaagttcgtgtgcctgaactgcggcttcgagacacacgcagccgagcaagccgccctgaacatcgccagatcctggctgttcctgcggagccaggagtacaagaaataccagacaaacaagacaaccggcaacaccgataagagagccttcgtcgagacctggcagtccttttaccggaagaagcttaaggaggtgtggaaacctgccgtgcggtctggcggatctggcggaggctccacaagcagccaggaggccgtgaccttcgaggacgtggccgtgaacttcagcaacgaggagtggcagtgcctgacccacgcccagaggcacctgtacaaggacgtgatgctggagaactacggcaacgtggtgagcctgggcttccccttccccaagccccccctgatcagccacctggagcaggaggccgagctgtgcgtgcaggacggccaggacagggagttcctgagctgcagccaccccgtgagcaccagccccaagaaaaagagaaaagtctaagctgccttctgcggggcttgccttctggccatgcccttcttctctcccttgcacctgtacctcttggtctttgaataaagcctgagtaggaaggctagcaaaaaaaaaaaaaaaaaaaaaaaaaaaaaaaaaaaaaaaaaaaaaaaaaaaaaaaaaaaaaaaaaaaaaaaaaaaaaaaa

SEQ ID NO: 3135 - RNA, 5419 nt, synthetic construct
  source 1..5419: mol_type = other RNA
aggaaataagagagaaaagaagagtaagaagaaatataagagccaccatggcccctaagaagaagcgtaaagtgagccgggtgaacggcagcggcagcggcggcggcatgaaccacgaccaggagttcgacccccctaaggtgtaccctcccgtccccgccgagaagagaaagcccatccgggtcctgagcctgttcgatggcatcgccaccggtctgctggtgctgaaggacctgggcatccaggtggataggtacattgcctccgaggtgtgcgaggactccatcaccgtgggaatggtgcgtcatcagggcaagatcatgtacgtgggcgacgtgcggagcgtgacacagaagcatatccaggagtggggccctttcgacctggtgatcggcggcagcccttgcaatgacctgagcatcgtgaacccagcccggaagggcctgtacgagggaaccggcagactgttcttcgagttttacagactgctgcacgacgcccggcctaaggaaggcgacgaccggcccttcttttggctgttcgagaatgtggtggccatgggagtcagcgacaagcgggatattagccggttcctggagagcaaccccgtgatgatcgatgccaaggaagtgagcgccgcccaccgggccagatacttctggggcaatctgcctggcatgaacagacccctggccagcaccgtgaacgacaagctggagctgcaggagtgcctggagcacggccggatcgccaagttcagcaaggtgagaaccatcaccacccgaagcaacagcatcaaacaaggcaaggaccagcactttcctgtgttcatgaacgagaaggaggacatcctgtggtgtaccgagatggagagagtgttcgggttcccagtccactacacagatgtcagcaacatgtctagactggccagacagagactgctgggaagaagctggtccgtccctgtgatcagacacctgttcgcccctctgaaggagtacttcgcctgcgtgagcagcggcaacagcaacgccaacagccggggccccagcttctctagcggcctggtgccactgtccctgagagggagccacatgggccccatggagatctacaaaaccgtgagcgcctggaagcggcagcctgtgcgcgtgctgagcctgtttcggaatatcgataaagtcctgaaaagcctgggattcctggagagcggctctggctccggcggtggcaccctgaagtacgtggaggatgtgacaaacgtggtcagacgggatgtggagaagtggggccccttcgatctggtgtacggcagcacccaacccctgggcagctcttgtgaccggtgccctggctggtacatgtttcagttccaccggatcctgcagtacgccctgccgagacaggagtcccagcggccattcttttggattttcatggacaacttgctgctgaccgaggatgaccaggaaactaccactcggttcctgcagaccgaagccgtgaccctgcaggacgtgagaggccgggactaccagaacgccatgcgggtgtggtccaacatccctggactgaaaagcaagcacgcacctctgacccctaaagaagaggagtacctgcaggcccaggtgcggagcagaagcaagctggacgcccctaaggtggatctgctggtgaagaattgcctcctgcccctgagagagtacttcaagtatttcagccagaatagtctgcccctgggcggcccaagcagcggcgcccctcctcccagcggcggcagcccagccggctccccaacctctaccgaggagggcacctctgagtccgccacccccgagagcggccctggcacctccaccgagcccagcgagggcagcgcacccggcagccctgccggcagccccacctccacagaggagggaaccagcaccgagcccagcgaaggcagcgccccaggcaccagcaccgagcctagtgagggcggctctggcggcggcagcgcccaggagattaaacggatcaacaagatcagaagaagacttgtgaaagacagcaacaccaagaaggccggcaagacaggccccatgaaaaccctgctggttagagtgatgacacccgatctgagagagcggctggaaaacctgagaaagaagcctgaaaatatcccccagcccatcagcaatacatctagagccaacctgaataagctgctgaccgattacaccgaaatgaagaaggcgatcctgcatgtgtactgggaagagttccagaaggaccctgtgggcctgatgagccgggtggcccagcctgccagcaagaagatcgatcagaacaagctgaaacctgagatggacgagaagggcaacctgaccaccgccggctttgcctgctctcagtgtggccagcccctgttcgtgtacaagctggagcaggtgtctgagaagggcaaggcttacaccaactacttcggacggtgcaatgtggccgagcacgaaaagctgatcctgctggcccagctgaagcccgagaaggatagcgacgaagccgtgacatatagcctgggaaagtttgggcagagggccctggatttctacagcattcatgtgaccaaggagtccacccaccccgtgaagcccctggcccagatcgccggaaacagatacgcctccggacctgtgggaaaggccctgagcgacgcatgtatgggcacaatcgcctccttcctgtctaagtaccaggacatcatcatcgaacaccagaaggtggtgaagggcaaccagaagagactggagagcctgcgggagctggccggcaaggaaaacctggaataccctagcgtgaccctgccacctcagcctcacaccaaggagggcgttgatgcctacaacgaagtgatcgcccgggtgcgaatgtgggtgaacctgaacctgtggcagaagctgaagctaagcagagatgatgccaagcctctgctgagactgaagggattcccttcctttcctctggtcgagagacaggccaacgaagtggactggtgggacatggtgtgtaacgtgaagaagctgatcaacgagaaaaaggaggatggcaaggtgttttggcagaatctggctggctacaagagacaggaagccctgagaccatacctgagcagcgaggaagatcggaagaagggaaagaaattcgctcggtaccagctgggcgacctgctgctgcacctggaaaagaagcacggcgaggactggggaaaggtgtacgacgaggcctgggagcggattgacaagaaagtggaaggcctgagcaagcacatcaagctggaagaggaacggagaagcgaggacgcccagagcaaggccgccctgaccgactggctgcgggctaaggccagcttcgtgatcgagggcctgaaggaggccgacaaggacgagttctgcagatgcgagctgaagctgcagaagtggtacggggacctgcggggaaagcccttcgccatcgaagccgagaacagcatcctggacatcagcggcttcagcaagcagtacaactgtgccttcatctggcagaaggacggcgtgaagaagctgaacctgtacctgatcatcaactacttcaagggcggcaagctgcggttcaagaagatcaaacctgaagccttcgaagccaacagattctacaccgtgatcaacaaaaagagcggcgagatcgtgcccatggaggtgaacttcaacttcgacgaccccaacctgatcatcctgcctctggcctttggcaagagacagggcagagaattcatctggaacgacctgctgtccctggaaaccggcagcctgaagctggccaacggaagagtgatcgagaagacactgtacaacagaagaacccggcaggatgagcctgccctgttcgtggccctgaccttcgagcggcgggaggtcctggactcctccaatatcaaaccaatgaacctgatcggcgtggcaagaggcgaaaacatccccgccgtgatcgccctgaccgaccccgagggctgcccactgagccggtttaaggatagcctgggaaacccaacccacatcctgagaatcggcgagagctataaggagaagcagcggaccatccaggccaagaaggaggtggagcagcggagagccggcggctacagccggaagtacgccagcaaagccaagaatctggcagacgatatggtgagaaacaccgctagagatctgctgtactacgccgtgacccaggatgccatgctgatcttcgccaacctgagccggggcttcggccggcagggcaagcggaccttcatggccgagagacagtacacacggatggaggactggctgaccgccaagctggcctacgagggcctgagcaagacctacctgtccaagacactggcccagtacacctccaagacatgcagcaactgtgggtttaccatcaccagcgccgactacgacagggtgctggagaagctgaagaagacagcaacaggctggatgaccacaattaacggcaaggagctgaaggtggagggccagattacctactacaacagatacaagagacagaacgtagtcaaggacctgtccgtcgagctggatagactgagcgaagaatctgtgaacaacgacatctcctcctggacaaagggcagaagcggagaagctctgagcctcctgaagaaaagattctcccatagacccgtgcaggagaagttcgtgtgcctgaactgcggcttcgagacacacgcagccgagcaagccgccctgaacatcgccagatcctggctgttcctgcggagccaggagtacaagaaataccagacaaacaagacaaccggcaacaccgataagagagccttcgtcgagacctggcagtccttttaccggaagaagcttaaggaggtgtggaaacctgccgtgcggtctggcggatctggcggaggctccacaagcaagcccctggccgtgaggttcgccgacgtggccgtgtacttcagccccgaggagtggggctgcctgctgcccgcccagagggccctgtacagggacgtgatgagggagacctacggccacctgggcgccctgggcttccccggccccaagcccgccctgatcagctggatggagcaggagagcgaggcctggagccccgacgcccaggaccccgaggagggcgagagcctgggcggcgccctgaccagccccaagaaaaagagaaaagtctaagctgccttctgcggggcttgccttctggccatgcccttcttctctcccttgcacctgtacctcttggtctttgaataaagcctgagtaggaaggctagcaaaaaaaaaaaaaaaaaaaaaaaaaaaaaaaaaaaaaaaaaaaaaaaaaaaaaaaaaaaaaaaaaaaaaaaaaaaaaaaa

SEQ ID NO: 3136 - RNA, 5419 nt, synthetic construct
  source 1..5419: mol_type = other RNA
aggaaataagagagaaaagaagagtaagaagaaatataagagccaccatggcccctaagaagaagcgtaaagtgagccgggtgaacggcagcggcagcggcggcggcatgaaccacgaccaggagttcgacccccctaaggtgtaccctcccgtccccgccgagaagagaaagcccatccgggtcctgagcctgttcgatggcatcgccaccggtctgctggtgctgaaggacctgggcatccaggtggataggtacattgcctccgaggtgtgcgaggactccatcaccgtgggaatggtgcgtcatcagggcaagatcatgtacgtgggcgacgtgcggagcgtgacacagaagcatatccaggagtggggccctttcgacctggtgatcggcggcagcccttgcaatgacctgagcatcgtgaacccagcccggaagggcctgtacgagggaaccggcagactgttcttcgagttttacagactgctgcacgacgcccggcctaaggaaggcgacgaccggcccttcttttggctgttcgagaatgtggtggccatgggagtcagcgacaagcgggatattagccggttcctggagagcaaccccgtgatgatcgatgccaaggaagtgagcgccgcccaccgggccagatacttctggggcaatctgcctggcatgaacagacccctggccagcaccgtgaacgacaagctggagctgcaggagtgcctggagcacggccggatcgccaagttcagcaaggtgagaaccatcaccacccgaagcaacagcatcaaacaaggcaaggaccagcactttcctgtgttcatgaacgagaaggaggacatcctgtggtgtaccgagatggagagagtgttcgggttcccagtccactacacagatgtcagcaacatgtctagactggccagacagagactgctgggaagaagctggtccgtccctgtgatcagacacctgttcgcccctctgaaggagtacttcgcctgcgtgagcagcggcaacagcaacgccaacagccggggccccagcttctctagcggcctggtgccactgtccctgagagggagccacatgggccccatggagatctacaaaaccgtgagcgcctggaagcggcagcctgtgcgcgtgctgagcctgtttcggaatatcgataaagtcctgaaaagcctgggattcctggagagcggctctggctccggcggtggcaccctgaagtacgtggaggatgtgacaaacgtggtcagacgggatgtggagaagtggggccccttcgatctggtgtacggcagcacccaacccctgggcagctcttgtgaccggtgccctggctggtacatgtttcagttccaccggatcctgcagtacgccctgccgagacaggagtcccagcggccattcttttggattttcatggacaacttgctgctgaccgaggatgaccaggaaactaccactcggttcctgcagaccgaagccgtgaccctgcaggacgtgagaggccgggactaccagaacgccatgcgggtgtggtccaacatccctggactgaaaagcaagcacgcacctctgacccctaaagaagaggagtacctgcaggcccaggtgcggagcagaagcaagctggacgcccctaaggtggatctgctggtgaagaattgcctcctgcccctgagagagtacttcaagtatttcagccagaatagtctgcccctgggcggcccaagcagcggcgcccctcctcccagcggcggcagcccagccggctccccaacctctaccgaggagggcacctctgagtccgccacccccgagagcggccctggcacctccaccgagcccagcgagggcagcgcacccggcagccctgccggcagccccacctccacagaggagggaaccagcaccgagcccagcgaaggcagcgccccaggcaccagcaccgagcctagtgagggcggctctggcggcggcagcgcccaggagattaaacggatcaacaagatcagaagaagacttgtgaaagacagcaacaccaagaaggccggcaagacaggccccatgaaaaccctgctggttagagtgatgacacccgatctgagagagcggctggaaaacctgagaaagaagcctgaaaatatcccccagcccatcagcaatacatctagagccaacctgaataagctgctgaccgattacaccgaaatgaagaaggcgatcctgcatgtgtactgggaagagttccagaaggaccctgtgggcctgatgagccgggtggcccagcctgccagcaagaagatcgatcagaacaagctgaaacctgagatggacgagaagggcaacctgaccaccgccggctttgcctgctctcagtgtggccagcccctgttcgtgtacaagctggagcaggtgtctgagaagggcaaggcttacaccaactacttcggacggtgcaatgtggccgagcacgaaaagctgatcctgctggcccagctgaagcccgagaaggatagcgacgaagccgtgacatatagcctgggaaagtttgggcagagggccctggatttctacagcattcatgtgaccaaggagtccacccaccccgtgaagcccctggcccagatcgccggaaacagatacgcctccggacctgtgggaaaggccctgagcgacgcatgtatgggcacaatcgcctccttcctgtctaagtaccaggacatcatcatcgaacaccagaaggtggtgaagggcaaccagaagagactggagagcctgcgggagctggccggcaaggaaaacctggaataccctagcgtgaccctgccacctcagcctcacaccaaggagggcgttgatgcctacaacgaagtgatcgcccgggtgcgaatgtgggtgaacctgaacctgtggcagaagctgaagctaagcagagatgatgccaagcctctgctgagactgaagggattcccttcctttcctctggtcgagagacaggccaacgaagtggactggtgggacatggtgtgtaacgtgaagaagctgatcaacgagaaaaaggaggatggcaaggtgttttggcagaatctggctggctacaagagacaggaagccctgagaccatacctgagcagcgaggaagatcggaagaagggaaagaaattcgctcggtaccagctgggcgacctgctgctgcacctggaaaagaagcacggcgaggactggggaaaggtgtacgacgaggcctgggagcggattgacaagaaagtggaaggcctgagcaagcacatcaagctggaagaggaacggagaagcgaggacgcccagagcaaggccgccctgaccgactggctgcgggctaaggccagcttcgtgatcgagggcctgaaggaggccgacaaggacgagttctgcagatgcgagctgaagctgcagaagtggtacggggacctgcggggaaagcccttcgccatcgaagccgagaacagcatcctggacatcagcggcttcagcaagcagtacaactgtgccttcatctggcagaaggacggcgtgaagaagctgaacctgtacctgatcatcaactacttcaagggcggcaagctgcggttcaagaagatcaaacctgaagccttcgaagccaacagattctacaccgtgatcaacaaaaagagcggcgagatcgtgcccatggaggtgaacttcaacttcgacgaccccaacctgatcatcctgcctctggcctttggcaagagacagggcagagaattcatctggaacgacctgctgtccctggaaaccggcagcctgaagctggccaacggaagagtgatcgagaagacactgtacaacagaagaacccggcaggatgagcctgccctgttcgtggccctgaccttcgagcggcgggaggtcctggactcctccaatatcaaaccaatgaacctgatcggcgtggcaagaggcgaaaacatccccgccgtgatcgccctgaccgaccccgagggctgcccactgagccggtttaaggatagcctgggaaacccaacccacatcctgagaatcggcgagagctataaggagaagcagcggaccatccaggccaagaaggaggtggagcagcggagagccggcggctacagccggaagtacgccagcaaagccaagaatctggcagacgatatggtgagaaacaccgctagagatctgctgtactacgccgtgacccaggatgccatgctgatcttcgccaacctgagccggggcttcggccggcagggcaagcggaccttcatggccgagagacagtacacacggatggaggactggctgaccgccaagctggcctacgagggcctgagcaagacctacctgtccaagacactggcccagtacacctccaagacatgcagcaactgtgggtttaccatcaccagcgccgactacgacagggtgctggagaagctgaagaagacagcaacaggctggatgaccacaattaacggcaaggagctgaaggtggagggccagattacctactacaacagatacaagagacagaacgtagtcaaggacctgtccgtcgagctggatagactgagcgaagaatctgtgaacaacgacatctcctcctggacaaagggcagaagcggagaagctctgagcctcctgaagaaaagattctcccatagacccgtgcaggagaagttcgtgtgcctgaactgcggcttcgagacacacgcagccgagcaagccgccctgaacatcgccagatcctggctgttcctgcggagccaggagtacaagaaataccagacaaacaagacaaccggcaacaccgataagagagccttcgtcgagacctggcagtccttttaccggaagaagcttaaggaggtgtggaaacctgccgtgcggtctggcggatctggcggaggctccacaagcctgaagggcctggtgaccttcgaggacgtggccgtggagttcacccaggaggagtgggccctgctggaccccgcccagaggaccctgtacagggacgtgatgctggagaacttcaggaacctggccagcctgggcgaccaggtggacaagcccggcctgatcgcccagctggagcaggaggacaaggtgatgaccgaggagaggggcatcctgcccggcacctgccccgacgtggagaaccccaccagccccaagaaaaagagaaaagtctaagctgccttctgcggggcttgccttctggccatgcccttcttctctcccttgcacctgtacctcttggtctttgaataaagcctgagtaggaaggctagcaaaaaaaaaaaaaaaaaaaaaaaaaaaaaaaaaaaaaaaaaaaaaaaaaaaaaaaaaaaaaaaaaaaaaaaaaaaaaaaa

SEQ ID NO: 3137 - RNA, 5419 nt, synthetic construct
  source 1..5419: mol_type = other RNA
aggaaataagagagaaaagaagagtaagaagaaatataagagccaccatggcccctaagaagaagcgtaaagtgagccgggtgaacggcagcggcagcggcggcggcatgaaccacgaccaggagttcgacccccctaaggtgtaccctcccgtccccgccgagaagagaaagcccatccgggtcctgagcctgttcgatggcatcgccaccggtctgctggtgctgaaggacctgggcatccaggtggataggtacattgcctccgaggtgtgcgaggactccatcaccgtgggaatggtgcgtcatcagggcaagatcatgtacgtgggcgacgtgcggagcgtgacacagaagcatatccaggagtggggccctttcgacctggtgatcggcggcagcccttgcaatgacctgagcatcgtgaacccagcccggaagggcctgtacgagggaaccggcagactgttcttcgagttttacagactgctgcacgacgcccggcctaaggaaggcgacgaccggcccttcttttggctgttcgagaatgtggtggccatgggagtcagcgacaagcgggatattagccggttcctggagagcaaccccgtgatgatcgatgccaaggaagtgagcgccgcccaccgggccagatacttctggggcaatctgcctggcatgaacagacccctggccagcaccgtgaacgacaagctggagctgcaggagtgcctggagcacggccggatcgccaagttcagcaaggtgagaaccatcaccacccgaagcaacagcatcaaacaaggcaaggaccagcactttcctgtgttcatgaacgagaaggaggacatcctgtggtgtaccgagatggagagagtgttcgggttcccagtccactacacagatgtcagcaacatgtctagactggccagacagagactgctgggaagaagctggtccgtccctgtgatcagacacctgttcgcccctctgaaggagtacttcgcctgcgtgagcagcggcaacagcaacgccaacagccggggccccagcttctctagcggcctggtgccactgtccctgagagggagccacatgggccccatggagatctacaaaaccgtgagcgcctggaagcggcagcctgtgcgcgtgctgagcctgtttcggaatatcgataaagtcctgaaaagcctgggattcctggagagcggctctggctccggcggtggcaccctgaagtacgtggaggatgtgacaaacgtggtcagacgggatgtggagaagtggggccccttcgatctggtgtacggcagcacccaacccctgggcagctcttgtgaccggtgccctggctggtacatgtttcagttccaccggatcctgcagtacgccctgccgagacaggagtcccagcggccattcttttggattttcatggacaacttgctgctgaccgaggatgaccaggaaactaccactcggttcctgcagaccgaagccgtgaccctgcaggacgtgagaggccgggactaccagaacgccatgcgggtgtggtccaacatccctggactgaaaagcaagcacgcacctctgacccctaaagaagaggagtacctgcaggcccaggtgcggagcagaagcaagctggacgcccctaaggtggatctgctggtgaagaattgcctcctgcccctgagagagtacttcaagtatttcagccagaatagtctgcccctgggcggcccaagcagcggcgcccctcctcccagcggcggcagcccagccggctccccaacctctaccgaggagggcacctctgagtccgccacccccgagagcggccctggcacctccaccgagcccagcgagggcagcgcacccggcagccctgccggcagccccacctccacagaggagggaaccagcaccgagcccagcgaaggcagcgccccaggcaccagcaccgagcctagtgagggcggctctggcggcggcagcgcccaggagattaaacggatcaacaagatcagaagaagacttgtgaaagacagcaacaccaagaaggccggcaagacaggccccatgaaaaccctgctggttagagtgatgacacccgatctgagagagcggctggaaaacctgagaaagaagcctgaaaatatcccccagcccatcagcaatacatctagagccaacctgaataagctgctgaccgattacaccgaaatgaagaaggcgatcctgcatgtgtactgggaagagttccagaaggaccctgtgggcctgatgagccgggtggcccagcctgccagcaagaagatcgatcagaacaagctgaaacctgagatggacgagaagggcaacctgaccaccgccggctttgcctgctctcagtgtggccagcccctgttcgtgtacaagctggagcaggtgtctgagaagggcaaggcttacaccaactacttcggacggtgcaatgtggccgagcacgaaaagctgatcctgctggcccagctgaagcccgagaaggatagcgacgaagccgtgacatatagcctgggaaagtttgggcagagggccctggatttctacagcattcatgtgaccaaggagtccacccaccccgtgaagcccctggcccagatcgccggaaacagatacgcctccggacctgtgggaaaggccctgagcgacgcatgtatgggcacaatcgcctccttcctgtctaagtaccaggacatcatcatcgaacaccagaaggtggtgaagggcaaccagaagagactggagagcctgcgggagctggccggcaaggaaaacctggaataccctagcgtgaccctgccacctcagcctcacaccaaggagggcgttgatgcctacaacgaagtgatcgcccgggtgcgaatgtgggtgaacctgaacctgtggcagaagctgaagctaagcagagatgatgccaagcctctgctgagactgaagggattcccttcctttcctctggtcgagagacaggccaacgaagtggactggtgggacatggtgtgtaacgtgaagaagctgatcaacgagaaaaaggaggatggcaaggtgttttggcagaatctggctggctacaagagacaggaagccctgagaccatacctgagcagcgaggaagatcggaagaagggaaagaaattcgctcggtaccagctgggcgacctgctgctgcacctggaaaagaagcacggcgaggactggggaaaggtgtacgacgaggcctgggagcggattgacaagaaagtggaaggcctgagcaagcacatcaagctggaagaggaacggagaagcgaggacgcccagagcaaggccgccctgaccgactggctgcgggctaaggccagcttcgtgatcgagggcctgaaggaggccgacaaggacgagttctgcagatgcgagctgaagctgcagaagtggtacggggacctgcggggaaagcccttcgccatcgaagccgagaacagcatcctggacatcagcggcttcagcaagcagtacaactgtgccttcatctggcagaaggacggcgtgaagaagctgaacctgtacctgatcatcaactacttcaagggcggcaagctgcggttcaagaagatcaaacctgaagccttcgaagccaacagattctacaccgtgatcaacaaaaagagcggcgagatcgtgcccatggaggtgaacttcaacttcgacgaccccaacctgatcatcctgcctctggcctttggcaagagacagggcagagaattcatctggaacgacctgctgtccctggaaaccggcagcctgaagctggccaacggaagagtgatcgagaagacactgtacaacagaagaacccggcaggatgagcctgccctgttcgtggccctgaccttcgagcggcgggaggtcctggactcctccaatatcaaaccaatgaacctgatcggcgtggcaagaggcgaaaacatccccgccgtgatcgccctgaccgaccccgagggctgcccactgagccggtttaaggatagcctgggaaacccaacccacatcctgagaatcggcgagagctataaggagaagcagcggaccatccaggccaagaaggaggtggagcagcggagagccggcggctacagccggaagtacgccagcaaagccaagaatctggcagacgatatggtgagaaacaccgctagagatctgctgtactacgccgtgacccaggatgccatgctgatcttcgccaacctgagccggggcttcggccggcagggcaagcggaccttcatggccgagagacagtacacacggatggaggactggctgaccgccaagctggcctacgagggcctgagcaagacctacctgtccaagacactggcccagtacacctccaagacatgcagcaactgtgggtttaccatcaccagcgccgactacgacagggtgctggagaagctgaagaagacagcaacaggctggatgaccacaattaacggcaaggagctgaaggtggagggccagattacctactacaacagatacaagagacagaacgtagtcaaggacctgtccgtcgagctggatagactgagcgaagaatctgtgaacaacgacatctcctcctggacaaagggcagaagcggagaagctctgagcctcctgaagaaaagattctcccatagacccgtgcaggagaagttcgtgtgcctgaactgcggcttcgagacacacgcagccgagcaagccgccctgaacatcgccagatcctggctgttcctgcggagccaggagtacaagaaataccagacaaacaagacaaccggcaacaccgataagagagccttcgtcgagacctggcagtccttttaccggaagaagcttaaggaggtgtggaaacctgccgtgcggtctggcggatctggcggaggctccacaagcatgatcaacgcccaggagctgctgaccctggaggacgtgaccgtggagttcacctgggaggagtggcagctgctggaccccttccagaaggacctgtacagggacgtgatgctggagatctacagcaacctggtgagcatcggctaccaggtgagcaagcccgacgccctgagcaagctggagaggggcgaggagccctggaccgtggaggacgagaggcacagccagatctgccccgagaacaccagccccaagaaaaagagaaaagtctaagctgccttctgcggggcttgccttctggccatgcccttcttctctcccttgcacctgtacctcttggtctttgaataaagcctgagtaggaaggctagcaaaaaaaaaaaaaaaaaaaaaaaaaaaaaaaaaaaaaaaaaaaaaaaaaaaaaaaaaaaaaaaaaaaaaaaaaaaaaaaa

SEQ ID NO: 3138 - RNA, 5419 nt, synthetic construct
  source 1..5419: mol_type = other RNA
aggaaataagagagaaaagaagagtaagaagaaatataagagccaccatggcccctaagaagaagcgtaaagtgagccgggtgaacggcagcggcagcggcggcggcatgaaccacgaccaggagttcgacccccctaaggtgtaccctcccgtccccgccgagaagagaaagcccatccgggtcctgagcctgttcgatggcatcgccaccggtctgctggtgctgaaggacctgggcatccaggtggataggtacattgcctccgaggtgtgcgaggactccatcaccgtgggaatggtgcgtcatcagggcaagatcatgtacgtgggcgacgtgcggagcgtgacacagaagcatatccaggagtggggccctttcgacctggtgatcggcggcagcccttgcaatgacctgagcatcgtgaacccagcccggaagggcctgtacgagggaaccggcagactgttcttcgagttttacagactgctgcacgacgcccggcctaaggaaggcgacgaccggcccttcttttggctgttcgagaatgtggtggccatgggagtcagcgacaagcgggatattagccggttcctggagagcaaccccgtgatgatcgatgccaaggaagtgagcgccgcccaccgggccagatacttctggggcaatctgcctggcatgaacagacccctggccagcaccgtgaacgacaagctggagctgcaggagtgcctggagcacggccggatcgccaagttcagcaaggtgagaaccatcaccacccgaagcaacagcatcaaacaaggcaaggaccagcactttcctgtgttcatgaacgagaaggaggacatcctgtggtgtaccgagatggagagagtgttcgggttcccagtccactacacagatgtcagcaacatgtctagactggccagacagagactgctgggaagaagctggtccgtccctgtgatcagacacctgttcgcccctctgaaggagtacttcgcctgcgtgagcagcggcaacagcaacgccaacagccggggccccagcttctctagcggcctggtgccactgtccctgagagggagccacatgggccccatggagatctacaaaaccgtgagcgcctggaagcggcagcctgtgcgcgtgctgagcctgtttcggaatatcgataaagtcctgaaaagcctgggattcctggagagcggctctggctccggcggtggcaccctgaagtacgtggaggatgtgacaaacgtggtcagacgggatgtggagaagtggggccccttcgatctggtgtacggcagcacccaacccctgggcagctcttgtgaccggtgccctggctggtacatgtttcagttccaccggatcctgcagtacgccctgccgagacaggagtcccagcggccattcttttggattttcatggacaacttgctgctgaccgaggatgaccaggaaactaccactcggttcctgcagaccgaagccgtgaccctgcaggacgtgagaggccgggactaccagaacgccatgcgggtgtggtccaacatccctggactgaaaagcaagcacgcacctctgacccctaaagaagaggagtacctgcaggcccaggtgcggagcagaagcaagctggacgcccctaaggtggatctgctggtgaagaattgcctcctgcccctgagagagtacttcaagtatttcagccagaatagtctgcccctgggcggcccaagcagcggcgcccctcctcccagcggcggcagcccagccggctccccaacctctaccgaggagggcacctctgagtccgccacccccgagagcggccctggcacctccaccgagcccagcgagggcagcgcacccggcagccctgccggcagccccacctccacagaggagggaaccagcaccgagcccagcgaaggcagcgccccaggcaccagcaccgagcctagtgagggcggctctggcggcggcagcgcccaggagattaaacggatcaacaagatcagaagaagacttgtgaaagacagcaacaccaagaaggccggcaagacaggccccatgaaaaccctgctggttagagtgatgacacccgatctgagagagcggctggaaaacctgagaaagaagcctgaaaatatcccccagcccatcagcaatacatctagagccaacctgaataagctgctgaccgattacaccgaaatgaagaaggcgatcctgcatgtgtactgggaagagttccagaaggaccctgtgggcctgatgagccgggtggcccagcctgccagcaagaagatcgatcagaacaagctgaaacctgagatggacgagaagggcaacctgaccaccgccggctttgcctgctctcagtgtggccagcccctgttcgtgtacaagctggagcaggtgtctgagaagggcaaggcttacaccaactacttcggacggtgcaatgtggccgagcacgaaaagctgatcctgctggcccagctgaagcccgagaaggatagcgacgaagccgtgacatatagcctgggaaagtttgggcagagggccctggatttctacagcattcatgtgaccaaggagtccacccaccccgtgaagcccctggcccagatcgccggaaacagatacgcctccggacctgtgggaaaggccctgagcgacgcatgtatgggcacaatcgcctccttcctgtctaagtaccaggacatcatcatcgaacaccagaaggtggtgaagggcaaccagaagagactggagagcctgcgggagctggccggcaaggaaaacctggaataccctagcgtgaccctgccacctcagcctcacaccaaggagggcgttgatgcctacaacgaagtgatcgcccgggtgcgaatgtgggtgaacctgaacctgtggcagaagctgaagctaagcagagatgatgccaagcctctgctgagactgaagggattcccttcctttcctctggtcgagagacaggccaacgaagtggactggtgggacatggtgtgtaacgtgaagaagctgatcaacgagaaaaaggaggatggcaaggtgttttggcagaatctggctggctacaagagacaggaagccctgagaccatacctgagcagcgaggaagatcggaagaagggaaagaaattcgctcggtaccagctgggcgacctgctgctgcacctggaaaagaagcacggcgaggactggggaaaggtgtacgacgaggcctgggagcggattgacaagaaagtggaaggcctgagcaagcacatcaagctggaagaggaacggagaagcgaggacgcccagagcaaggccgccctgaccgactggctgcgggctaaggccagcttcgtgatcgagggcctgaaggaggccgacaaggacgagttctgcagatgcgagctgaagctgcagaagtggtacggggacctgcggggaaagcccttcgccatcgaagccgagaacagcatcctggacatcagcggcttcagcaagcagtacaactgtgccttcatctggcagaaggacggcgtgaagaagctgaacctgtacctgatcatcaactacttcaagggcggcaagctgcggttcaagaagatcaaacctgaagccttcgaagccaacagattctacaccgtgatcaacaaaaagagcggcgagatcgtgcccatggaggtgaacttcaacttcgacgaccccaacctgatcatcctgcctctggcctttggcaagagacagggcagagaattcatctggaacgacctgctgtccctggaaaccggcagcctgaagctggccaacggaagagtgatcgagaagacactgtacaacagaagaacccggcaggatgagcctgccctgttcgtggccctgaccttcgagcggcgggaggtcctggactcctccaatatcaaaccaatgaacctgatcggcgtggcaagaggcgaaaacatccccgccgtgatcgccctgaccgaccccgagggctgcccactgagccggtttaaggatagcctgggaaacccaacccacatcctgagaatcggcgagagctataaggagaagcagcggaccatccaggccaagaaggaggtggagcagcggagagccggcggctacagccggaagtacgccagcaaagccaagaatctggcagacgatatggtgagaaacaccgctagagatctgctgtactacgccgtgacccaggatgccatgctgatcttcgccaacctgagccggggcttcggccggcagggcaagcggaccttcatggccgagagacagtacacacggatggaggactggctgaccgccaagctggcctacgagggcctgagcaagacctacctgtccaagacactggcccagtacacctccaagacatgcagcaactgtgggtttaccatcaccagcgccgactacgacagggtgctggagaagctgaagaagacagcaacaggctggatgaccacaattaacggcaaggagctgaaggtggagggccagattacctactacaacagatacaagagacagaacgtagtcaaggacctgtccgtcgagctggatagactgagcgaagaatctgtgaacaacgacatctcctcctggacaaagggcagaagcggagaagctctgagcctcctgaagaaaagattctcccatagacccgtgcaggagaagttcgtgtgcctgaactgcggcttcgagacacacgcagccgagcaagccgccctgaacatcgccagatcctggctgttcctgcggagccaggagtacaagaaataccagacaaacaagacaaccggcaacaccgataagagagccttcgtcgagacctggcagtccttttaccggaagaagcttaaggaggtgtggaaacctgccgtgcggtctggcggatctggcggaggctccacaagcatggacgtggcccaggagcaggtgaccttccaggacgtggccatctacttcagctgggaggagtgggagtgcctggagcccagccagagggccctgtacagggacgtgatgctggacaacttcagcaacgtggccgccctgggcttctgcagccccaggcccgacctggtgagcaggctggagcagtgggaggagccctgggtggaggacagggacaggcccgagctgcaggccgtgcagaggaccagccccaagaaaaagagaaaagtctaagctgccttctgcggggcttgccttctggccatgcccttcttctctcccttgcacctgtacctcttggtctttgaataaagcctgagtaggaaggctagcaaaaaaaaaaaaaaaaaaaaaaaaaaaaaaaaaaaaaaaaaaaaaaaaaaaaaaaaaaaaaaaaaaaaaaaaaaaaaaaa

SEQ ID NO: 3139 - RNA, 5419 nt, synthetic construct
  source 1..5419: mol_type = other RNA
aggaaataagagagaaaagaagagtaagaagaaatataagagccaccatggcccctaagaagaagcgtaaagtgagccgggtgaacggcagcggcagcggcggcggcatgaaccacgaccaggagttcgacccccctaaggtgtaccctcccgtccccgccgagaagagaaagcccatccgggtcctgagcctgttcgatggcatcgccaccggtctgctggtgctgaaggacctgggcatccaggtggataggtacattgcctccgaggtgtgcgaggactccatcaccgtgggaatggtgcgtcatcagggcaagatcatgtacgtgggcgacgtgcggagcgtgacacagaagcatatccaggagtggggccctttcgacctggtgatcggcggcagcccttgcaatgacctgagcatcgtgaacccagcccggaagggcctgtacgagggaaccggcagactgttcttcgagttttacagactgctgcacgacgcccggcctaaggaaggcgacgaccggcccttcttttggctgttcgagaatgtggtggccatgggagtcagcgacaagcgggatattagccggttcctggagagcaaccccgtgatgatcgatgccaaggaagtgagcgccgcccaccgggccagatacttctggggcaatctgcctggcatgaacagacccctggccagcaccgtgaacgacaagctggagctgcaggagtgcctggagcacggccggatcgccaagttcagcaaggtgagaaccatcaccacccgaagcaacagcatcaaacaaggcaaggaccagcactttcctgtgttcatgaacgagaaggaggacatcctgtggtgtaccgagatggagagagtgttcgggttcccagtccactacacagatgtcagcaacatgtctagactggccagacagagactgctgggaagaagctggtccgtccctgtgatcagacacctgttcgcccctctgaaggagtacttcgcctgcgtgagcagcggcaacagcaacgccaacagccggggccccagcttctctagcggcctggtgccactgtccctgagagggagccacatgggccccatggagatctacaaaaccgtgagcgcctggaagcggcagcctgtgcgcgtgctgagcctgtttcggaatatcgataaagtcctgaaaagcctgggattcctggagagcggctctggctccggcggtggcaccctgaagtacgtggaggatgtgacaaacgtggtcagacgggatgtggagaagtggggccccttcgatctggtgtacggcagcacccaacccctgggcagctcttgtgaccggtgccctggctggtacatgtttcagttccaccggatcctgcagtacgccctgccgagacaggagtcccagcggccattcttttggattttcatggacaacttgctgctgaccgaggatgaccaggaaactaccactcggttcctgcagaccgaagccgtgaccctgcaggacgtgagaggccgggactaccagaacgccatgcgggtgtggtccaacatccctggactgaaaagcaagcacgcacctctgacccctaaagaagaggagtacctgcaggcccaggtgcggagcagaagcaagctggacgcccctaaggtggatctgctggtgaagaattgcctcctgcccctgagagagtacttcaagtatttcagccagaatagtctgcccctgggcggcccaagcagcggcgcccctcctcccagcggcggcagcccagccggctccccaacctctaccgaggagggcacctctgagtccgccacccccgagagcggccctggcacctccaccgagcccagcgagggcagcgcacccggcagccctgccggcagccccacctccacagaggagggaaccagcaccgagcccagcgaaggcagcgccccaggcaccagcaccgagcctagtgagggcggctctggcggcggcagcgcccaggagattaaacggatcaacaagatcagaagaagacttgtgaaagacagcaacaccaagaaggccggcaagacaggccccatgaaaaccctgctggttagagtgatgacacccgatctgagagagcggctggaaaacctgagaaagaagcctgaaaatatcccccagcccatcagcaatacatctagagccaacctgaataagctgctgaccgattacaccgaaatgaagaaggcgatcctgcatgtgtactgggaagagttccagaaggaccctgtgggcctgatgagccgggtggcccagcctgccagcaagaagatcgatcagaacaagctgaaacctgagatggacgagaagggcaacctgaccaccgccggctttgcctgctctcagtgtggccagcccctgttcgtgtacaagctggagcaggtgtctgagaagggcaaggcttacaccaactacttcggacggtgcaatgtggccgagcacgaaaagctgatcctgctggcccagctgaagcccgagaaggatagcgacgaagccgtgacatatagcctgggaaagtttgggcagagggccctggatttctacagcattcatgtgaccaaggagtccacccaccccgtgaagcccctggcccagatcgccggaaacagatacgcctccggacctgtgggaaaggccctgagcgacgcatgtatgggcacaatcgcctccttcctgtctaagtaccaggacatcatcatcgaacaccagaaggtggtgaagggcaaccagaagagactggagagcctgcgggagctggccggcaaggaaaacctggaataccctagcgtgaccctgccacctcagcctcacaccaaggagggcgttgatgcctacaacgaagtgatcgcccgggtgcgaatgtgggtgaacctgaacctgtggcagaagctgaagctaagcagagatgatgccaagcctctgctgagactgaagggattcccttcctttcctctggtcgagagacaggccaacgaagtggactggtgggacatggtgtgtaacgtgaagaagctgatcaacgagaaaaaggaggatggcaaggtgttttggcagaatctggctggctacaagagacaggaagccctgagaccatacctgagcagcgaggaagatcggaagaagggaaagaaattcgctcggtaccagctgggcgacctgctgctgcacctggaaaagaagcacggcgaggactggggaaaggtgtacgacgaggcctgggagcggattgacaagaaagtggaaggcctgagcaagcacatcaagctggaagaggaacggagaagcgaggacgcccagagcaaggccgccctgaccgactggctgcgggctaaggccagcttcgtgatcgagggcctgaaggaggccgacaaggacgagttctgcagatgcgagctgaagctgcagaagtggtacggggacctgcggggaaagcccttcgccatcgaagccgagaacagcatcctggacatcagcggcttcagcaagcagtacaactgtgccttcatctggcagaaggacggcgtgaagaagctgaacctgtacctgatcatcaactacttcaagggcggcaagctgcggttcaagaagatcaaacctgaagccttcgaagccaacagattctacaccgtgatcaacaaaaagagcggcgagatcgtgcccatggaggtgaacttcaacttcgacgaccccaacctgatcatcctgcctctggcctttggcaagagacagggcagagaattcatctggaacgacctgctgtccctggaaaccggcagcctgaagctggccaacggaagagtgatcgagaagacactgtacaacagaagaacccggcaggatgagcctgccctgttcgtggccctgaccttcgagcggcgggaggtcctggactcctccaatatcaaaccaatgaacctgatcggcgtggcaagaggcgaaaacatccccgccgtgatcgccctgaccgaccccgagggctgcccactgagccggtttaaggatagcctgggaaacccaacccacatcctgagaatcggcgagagctataaggagaagcagcggaccatccaggccaagaaggaggtggagcagcggagagccggcggctacagccggaagtacgccagcaaagccaagaatctggcagacgatatggtgagaaacaccgctagagatctgctgtactacgccgtgacccaggatgccatgctgatcttcgccaacctgagccggggcttcggccggcagggcaagcggaccttcatggccgagagacagtacacacggatggaggactggctgaccgccaagctggcctacgagggcctgagcaagacctacctgtccaagacactggcccagtacacctccaagacatgcagcaactgtgggtttaccatcaccagcgccgactacgacagggtgctggagaagctgaagaagacagcaacaggctggatgaccacaattaacggcaaggagctgaaggtggagggccagattacctactacaacagatacaagagacagaacgtagtcaaggacctgtccgtcgagctggatagactgagcgaagaatctgtgaacaacgacatctcctcctggacaaagggcagaagcggagaagctctgagcctcctgaagaaaagattctcccatagacccgtgcaggagaagttcgtgtgcctgaactgcggcttcgagacacacgcagccgagcaagccgccctgaacatcgccagatcctggctgttcctgcggagccaggagtacaagaaataccagacaaacaagacaaccggcaacaccgataagagagccttcgtcgagacctggcagtccttttaccggaagaagcttaaggaggtgtggaaacctgccgtgcggtctggcggatctggcggaggctccacaagcgaggagctgcccgtggtgttcgaggacgtggccgtgtacttcaccagggaggagtggggcatgctggacaagaggcagaaggagctgtacagggacgtgatgaggatgaactacgagctgctggccagcctgggccccgccgccgccaagcccgacctgatcagcaagctggagaggagggccgccccctggatcaaggaccccaacggccccaagtggggcaagggcaggccccccggcaacaccagccccaagaaaaagagaaaagtctaagctgccttctgcggggcttgccttctggccatgcccttcttctctcccttgcacctgtacctcttggtctttgaataaagcctgagtaggaaggctagcaaaaaaaaaaaaaaaaaaaaaaaaaaaaaaaaaaaaaaaaaaaaaaaaaaaaaaaaaaaaaaaaaaaaaaaaaaaaaaaa

SEQ ID NO: 3140 - RNA, 5419 nt, synthetic construct
  source 1..5419: mol_type = other RNA
aggaaataagagagaaaagaagagtaagaagaaatataagagccaccatggcccctaagaagaagcgtaaagtgagccgggtgaacggcagcggcagcggcggcggcatgaaccacgaccaggagttcgacccccctaaggtgtaccctcccgtccccgccgagaagagaaagcccatccgggtcctgagcctgttcgatggcatcgccaccggtctgctggtgctgaaggacctgggcatccaggtggataggtacattgcctccgaggtgtgcgaggactccatcaccgtgggaatggtgcgtcatcagggcaagatcatgtacgtgggcgacgtgcggagcgtgacacagaagcatatccaggagtggggccctttcgacctggtgatcggcggcagcccttgcaatgacctgagcatcgtgaacccagcccggaagggcctgtacgagggaaccggcagactgttcttcgagttttacagactgctgcacgacgcccggcctaaggaaggcgacgaccggcccttcttttggctgttcgagaatgtggtggccatgggagtcagcgacaagcgggatattagccggttcctggagagcaaccccgtgatgatcgatgccaaggaagtgagcgccgcccaccgggccagatacttctggggcaatctgcctggcatgaacagacccctggccagcaccgtgaacgacaagctggagctgcaggagtgcctggagcacggccggatcgccaagttcagcaaggtgagaaccatcaccacccgaagcaacagcatcaaacaaggcaaggaccagcactttcctgtgttcatgaacgagaaggaggacatcctgtggtgtaccgagatggagagagtgttcgggttcccagtccactacacagatgtcagcaacatgtctagactggccagacagagactgctgggaagaagctggtccgtccctgtgatcagacacctgttcgcccctctgaaggagtacttcgcctgcgtgagcagcggcaacagcaacgccaacagccggggccccagcttctctagcggcctggtgccactgtccctgagagggagccacatgggccccatggagatctacaaaaccgtgagcgcctggaagcggcagcctgtgcgcgtgctgagcctgtttcggaatatcgataaagtcctgaaaagcctgggattcctggagagcggctctggctccggcggtggcaccctgaagtacgtggaggatgtgacaaacgtggtcagacgggatgtggagaagtggggccccttcgatctggtgtacggcagcacccaacccctgggcagctcttgtgaccggtgccctggctggtacatgtttcagttccaccggatcctgcagtacgccctgccgagacaggagtcccagcggccattcttttggattttcatggacaacttgctgctgaccgaggatgaccaggaaactaccactcggttcctgcagaccgaagccgtgaccctgcaggacgtgagaggccgggactaccagaacgccatgcgggtgtggtccaacatccctggactgaaaagcaagcacgcacctctgacccctaaagaagaggagtacctgcaggcccaggtgcggagcagaagcaagctggacgcccctaaggtggatctgctggtgaagaattgcctcctgcccctgagagagtacttcaagtatttcagccagaatagtctgcccctgggcggcccaagcagcggcgcccctcctcccagcggcggcagcccagccggctccccaacctctaccgaggagggcacctctgagtccgccacccccgagagcggccctggcacctccaccgagcccagcgagggcagcgcacccggcagccctgccggcagccccacctccacagaggagggaaccagcaccgagcccagcgaaggcagcgccccaggcaccagcaccgagcctagtgagggcggctctggcggcggcagcgcccaggagattaaacggatcaacaagatcagaagaagacttgtgaaagacagcaacaccaagaaggccggcaagacaggccccatgaaaaccctgctggttagagtgatgacacccgatctgagagagcggctggaaaacctgagaaagaagcctgaaaatatcccccagcccatcagcaatacatctagagccaacctgaataagctgctgaccgattacaccgaaatgaagaaggcgatcctgcatgtgtactgggaagagttccagaaggaccctgtgggcctgatgagccgggtggcccagcctgccagcaagaagatcgatcagaacaagctgaaacctgagatggacgagaagggcaacctgaccaccgccggctttgcctgctctcagtgtggccagcccctgttcgtgtacaagctggagcaggtgtctgagaagggcaaggcttacaccaactacttcggacggtgcaatgtggccgagcacgaaaagctgatcctgctggcccagctgaagcccgagaaggatagcgacgaagccgtgacatatagcctgggaaagtttgggcagagggccctggatttctacagcattcatgtgaccaaggagtccacccaccccgtgaagcccctggcccagatcgccggaaacagatacgcctccggacctgtgggaaaggccctgagcgacgcatgtatgggcacaatcgcctccttcctgtctaagtaccaggacatcatcatcgaacaccagaaggtggtgaagggcaaccagaagagactggagagcctgcgggagctggccggcaaggaaaacctggaataccctagcgtgaccctgccacctcagcctcacaccaaggagggcgttgatgcctacaacgaagtgatcgcccgggtgcgaatgtgggtgaacctgaacctgtggcagaagctgaagctaagcagagatgatgccaagcctctgctgagactgaagggattcccttcctttcctctggtcgagagacaggccaacgaagtggactggtgggacatggtgtgtaacgtgaagaagctgatcaacgagaaaaaggaggatggcaaggtgttttggcagaatctggctggctacaagagacaggaagccctgagaccatacctgagcagcgaggaagatcggaagaagggaaagaaattcgctcggtaccagctgggcgacctgctgctgcacctggaaaagaagcacggcgaggactggggaaaggtgtacgacgaggcctgggagcggattgacaagaaagtggaaggcctgagcaagcacatcaagctggaagaggaacggagaagcgaggacgcccagagcaaggccgccctgaccgactggctgcgggctaaggccagcttcgtgatcgagggcctgaaggaggccgacaaggacgagttctgcagatgcgagctgaagctgcagaagtggtacggggacctgcggggaaagcccttcgccatcgaagccgagaacagcatcctggacatcagcggcttcagcaagcagtacaactgtgccttcatctggcagaaggacggcgtgaagaagctgaacctgtacctgatcatcaactacttcaagggcggcaagctgcggttcaagaagatcaaacctgaagccttcgaagccaacagattctacaccgtgatcaacaaaaagagcggcgagatcgtgcccatggaggtgaacttcaacttcgacgaccccaacctgatcatcctgcctctggcctttggcaagagacagggcagagaattcatctggaacgacctgctgtccctggaaaccggcagcctgaagctggccaacggaagagtgatcgagaagacactgtacaacagaagaacccggcaggatgagcctgccctgttcgtggccctgaccttcgagcggcgggaggtcctggactcctccaatatcaaaccaatgaacctgatcggcgtggcaagaggcgaaaacatccccgccgtgatcgccctgaccgaccccgagggctgcccactgagccggtttaaggatagcctgggaaacccaacccacatcctgagaatcggcgagagctataaggagaagcagcggaccatccaggccaagaaggaggtggagcagcggagagccggcggctacagccggaagtacgccagcaaagccaagaatctggcagacgatatggtgagaaacaccgctagagatctgctgtactacgccgtgacccaggatgccatgctgatcttcgccaacctgagccggggcttcggccggcagggcaagcggaccttcatggccgagagacagtacacacggatggaggactggctgaccgccaagctggcctacgagggcctgagcaagacctacctgtccaagacactggcccagtacacctccaagacatgcagcaactgtgggtttaccatcaccagcgccgactacgacagggtgctggagaagctgaagaagacagcaacaggctggatgaccacaattaacggcaaggagctgaaggtggagggccagattacctactacaacagatacaagagacagaacgtagtcaaggacctgtccgtcgagctggatagactgagcgaagaatctgtgaacaacgacatctcctcctggacaaagggcagaagcggagaagctctgagcctcctgaagaaaagattctcccatagacccgtgcaggagaagttcgtgtgcctgaactgcggcttcgagacacacgcagccgagcaagccgccctgaacatcgccagatcctggctgttcctgcggagccaggagtacaagaaataccagacaaacaagacaaccggcaacaccgataagagagccttcgtcgagacctggcagtccttttaccggaagaagcttaaggaggtgtggaaacctgccgtgcggtctggcggatctggcggaggctccacaagcccccaggagagcgtgaccttcaaggacatcgccgtggacttcacccaggaggagtgggccctgctggacaccagccagaggaagctgtacagggacgtgatgctggagaacatcagccacctggtgagcgtgggctaccacctgtgcaagagcgacgtgatcagccagctggagcagggcgtggagctgtggagggagggcaggggcttcccccagggccccaaccccgacaggaagagcggcaccagccccaagaaaaagagaaaagtctaagctgccttctgcggggcttgccttctggccatgcccttcttctctcccttgcacctgtacctcttggtctttgaataaagcctgagtaggaaggctagcaaaaaaaaaaaaaaaaaaaaaaaaaaaaaaaaaaaaaaaaaaaaaaaaaaaaaaaaaaaaaaaaaaaaaaaaaaaaaaaa

SEQ ID NO: 3141 - RNA, 5419 nt, synthetic construct
  source 1..5419: mol_type = other RNA
aggaaataagagagaaaagaagagtaagaagaaatataagagccaccatggcccctaagaagaagcgtaaagtgagccgggtgaacggcagcggcagcggcggcggcatgaaccacgaccaggagttcgacccccctaaggtgtaccctcccgtccccgccgagaagagaaagcccatccgggtcctgagcctgttcgatggcatcgccaccggtctgctggtgctgaaggacctgggcatccaggtggataggtacattgcctccgaggtgtgcgaggactccatcaccgtgggaatggtgcgtcatcagggcaagatcatgtacgtgggcgacgtgcggagcgtgacacagaagcatatccaggagtggggccctttcgacctggtgatcggcggcagcccttgcaatgacctgagcatcgtgaacccagcccggaagggcctgtacgagggaaccggcagactgttcttcgagttttacagactgctgcacgacgcccggcctaaggaaggcgacgaccggcccttcttttggctgttcgagaatgtggtggccatgggagtcagcgacaagcgggatattagccggttcctggagagcaaccccgtgatgatcgatgccaaggaagtgagcgccgcccaccgggccagatacttctggggcaatctgcctggcatgaacagacccctggccagcaccgtgaacgacaagctggagctgcaggagtgcctggagcacggccggatcgccaagttcagcaaggtgagaaccatcaccacccgaagcaacagcatcaaacaaggcaaggaccagcactttcctgtgttcatgaacgagaaggaggacatcctgtggtgtaccgagatggagagagtgttcgggttcccagtccactacacagatgtcagcaacatgtctagactggccagacagagactgctgggaagaagctggtccgtccctgtgatcagacacctgttcgcccctctgaaggagtacttcgcctgcgtgagcagcggcaacagcaacgccaacagccggggccccagcttctctagcggcctggtgccactgtccctgagagggagccacatgggccccatggagatctacaaaaccgtgagcgcctggaagcggcagcctgtgcgcgtgctgagcctgtttcggaatatcgataaagtcctgaaaagcctgggattcctggagagcggctctggctccggcggtggcaccctgaagtacgtggaggatgtgacaaacgtggtcagacgggatgtggagaagtggggccccttcgatctggtgtacggcagcacccaacccctgggcagctcttgtgaccggtgccctggctggtacatgtttcagttccaccggatcctgcagtacgccctgccgagacaggagtcccagcggccattcttttggattttcatggacaacttgctgctgaccgaggatgaccaggaaactaccactcggttcctgcagaccgaagccgtgaccctgcaggacgtgagaggccgggactaccagaacgccatgcgggtgtggtccaacatccctggactgaaaagcaagcacgcacctctgacccctaaagaagaggagtacctgcaggcccaggtgcggagcagaagcaagctggacgcccctaaggtggatctgctggtgaagaattgcctcctgcccctgagagagtacttcaagtatttcagccagaatagtctgcccctgggcggcccaagcagcggcgcccctcctcccagcggcggcagcccagccggctccccaacctctaccgaggagggcacctctgagtccgccacccccgagagcggccctggcacctccaccgagcccagcgagggcagcgcacccggcagccctgccggcagccccacctccacagaggagggaaccagcaccgagcccagcgaaggcagcgccccaggcaccagcaccgagcctagtgagggcggctctggcggcggcagcgcccaggagattaaacggatcaacaagatcagaagaagacttgtgaaagacagcaacaccaagaaggccggcaagacaggccccatgaaaaccctgctggttagagtgatgacacccgatctgagagagcggctggaaaacctgagaaagaagcctgaaaatatcccccagcccatcagcaatacatctagagccaacctgaataagctgctgaccgattacaccgaaatgaagaaggcgatcctgcatgtgtactgggaagagttccagaaggaccctgtgggcctgatgagccgggtggcccagcctgccagcaagaagatcgatcagaacaagctgaaacctgagatggacgagaagggcaacctgaccaccgccggctttgcctgctctcagtgtggccagcccctgttcgtgtacaagctggagcaggtgtctgagaagggcaaggcttacaccaactacttcggacggtgcaatgtggccgagcacgaaaagctgatcctgctggcccagctgaagcccgagaaggatagcgacgaagccgtgacatatagcctgggaaagtttgggcagagggccctggatttctacagcattcatgtgaccaaggagtccacccaccccgtgaagcccctggcccagatcgccggaaacagatacgcctccggacctgtgggaaaggccctgagcgacgcatgtatgggcacaatcgcctccttcctgtctaagtaccaggacatcatcatcgaacaccagaaggtggtgaagggcaaccagaagagactggagagcctgcgggagctggccggcaaggaaaacctggaataccctagcgtgaccctgccacctcagcctcacaccaaggagggcgttgatgcctacaacgaagtgatcgcccgggtgcgaatgtgggtgaacctgaacctgtggcagaagctgaagctaagcagagatgatgccaagcctctgctgagactgaagggattcccttcctttcctctggtcgagagacaggccaacgaagtggactggtgggacatggtgtgtaacgtgaagaagctgatcaacgagaaaaaggaggatggcaaggtgttttggcagaatctggctggctacaagagacaggaagccctgagaccatacctgagcagcgaggaagatcggaagaagggaaagaaattcgctcggtaccagctgggcgacctgctgctgcacctggaaaagaagcacggcgaggactggggaaaggtgtacgacgaggcctgggagcggattgacaagaaagtggaaggcctgagcaagcacatcaagctggaagaggaacggagaagcgaggacgcccagagcaaggccgccctgaccgactggctgcgggctaaggccagcttcgtgatcgagggcctgaaggaggccgacaaggacgagttctgcagatgcgagctgaagctgcagaagtggtacggggacctgcggggaaagcccttcgccatcgaagccgagaacagcatcctggacatcagcggcttcagcaagcagtacaactgtgccttcatctggcagaaggacggcgtgaagaagctgaacctgtacctgatcatcaactacttcaagggcggcaagctgcggttcaagaagatcaaacctgaagccttcgaagccaacagattctacaccgtgatcaacaaaaagagcggcgagatcgtgcccatggaggtgaacttcaacttcgacgaccccaacctgatcatcctgcctctggcctttggcaagagacagggcagagaattcatctggaacgacctgctgtccctggaaaccggcagcctgaagctggccaacggaagagtgatcgagaagacactgtacaacagaagaacccggcaggatgagcctgccctgttcgtggccctgaccttcgagcggcgggaggtcctggactcctccaatatcaaaccaatgaacctgatcggcgtggcaagaggcgaaaacatccccgccgtgatcgccctgaccgaccccgagggctgcccactgagccggtttaaggatagcctgggaaacccaacccacatcctgagaatcggcgagagctataaggagaagcagcggaccatccaggccaagaaggaggtggagcagcggagagccggcggctacagccggaagtacgccagcaaagccaagaatctggcagacgatatggtgagaaacaccgctagagatctgctgtactacgccgtgacccaggatgccatgctgatcttcgccaacctgagccggggcttcggccggcagggcaagcggaccttcatggccgagagacagtacacacggatggaggactggctgaccgccaagctggcctacgagggcctgagcaagacctacctgtccaagacactggcccagtacacctccaagacatgcagcaactgtgggtttaccatcaccagcgccgactacgacagggtgctggagaagctgaagaagacagcaacaggctggatgaccacaattaacggcaaggagctgaaggtggagggccagattacctactacaacagatacaagagacagaacgtagtcaaggacctgtccgtcgagctggatagactgagcgaagaatctgtgaacaacgacatctcctcctggacaaagggcagaagcggagaagctctgagcctcctgaagaaaagattctcccatagacccgtgcaggagaagttcgtgtgcctgaactgcggcttcgagacacacgcagccgagcaagccgccctgaacatcgccagatcctggctgttcctgcggagccaggagtacaagaaataccagacaaacaagacaaccggcaacaccgataagagagccttcgtcgagacctggcagtccttttaccggaagaagcttaaggaggtgtggaaacctgccgtgcggtctggcggatctggcggaggctccacaagcatggccgccctgttcctgagcgcccccccccaggccgaggtgaccttcgaggacgtggccgtgtacctgagcagggaggagtggggcaggctgggccccgcccagaggggcctgtacagggacgtgatgctggagacctacggcaacctggtgagcctgggcgtgggccccgccggccccaagcccggcgtgatcagccagctggagaggggcgacgagccctgggtgctggacgtgcagggcaccagccccaagaaaaagagaaaagtctaagctgccttctgcggggcttgccttctggccatgcccttcttctctcccttgcacctgtacctcttggtctttgaataaagcctgagtaggaaggctagcaaaaaaaaaaaaaaaaaaaaaaaaaaaaaaaaaaaaaaaaaaaaaaaaaaaaaaaaaaaaaaaaaaaaaaaaaaaaaaaa

SEQ ID NO: 3142 - RNA, 5419 nt, synthetic construct
  source 1..5419: mol_type = other RNA
aggaaataagagagaaaagaagagtaagaagaaatataagagccaccatggcccctaagaagaagcgtaaagtgagccgggtgaacggcagcggcagcggcggcggcatgaaccacgaccaggagttcgacccccctaaggtgtaccctcccgtccccgccgagaagagaaagcccatccgggtcctgagcctgttcgatggcatcgccaccggtctgctggtgctgaaggacctgggcatccaggtggataggtacattgcctccgaggtgtgcgaggactccatcaccgtgggaatggtgcgtcatcagggcaagatcatgtacgtgggcgacgtgcggagcgtgacacagaagcatatccaggagtggggccctttcgacctggtgatcggcggcagcccttgcaatgacctgagcatcgtgaacccagcccggaagggcctgtacgagggaaccggcagactgttcttcgagttttacagactgctgcacgacgcccggcctaaggaaggcgacgaccggcccttcttttggctgttcgagaatgtggtggccatgggagtcagcgacaagcgggatattagccggttcctggagagcaaccccgtgatgatcgatgccaaggaagtgagcgccgcccaccgggccagatacttctggggcaatctgcctggcatgaacagacccctggccagcaccgtgaacgacaagctggagctgcaggagtgcctggagcacggccggatcgccaagttcagcaaggtgagaaccatcaccacccgaagcaacagcatcaaacaaggcaaggaccagcactttcctgtgttcatgaacgagaaggaggacatcctgtggtgtaccgagatggagagagtgttcgggttcccagtccactacacagatgtcagcaacatgtctagactggccagacagagactgctgggaagaagctggtccgtccctgtgatcagacacctgttcgcccctctgaaggagtacttcgcctgcgtgagcagcggcaacagcaacgccaacagccggggccccagcttctctagcggcctggtgccactgtccctgagagggagccacatgggccccatggagatctacaaaaccgtgagcgcctggaagcggcagcctgtgcgcgtgctgagcctgtttcggaatatcgataaagtcctgaaaagcctgggattcctggagagcggctctggctccggcggtggcaccctgaagtacgtggaggatgtgacaaacgtggtcagacgggatgtggagaagtggggccccttcgatctggtgtacggcagcacccaacccctgggcagctcttgtgaccggtgccctggctggtacatgtttcagttccaccggatcctgcagtacgccctgccgagacaggagtcccagcggccattcttttggattttcatggacaacttgctgctgaccgaggatgaccaggaaactaccactcggttcctgcagaccgaagccgtgaccctgcaggacgtgagaggccgggactaccagaacgccatgcgggtgtggtccaacatccctggactgaaaagcaagcacgcacctctgacccctaaagaagaggagtacctgcaggcccaggtgcggagcagaagcaagctggacgcccctaaggtggatctgctggtgaagaattgcctcctgcccctgagagagtacttcaagtatttcagccagaatagtctgcccctgggcggcccaagcagcggcgcccctcctcccagcggcggcagcccagccggctccccaacctctaccgaggagggcacctctgagtccgccacccccgagagcggccctggcacctccaccgagcccagcgagggcagcgcacccggcagccctgccggcagccccacctccacagaggagggaaccagcaccgagcccagcgaaggcagcgccccaggcaccagcaccgagcctagtgagggcggctctggcggcggcagcgcccaggagattaaacggatcaacaagatcagaagaagacttgtgaaagacagcaacaccaagaaggccggcaagacaggccccatgaaaaccctgctggttagagtgatgacacccgatctgagagagcggctggaaaacctgagaaagaagcctgaaaatatcccccagcccatcagcaatacatctagagccaacctgaataagctgctgaccgattacaccgaaatgaagaaggcgatcctgcatgtgtactgggaagagttccagaaggaccctgtgggcctgatgagccgggtggcccagcctgccagcaagaagatcgatcagaacaagctgaaacctgagatggacgagaagggcaacctgaccaccgccggctttgcctgctctcagtgtggccagcccctgttcgtgtacaagctggagcaggtgtctgagaagggcaaggcttacaccaactacttcggacggtgcaatgtggccgagcacgaaaagctgatcctgctggcccagctgaagcccgagaaggatagcgacgaagccgtgacatatagcctgggaaagtttgggcagagggccctggatttctacagcattcatgtgaccaaggagtccacccaccccgtgaagcccctggcccagatcgccggaaacagatacgcctccggacctgtgggaaaggccctgagcgacgcatgtatgggcacaatcgcctccttcctgtctaagtaccaggacatcatcatcgaacaccagaaggtggtgaagggcaaccagaagagactggagagcctgcgggagctggccggcaaggaaaacctggaataccctagcgtgaccctgccacctcagcctcacaccaaggagggcgttgatgcctacaacgaagtgatcgcccgggtgcgaatgtgggtgaacctgaacctgtggcagaagctgaagctaagcagagatgatgccaagcctctgctgagactgaagggattcccttcctttcctctggtcgagagacaggccaacgaagtggactggtgggacatggtgtgtaacgtgaagaagctgatcaacgagaaaaaggaggatggcaaggtgttttggcagaatctggctggctacaagagacaggaagccctgagaccatacctgagcagcgaggaagatcggaagaagggaaagaaattcgctcggtaccagctgggcgacctgctgctgcacctggaaaagaagcacggcgaggactggggaaaggtgtacgacgaggcctgggagcggattgacaagaaagtggaaggcctgagcaagcacatcaagctggaagaggaacggagaagcgaggacgcccagagcaaggccgccctgaccgactggctgcgggctaaggccagcttcgtgatcgagggcctgaaggaggccgacaaggacgagttctgcagatgcgagctgaagctgcagaagtggtacggggacctgcggggaaagcccttcgccatcgaagccgagaacagcatcctggacatcagcggcttcagcaagcagtacaactgtgccttcatctggcagaaggacggcgtgaagaagctgaacctgtacctgatcatcaactacttcaagggcggcaagctgcggttcaagaagatcaaacctgaagccttcgaagccaacagattctacaccgtgatcaacaaaaagagcggcgagatcgtgcccatggaggtgaacttcaacttcgacgaccccaacctgatcatcctgcctctggcctttggcaagagacagggcagagaattcatctggaacgacctgctgtccctggaaaccggcagcctgaagctggccaacggaagagtgatcgagaagacactgtacaacagaagaacccggcaggatgagcctgccctgttcgtggccctgaccttcgagcggcgggaggtcctggactcctccaatatcaaaccaatgaacctgatcggcgtggcaagaggcgaaaacatccccgccgtgatcgccctgaccgaccccgagggctgcccactgagccggtttaaggatagcctgggaaacccaacccacatcctgagaatcggcgagagctataaggagaagcagcggaccatccaggccaagaaggaggtggagcagcggagagccggcggctacagccggaagtacgccagcaaagccaagaatctggcagacgatatggtgagaaacaccgctagagatctgctgtactacgccgtgacccaggatgccatgctgatcttcgccaacctgagccggggcttcggccggcagggcaagcggaccttcatggccgagagacagtacacacggatggaggactggctgaccgccaagctggcctacgagggcctgagcaagacctacctgtccaagacactggcccagtacacctccaagacatgcagcaactgtgggtttaccatcaccagcgccgactacgacagggtgctggagaagctgaagaagacagcaacaggctggatgaccacaattaacggcaaggagctgaaggtggagggccagattacctactacaacagatacaagagacagaacgtagtcaaggacctgtccgtcgagctggatagactgagcgaagaatctgtgaacaacgacatctcctcctggacaaagggcagaagcggagaagctctgagcctcctgaagaaaagattctcccatagacccgtgcaggagaagttcgtgtgcctgaactgcggcttcgagacacacgcagccgagcaagccgccctgaacatcgccagatcctggctgttcctgcggagccaggagtacaagaaataccagacaaacaagacaaccggcaacaccgataagagagccttcgtcgagacctggcagtccttttaccggaagaagcttaaggaggtgtggaaacctgccgtgcggtctggcggatctggcggaggctccacaagcaagcccggcatcgtgaggttcgccgacgtggccgtgtacttcagcagggaggagtgggcctgcctgaggcccgcccagagggccctgtacagggacgtgatgagggagacctacggccacctgggcgccctgggcttccccggccccaagcccgccctgatcagctggatggagagggagagcgaggcctggagccccgccgcccaggagcccaaggagggcgagaacctgggcggcgcccccaccagccccaagaaaaagagaaaagtctaagctgccttctgcggggcttgccttctggccatgcccttcttctctcccttgcacctgtacctcttggtctttgaataaagcctgagtaggaaggctagcaaaaaaaaaaaaaaaaaaaaaaaaaaaaaaaaaaaaaaaaaaaaaaaaaaaaaaaaaaaaaaaaaaaaaaaaaaaaaaaa

SEQ ID NO: 3143 - RNA, 5419 nt, synthetic construct
  source 1..5419: mol_type = other RNA
aggaaataagagagaaaagaagagtaagaagaaatataagagccaccatggcccctaagaagaagcgtaaagtgagccgggtgaacggcagcggcagcggcggcggcatgaaccacgaccaggagttcgacccccctaaggtgtaccctcccgtccccgccgagaagagaaagcccatccgggtcctgagcctgttcgatggcatcgccaccggtctgctggtgctgaaggacctgggcatccaggtggataggtacattgcctccgaggtgtgcgaggactccatcaccgtgggaatggtgcgtcatcagggcaagatcatgtacgtgggcgacgtgcggagcgtgacacagaagcatatccaggagtggggccctttcgacctggtgatcggcggcagcccttgcaatgacctgagcatcgtgaacccagcccggaagggcctgtacgagggaaccggcagactgttcttcgagttttacagactgctgcacgacgcccggcctaaggaaggcgacgaccggcccttcttttggctgttcgagaatgtggtggccatgggagtcagcgacaagcgggatattagccggttcctggagagcaaccccgtgatgatcgatgccaaggaagtgagcgccgcccaccgggccagatacttctggggcaatctgcctggcatgaacagacccctggccagcaccgtgaacgacaagctggagctgcaggagtgcctggagcacggccggatcgccaagttcagcaaggtgagaaccatcaccacccgaagcaacagcatcaaacaaggcaaggaccagcactttcctgtgttcatgaacgagaaggaggacatcctgtggtgtaccgagatggagagagtgttcgggttcccagtccactacacagatgtcagcaacatgtctagactggccagacagagactgctgggaagaagctggtccgtccctgtgatcagacacctgttcgcccctctgaaggagtacttcgcctgcgtgagcagcggcaacagcaacgccaacagccggggccccagcttctctagcggcctggtgccactgtccctgagagggagccacatgggccccatggagatctacaaaaccgtgagcgcctggaagcggcagcctgtgcgcgtgctgagcctgtttcggaatatcgataaagtcctgaaaagcctgggattcctggagagcggctctggctccggcggtggcaccctgaagtacgtggaggatgtgacaaacgtggtcagacgggatgtggagaagtggggccccttcgatctggtgtacggcagcacccaacccctgggcagctcttgtgaccggtgccctggctggtacatgtttcagttccaccggatcctgcagtacgccctgccgagacaggagtcccagcggccattcttttggattttcatggacaacttgctgctgaccgaggatgaccaggaaactaccactcggttcctgcagaccgaagccgtgaccctgcaggacgtgagaggccgggactaccagaacgccatgcgggtgtggtccaacatccctggactgaaaagcaagcacgcacctctgacccctaaagaagaggagtacctgcaggcccaggtgcggagcagaagcaagctggacgcccctaaggtggatctgctggtgaagaattgcctcctgcccctgagagagtacttcaagtatttcagccagaatagtctgcccctgggcggcccaagcagcggcgcccctcctcccagcggcggcagcccagccggctccccaacctctaccgaggagggcacctctgagtccgccacccccgagagcggccctggcacctccaccgagcccagcgagggcagcgcacccggcagccctgccggcagccccacctccacagaggagggaaccagcaccgagcccagcgaaggcagcgccccaggcaccagcaccgagcctagtgagggcggctctggcggcggcagcgcccaggagattaaacggatcaacaagatcagaagaagacttgtgaaagacagcaacaccaagaaggccggcaagacaggccccatgaaaaccctgctggttagagtgatgacacccgatctgagagagcggctggaaaacctgagaaagaagcctgaaaatatcccccagcccatcagcaatacatctagagccaacctgaataagctgctgaccgattacaccgaaatgaagaaggcgatcctgcatgtgtactgggaagagttccagaaggaccctgtgggcctgatgagccgggtggcccagcctgccagcaagaagatcgatcagaacaagctgaaacctgagatggacgagaagggcaacctgaccaccgccggctttgcctgctctcagtgtggccagcccctgttcgtgtacaagctggagcaggtgtctgagaagggcaaggcttacaccaactacttcggacggtgcaatgtggccgagcacgaaaagctgatcctgctggcccagctgaagcccgagaaggatagcgacgaagccgtgacatatagcctgggaaagtttgggcagagggccctggatttctacagcattcatgtgaccaaggagtccacccaccccgtgaagcccctggcccagatcgccggaaacagatacgcctccggacctgtgggaaaggccctgagcgacgcatgtatgggcacaatcgcctccttcctgtctaagtaccaggacatcatcatcgaacaccagaaggtggtgaagggcaaccagaagagactggagagcctgcgggagctggccggcaaggaaaacctggaataccctagcgtgaccctgccacctcagcctcacaccaaggagggcgttgatgcctacaacgaagtgatcgcccgggtgcgaatgtgggtgaacctgaacctgtggcagaagctgaagctaagcagagatgatgccaagcctctgctgagactgaagggattcccttcctttcctctggtcgagagacaggccaacgaagtggactggtgggacatggtgtgtaacgtgaagaagctgatcaacgagaaaaaggaggatggcaaggtgttttggcagaatctggctggctacaagagacaggaagccctgagaccatacctgagcagcgaggaagatcggaagaagggaaagaaattcgctcggtaccagctgggcgacctgctgctgcacctggaaaagaagcacggcgaggactggggaaaggtgtacgacgaggcctgggagcggattgacaagaaagtggaaggcctgagcaagcacatcaagctggaagaggaacggagaagcgaggacgcccagagcaaggccgccctgaccgactggctgcgggctaaggccagcttcgtgatcgagggcctgaaggaggccgacaaggacgagttctgcagatgcgagctgaagctgcagaagtggtacggggacctgcggggaaagcccttcgccatcgaagccgagaacagcatcctggacatcagcggcttcagcaagcagtacaactgtgccttcatctggcagaaggacggcgtgaagaagctgaacctgtacctgatcatcaactacttcaagggcggcaagctgcggttcaagaagatcaaacctgaagccttcgaagccaacagattctacaccgtgatcaacaaaaagagcggcgagatcgtgcccatggaggtgaacttcaacttcgacgaccccaacctgatcatcctgcctctggcctttggcaagagacagggcagagaattcatctggaacgacctgctgtccctggaaaccggcagcctgaagctggccaacggaagagtgatcgagaagacactgtacaacagaagaacccggcaggatgagcctgccctgttcgtggccctgaccttcgagcggcgggaggtcctggactcctccaatatcaaaccaatgaacctgatcggcgtggcaagaggcgaaaacatccccgccgtgatcgccctgaccgaccccgagggctgcccactgagccggtttaaggatagcctgggaaacccaacccacatcctgagaatcggcgagagctataaggagaagcagcggaccatccaggccaagaaggaggtggagcagcggagagccggcggctacagccggaagtacgccagcaaagccaagaatctggcagacgatatggtgagaaacaccgctagagatctgctgtactacgccgtgacccaggatgccatgctgatcttcgccaacctgagccggggcttcggccggcagggcaagcggaccttcatggccgagagacagtacacacggatggaggactggctgaccgccaagctggcctacgagggcctgagcaagacctacctgtccaagacactggcccagtacacctccaagacatgcagcaactgtgggtttaccatcaccagcgccgactacgacagggtgctggagaagctgaagaagacagcaacaggctggatgaccacaattaacggcaaggagctgaaggtggagggccagattacctactacaacagatacaagagacagaacgtagtcaaggacctgtccgtcgagctggatagactgagcgaagaatctgtgaacaacgacatctcctcctggacaaagggcagaagcggagaagctctgagcctcctgaagaaaagattctcccatagacccgtgcaggagaagttcgtgtgcctgaactgcggcttcgagacacacgcagccgagcaagccgccctgaacatcgccagatcctggctgttcctgcggagccaggagtacaagaaataccagacaaacaagacaaccggcaacaccgataagagagccttcgtcgagacctggcagtccttttaccggaagaagcttaaggaggtgtggaaacctgccgtgcggtctggcggatctggcggaggctccacaagcatggcccacgccctggtgaccttcagggacgtggccatcgacttcagccagaaggagtgggagtgcctggacaccacccagaggaagctgtacagggacgtgatgctggagaactacaacaacctggtgagcctgggctacagcggcagcaagcccgacgtgatcaccctgctggagcagggcaaggagccctgcatggccgccagggacgtgaccggcaggcagtaccccggcctgctgagcaccagccccaagaaaaagagaaaagtctaagctgccttctgcggggcttgccttctggccatgcccttcttctctcccttgcacctgtacctcttggtctttgaataaagcctgagtaggaaggctagcaaaaaaaaaaaaaaaaaaaaaaaaaaaaaaaaaaaaaaaaaaaaaaaaaaaaaaaaaaaaaaaaaaaaaaaaaaaaaaaa

SEQ ID NO: 3144 - RNA, 5419 nt, synthetic construct
  source 1..5419: mol_type = other RNA
aggaaataagagagaaaagaagagtaagaagaaatataagagccaccatggcccctaagaagaagcgtaaagtgagccgggtgaacggcagcggcagcggcggcggcatgaaccacgaccaggagttcgacccccctaaggtgtaccctcccgtccccgccgagaagagaaagcccatccgggtcctgagcctgttcgatggcatcgccaccggtctgctggtgctgaaggacctgggcatccaggtggataggtacattgcctccgaggtgtgcgaggactccatcaccgtgggaatggtgcgtcatcagggcaagatcatgtacgtgggcgacgtgcggagcgtgacacagaagcatatccaggagtggggccctttcgacctggtgatcggcggcagcccttgcaatgacctgagcatcgtgaacccagcccggaagggcctgtacgagggaaccggcagactgttcttcgagttttacagactgctgcacgacgcccggcctaaggaaggcgacgaccggcccttcttttggctgttcgagaatgtggtggccatgggagtcagcgacaagcgggatattagccggttcctggagagcaaccccgtgatgatcgatgccaaggaagtgagcgccgcccaccgggccagatacttctggggcaatctgcctggcatgaacagacccctggccagcaccgtgaacgacaagctggagctgcaggagtgcctggagcacggccggatcgccaagttcagcaaggtgagaaccatcaccacccgaagcaacagcatcaaacaaggcaaggaccagcactttcctgtgttcatgaacgagaaggaggacatcctgtggtgtaccgagatggagagagtgttcgggttcccagtccactacacagatgtcagcaacatgtctagactggccagacagagactgctgggaagaagctggtccgtccctgtgatcagacacctgttcgcccctctgaaggagtacttcgcctgcgtgagcagcggcaacagcaacgccaacagccggggccccagcttctctagcggcctggtgccactgtccctgagagggagccacatgggccccatggagatctacaaaaccgtgagcgcctggaagcggcagcctgtgcgcgtgctgagcctgtttcggaatatcgataaagtcctgaaaagcctgggattcctggagagcggctctggctccggcggtggcaccctgaagtacgtggaggatgtgacaaacgtggtcagacgggatgtggagaagtggggccccttcgatctggtgtacggcagcacccaacccctgggcagctcttgtgaccggtgccctggctggtacatgtttcagttccaccggatcctgcagtacgccctgccgagacaggagtcccagcggccattcttttggattttcatggacaacttgctgctgaccgaggatgaccaggaaactaccactcggttcctgcagaccgaagccgtgaccctgcaggacgtgagaggccgggactaccagaacgccatgcgggtgtggtccaacatccctggactgaaaagcaagcacgcacctctgacccctaaagaagaggagtacctgcaggcccaggtgcggagcagaagcaagctggacgcccctaaggtggatctgctggtgaagaattgcctcctgcccctgagagagtacttcaagtatttcagccagaatagtctgcccctgggcggcccaagcagcggcgcccctcctcccagcggcggcagcccagccggctccccaacctctaccgaggagggcacctctgagtccgccacccccgagagcggccctggcacctccaccgagcccagcgagggcagcgcacccggcagccctgccggcagccccacctccacagaggagggaaccagcaccgagcccagcgaaggcagcgccccaggcaccagcaccgagcctagtgagggcggctctggcggcggcagcgcccaggagattaaacggatcaacaagatcagaagaagacttgtgaaagacagcaacaccaagaaggccggcaagacaggccccatgaaaaccctgctggttagagtgatgacacccgatctgagagagcggctggaaaacctgagaaagaagcctgaaaatatcccccagcccatcagcaatacatctagagccaacctgaataagctgctgaccgattacaccgaaatgaagaaggcgatcctgcatgtgtactgggaagagttccagaaggaccctgtgggcctgatgagccgggtggcccagcctgccagcaagaagatcgatcagaacaagctgaaacctgagatggacgagaagggcaacctgaccaccgccggctttgcctgctctcagtgtggccagcccctgttcgtgtacaagctggagcaggtgtctgagaagggcaaggcttacaccaactacttcggacggtgcaatgtggccgagcacgaaaagctgatcctgctggcccagctgaagcccgagaaggatagcgacgaagccgtgacatatagcctgggaaagtttgggcagagggccctggatttctacagcattcatgtgaccaaggagtccacccaccccgtgaagcccctggcccagatcgccggaaacagatacgcctccggacctgtgggaaaggccctgagcgacgcatgtatgggcacaatcgcctccttcctgtctaagtaccaggacatcatcatcgaacaccagaaggtggtgaagggcaaccagaagagactggagagcctgcgggagctggccggcaaggaaaacctggaataccctagcgtgaccctgccacctcagcctcacaccaaggagggcgttgatgcctacaacgaagtgatcgcccgggtgcgaatgtgggtgaacctgaacctgtggcagaagctgaagctaagcagagatgatgccaagcctctgctgagactgaagggattcccttcctttcctctggtcgagagacaggccaacgaagtggactggtgggacatggtgtgtaacgtgaagaagctgatcaacgagaaaaaggaggatggcaaggtgttttggcagaatctggctggctacaagagacaggaagccctgagaccatacctgagcagcgaggaagatcggaagaagggaaagaaattcgctcggtaccagctgggcgacctgctgctgcacctggaaaagaagcacggcgaggactggggaaaggtgtacgacgaggcctgggagcggattgacaagaaagtggaaggcctgagcaagcacatcaagctggaagaggaacggagaagcgaggacgcccagagcaaggccgccctgaccgactggctgcgggctaaggccagcttcgtgatcgagggcctgaaggaggccgacaaggacgagttctgcagatgcgagctgaagctgcagaagtggtacggggacctgcggggaaagcccttcgccatcgaagccgagaacagcatcctggacatcagcggcttcagcaagcagtacaactgtgccttcatctggcagaaggacggcgtgaagaagctgaacctgtacctgatcatcaactacttcaagggcggcaagctgcggttcaagaagatcaaacctgaagccttcgaagccaacagattctacaccgtgatcaacaaaaagagcggcgagatcgtgcccatggaggtgaacttcaacttcgacgaccccaacctgatcatcctgcctctggcctttggcaagagacagggcagagaattcatctggaacgacctgctgtccctggaaaccggcagcctgaagctggccaacggaagagtgatcgagaagacactgtacaacagaagaacccggcaggatgagcctgccctgttcgtggccctgaccttcgagcggcgggaggtcctggactcctccaatatcaaaccaatgaacctgatcggcgtggcaagaggcgaaaacatccccgccgtgatcgccctgaccgaccccgagggctgcccactgagccggtttaaggatagcctgggaaacccaacccacatcctgagaatcggcgagagctataaggagaagcagcggaccatccaggccaagaaggaggtggagcagcggagagccggcggctacagccggaagtacgccagcaaagccaagaatctggcagacgatatggtgagaaacaccgctagagatctgctgtactacgccgtgacccaggatgccatgctgatcttcgccaacctgagccggggcttcggccggcagggcaagcggaccttcatggccgagagacagtacacacggatggaggactggctgaccgccaagctggcctacgagggcctgagcaagacctacctgtccaagacactggcccagtacacctccaagacatgcagcaactgtgggtttaccatcaccagcgccgactacgacagggtgctggagaagctgaagaagacagcaacaggctggatgaccacaattaacggcaaggagctgaaggtggagggccagattacctactacaacagatacaagagacagaacgtagtcaaggacctgtccgtcgagctggatagactgagcgaagaatctgtgaacaacgacatctcctcctggacaaagggcagaagcggagaagctctgagcctcctgaagaaaagattctcccatagacccgtgcaggagaagttcgtgtgcctgaactgcggcttcgagacacacgcagccgagcaagccgccctgaacatcgccagatcctggctgttcctgcggagccaggagtacaagaaataccagacaaacaagacaaccggcaacaccgataagagagccttcgtcgagacctggcagtccttttaccggaagaagcttaaggaggtgtggaaacctgccgtgcggtctggcggatctggcggaggctccacaagcatgcccgtgaccttcgaggacgtggccgtgtacttcacccagggccagggcgccctgctggaccccacccagagggccctgtacagggacgtgatgcaggagaactacgagaccgtgaccagcctgggcaagagcgtgaagggcttccccctggccaagcccgacctgatcaccaggctggagaggggcgaggagccctgggtgagcgacctgcaggccaccggcgacgagaggatgagcgagaccagccccaagaaaaagagaaaagtctaagctgccttctgcggggcttgccttctggccatgcccttcttctctcccttgcacctgtacctcttggtctttgaataaagcctgagtaggaaggctagcaaaaaaaaaaaaaaaaaaaaaaaaaaaaaaaaaaaaaaaaaaaaaaaaaaaaaaaaaaaaaaaaaaaaaaaaaaaaaaaa

SEQ ID NO: 3145 - RNA, 5419 nt, synthetic construct
  source 1..5419: mol_type = other RNA
aggaaataagagagaaaagaagagtaagaagaaatataagagccaccatggcccctaagaagaagcgtaaagtgagccgggtgaacggcagcggcagcggcggcggcatgaaccacgaccaggagttcgacccccctaaggtgtaccctcccgtccccgccgagaagagaaagcccatccgggtcctgagcctgttcgatggcatcgccaccggtctgctggtgctgaaggacctgggcatccaggtggataggtacattgcctccgaggtgtgcgaggactccatcaccgtgggaatggtgcgtcatcagggcaagatcatgtacgtgggcgacgtgcggagcgtgacacagaagcatatccaggagtggggccctttcgacctggtgatcggcggcagcccttgcaatgacctgagcatcgtgaacccagcccggaagggcctgtacgagggaaccggcagactgttcttcgagttttacagactgctgcacgacgcccggcctaaggaaggcgacgaccggcccttcttttggctgttcgagaatgtggtggccatgggagtcagcgacaagcgggatattagccggttcctggagagcaaccccgtgatgatcgatgccaaggaagtgagcgccgcccaccgggccagatacttctggggcaatctgcctggcatgaacagacccctggccagcaccgtgaacgacaagctggagctgcaggagtgcctggagcacggccggatcgccaagttcagcaaggtgagaaccatcaccacccgaagcaacagcatcaaacaaggcaaggaccagcactttcctgtgttcatgaacgagaaggaggacatcctgtggtgtaccgagatggagagagtgttcgggttcccagtccactacacagatgtcagcaacatgtctagactggccagacagagactgctgggaagaagctggtccgtccctgtgatcagacacctgttcgcccctctgaaggagtacttcgcctgcgtgagcagcggcaacagcaacgccaacagccggggccccagcttctctagcggcctggtgccactgtccctgagagggagccacatgggccccatggagatctacaaaaccgtgagcgcctggaagcggcagcctgtgcgcgtgctgagcctgtttcggaatatcgataaagtcctgaaaagcctgggattcctggagagcggctctggctccggcggtggcaccctgaagtacgtggaggatgtgacaaacgtggtcagacgggatgtggagaagtggggccccttcgatctggtgtacggcagcacccaacccctgggcagctcttgtgaccggtgccctggctggtacatgtttcagttccaccggatcctgcagtacgccctgccgagacaggagtcccagcggccattcttttggattttcatggacaacttgctgctgaccgaggatgaccaggaaactaccactcggttcctgcagaccgaagccgtgaccctgcaggacgtgagaggccgggactaccagaacgccatgcgggtgtggtccaacatccctggactgaaaagcaagcacgcacctctgacccctaaagaagaggagtacctgcaggcccaggtgcggagcagaagcaagctggacgcccctaaggtggatctgctggtgaagaattgcctcctgcccctgagagagtacttcaagtatttcagccagaatagtctgcccctgggcggcccaagcagcggcgcccctcctcccagcggcggcagcccagccggctccccaacctctaccgaggagggcacctctgagtccgccacccccgagagcggccctggcacctccaccgagcccagcgagggcagcgcacccggcagccctgccggcagccccacctccacagaggagggaaccagcaccgagcccagcgaaggcagcgccccaggcaccagcaccgagcctagtgagggcggctctggcggcggcagcgcccaggagattaaacggatcaacaagatcagaagaagacttgtgaaagacagcaacaccaagaaggccggcaagacaggccccatgaaaaccctgctggttagagtgatgacacccgatctgagagagcggctggaaaacctgagaaagaagcctgaaaatatcccccagcccatcagcaatacatctagagccaacctgaataagctgctgaccgattacaccgaaatgaagaaggcgatcctgcatgtgtactgggaagagttccagaaggaccctgtgggcctgatgagccgggtggcccagcctgccagcaagaagatcgatcagaacaagctgaaacctgagatggacgagaagggcaacctgaccaccgccggctttgcctgctctcagtgtggccagcccctgttcgtgtacaagctggagcaggtgtctgagaagggcaaggcttacaccaactacttcggacggtgcaatgtggccgagcacgaaaagctgatcctgctggcccagctgaagcccgagaaggatagcgacgaagccgtgacatatagcctgggaaagtttgggcagagggccctggatttctacagcattcatgtgaccaaggagtccacccaccccgtgaagcccctggcccagatcgccggaaacagatacgcctccggacctgtgggaaaggccctgagcgacgcatgtatgggcacaatcgcctccttcctgtctaagtaccaggacatcatcatcgaacaccagaaggtggtgaagggcaaccagaagagactggagagcctgcgggagctggccggcaaggaaaacctggaataccctagcgtgaccctgccacctcagcctcacaccaaggagggcgttgatgcctacaacgaagtgatcgcccgggtgcgaatgtgggtgaacctgaacctgtggcagaagctgaagctaagcagagatgatgccaagcctctgctgagactgaagggattcccttcctttcctctggtcgagagacaggccaacgaagtggactggtgggacatggtgtgtaacgtgaagaagctgatcaacgagaaaaaggaggatggcaaggtgttttggcagaatctggctggctacaagagacaggaagccctgagaccatacctgagcagcgaggaagatcggaagaagggaaagaaattcgctcggtaccagctgggcgacctgctgctgcacctggaaaagaagcacggcgaggactggggaaaggtgtacgacgaggcctgggagcggattgacaagaaagtggaaggcctgagcaagcacatcaagctggaagaggaacggagaagcgaggacgcccagagcaaggccgccctgaccgactggctgcgggctaaggccagcttcgtgatcgagggcctgaaggaggccgacaaggacgagttctgcagatgcgagctgaagctgcagaagtggtacggggacctgcggggaaagcccttcgccatcgaagccgagaacagcatcctggacatcagcggcttcagcaagcagtacaactgtgccttcatctggcagaaggacggcgtgaagaagctgaacctgtacctgatcatcaactacttcaagggcggcaagctgcggttcaagaagatcaaacctgaagccttcgaagccaacagattctacaccgtgatcaacaaaaagagcggcgagatcgtgcccatggaggtgaacttcaacttcgacgaccccaacctgatcatcctgcctctggcctttggcaagagacagggcagagaattcatctggaacgacctgctgtccctggaaaccggcagcctgaagctggccaacggaagagtgatcgagaagacactgtacaacagaagaacccggcaggatgagcctgccctgttcgtggccctgaccttcgagcggcgggaggtcctggactcctccaatatcaaaccaatgaacctgatcggcgtggcaagaggcgaaaacatccccgccgtgatcgccctgaccgaccccgagggctgcccactgagccggtttaaggatagcctgggaaacccaacccacatcctgagaatcggcgagagctataaggagaagcagcggaccatccaggccaagaaggaggtggagcagcggagagccggcggctacagccggaagtacgccagcaaagccaagaatctggcagacgatatggtgagaaacaccgctagagatctgctgtactacgccgtgacccaggatgccatgctgatcttcgccaacctgagccggggcttcggccggcagggcaagcggaccttcatggccgagagacagtacacacggatggaggactggctgaccgccaagctggcctacgagggcctgagcaagacctacctgtccaagacactggcccagtacacctccaagacatgcagcaactgtgggtttaccatcaccagcgccgactacgacagggtgctggagaagctgaagaagacagcaacaggctggatgaccacaattaacggcaaggagctgaaggtggagggccagattacctactacaacagatacaagagacagaacgtagtcaaggacctgtccgtcgagctggatagactgagcgaagaatctgtgaacaacgacatctcctcctggacaaagggcagaagcggagaagctctgagcctcctgaagaaaagattctcccatagacccgtgcaggagaagttcgtgtgcctgaactgcggcttcgagacacacgcagccgagcaagccgccctgaacatcgccagatcctggctgttcctgcggagccaggagtacaagaaataccagacaaacaagacaaccggcaacaccgataagagagccttcgtcgagacctggcagtccttttaccggaagaagcttaaggaggtgtggaaacctgccgtgcggtctggcggatctggcggaggctccacaagcggcaagatgagcgtgaccttcgaggacgtggccctgtacttcagccccgaggagtgggccaagctgagcggctgccagaggcagctgtacagggaggtgatgctggagaactaccagatggtggccagcctgggctgggccaacatcaagcccgagatcatctgcaagatggagagggaggagaccctgtgcgtgcccgccccccccagggagtggcagagggaccagagccccgtgcccgccaccagccccaagaaaaagagaaaagtctaagctgccttctgcggggcttgccttctggccatgcccttcttctctcccttgcacctgtacctcttggtctttgaataaagcctgagtaggaaggctagcaaaaaaaaaaaaaaaaaaaaaaaaaaaaaaaaaaaaaaaaaaaaaaaaaaaaaaaaaaaaaaaaaaaaaaaaaaaaaaaa

SEQ ID NO: 3146 - RNA, 5419 nt, synthetic construct
  source 1..5419: mol_type = other RNA
aggaaataagagagaaaagaagagtaagaagaaatataagagccaccatggcccctaagaagaagcgtaaagtgagccgggtgaacggcagcggcagcggcggcggcatgaaccacgaccaggagttcgacccccctaaggtgtaccctcccgtccccgccgagaagagaaagcccatccgggtcctgagcctgttcgatggcatcgccaccggtctgctggtgctgaaggacctgggcatccaggtggataggtacattgcctccgaggtgtgcgaggactccatcaccgtgggaatggtgcgtcatcagggcaagatcatgtacgtgggcgacgtgcggagcgtgacacagaagcatatccaggagtggggccctttcgacctggtgatcggcggcagcccttgcaatgacctgagcatcgtgaacccagcccggaagggcctgtacgagggaaccggcagactgttcttcgagttttacagactgctgcacgacgcccggcctaaggaaggcgacgaccggcccttcttttggctgttcgagaatgtggtggccatgggagtcagcgacaagcgggatattagccggttcctggagagcaaccccgtgatgatcgatgccaaggaagtgagcgccgcccaccgggccagatacttctggggcaatctgcctggcatgaacagacccctggccagcaccgtgaacgacaagctggagctgcaggagtgcctggagcacggccggatcgccaagttcagcaaggtgagaaccatcaccacccgaagcaacagcatcaaacaaggcaaggaccagcactttcctgtgttcatgaacgagaaggaggacatcctgtggtgtaccgagatggagagagtgttcgggttcccagtccactacacagatgtcagcaacatgtctagactggccagacagagactgctgggaagaagctggtccgtccctgtgatcagacacctgttcgcccctctgaaggagtacttcgcctgcgtgagcagcggcaacagcaacgccaacagccggggccccagcttctctagcggcctggtgccactgtccctgagagggagccacatgggccccatggagatctacaaaaccgtgagcgcctggaagcggcagcctgtgcgcgtgctgagcctgtttcggaatatcgataaagtcctgaaaagcctgggattcctggagagcggctctggctccggcggtggcaccctgaagtacgtggaggatgtgacaaacgtggtcagacgggatgtggagaagtggggccccttcgatctggtgtacggcagcacccaacccctgggcagctcttgtgaccggtgccctggctggtacatgtttcagttccaccggatcctgcagtacgccctgccgagacaggagtcccagcggccattcttttggattttcatggacaacttgctgctgaccgaggatgaccaggaaactaccactcggttcctgcagaccgaagccgtgaccctgcaggacgtgagaggccgggactaccagaacgccatgcgggtgtggtccaacatccctggactgaaaagcaagcacgcacctctgacccctaaagaagaggagtacctgcaggcccaggtgcggagcagaagcaagctggacgcccctaaggtggatctgctggtgaagaattgcctcctgcccctgagagagtacttcaagtatttcagccagaatagtctgcccctgggcggcccaagcagcggcgcccctcctcccagcggcggcagcccagccggctccccaacctctaccgaggagggcacctctgagtccgccacccccgagagcggccctggcacctccaccgagcccagcgagggcagcgcacccggcagccctgccggcagccccacctccacagaggagggaaccagcaccgagcccagcgaaggcagcgccccaggcaccagcaccgagcctagtgagggcggctctggcggcggcagcgcccaggagattaaacggatcaacaagatcagaagaagacttgtgaaagacagcaacaccaagaaggccggcaagacaggccccatgaaaaccctgctggttagagtgatgacacccgatctgagagagcggctggaaaacctgagaaagaagcctgaaaatatcccccagcccatcagcaatacatctagagccaacctgaataagctgctgaccgattacaccgaaatgaagaaggcgatcctgcatgtgtactgggaagagttccagaaggaccctgtgggcctgatgagccgggtggcccagcctgccagcaagaagatcgatcagaacaagctgaaacctgagatggacgagaagggcaacctgaccaccgccggctttgcctgctctcagtgtggccagcccctgttcgtgtacaagctggagcaggtgtctgagaagggcaaggcttacaccaactacttcggacggtgcaatgtggccgagcacgaaaagctgatcctgctggcccagctgaagcccgagaaggatagcgacgaagccgtgacatatagcctgggaaagtttgggcagagggccctggatttctacagcattcatgtgaccaaggagtccacccaccccgtgaagcccctggcccagatcgccggaaacagatacgcctccggacctgtgggaaaggccctgagcgacgcatgtatgggcacaatcgcctccttcctgtctaagtaccaggacatcatcatcgaacaccagaaggtggtgaagggcaaccagaagagactggagagcctgcgggagctggccggcaaggaaaacctggaataccctagcgtgaccctgccacctcagcctcacaccaaggagggcgttgatgcctacaacgaagtgatcgcccgggtgcgaatgtgggtgaacctgaacctgtggcagaagctgaagctaagcagagatgatgccaagcctctgctgagactgaagggattcccttcctttcctctggtcgagagacaggccaacgaagtggactggtgggacatggtgtgtaacgtgaagaagctgatcaacgagaaaaaggaggatggcaaggtgttttggcagaatctggctggctacaagagacaggaagccctgagaccatacctgagcagcgaggaagatcggaagaagggaaagaaattcgctcggtaccagctgggcgacctgctgctgcacctggaaaagaagcacggcgaggactggggaaaggtgtacgacgaggcctgggagcggattgacaagaaagtggaaggcctgagcaagcacatcaagctggaagaggaacggagaagcgaggacgcccagagcaaggccgccctgaccgactggctgcgggctaaggccagcttcgtgatcgagggcctgaaggaggccgacaaggacgagttctgcagatgcgagctgaagctgcagaagtggtacggggacctgcggggaaagcccttcgccatcgaagccgagaacagcatcctggacatcagcggcttcagcaagcagtacaactgtgccttcatctggcagaaggacggcgtgaagaagctgaacctgtacctgatcatcaactacttcaagggcggcaagctgcggttcaagaagatcaaacctgaagccttcgaagccaacagattctacaccgtgatcaacaaaaagagcggcgagatcgtgcccatggaggtgaacttcaacttcgacgaccccaacctgatcatcctgcctctggcctttggcaagagacagggcagagaattcatctggaacgacctgctgtccctggaaaccggcagcctgaagctggccaacggaagagtgatcgagaagacactgtacaacagaagaacccggcaggatgagcctgccctgttcgtggccctgaccttcgagcggcgggaggtcctggactcctccaatatcaaaccaatgaacctgatcggcgtggcaagaggcgaaaacatccccgccgtgatcgccctgaccgaccccgagggctgcccactgagccggtttaaggatagcctgggaaacccaacccacatcctgagaatcggcgagagctataaggagaagcagcggaccatccaggccaagaaggaggtggagcagcggagagccggcggctacagccggaagtacgccagcaaagccaagaatctggcagacgatatggtgagaaacaccgctagagatctgctgtactacgccgtgacccaggatgccatgctgatcttcgccaacctgagccggggcttcggccggcagggcaagcggaccttcatggccgagagacagtacacacggatggaggactggctgaccgccaagctggcctacgagggcctgagcaagacctacctgtccaagacactggcccagtacacctccaagacatgcagcaactgtgggtttaccatcaccagcgccgactacgacagggtgctggagaagctgaagaagacagcaacaggctggatgaccacaattaacggcaaggagctgaaggtggagggccagattacctactacaacagatacaagagacagaacgtagtcaaggacctgtccgtcgagctggatagactgagcgaagaatctgtgaacaacgacatctcctcctggacaaagggcagaagcggagaagctctgagcctcctgaagaaaagattctcccatagacccgtgcaggagaagttcgtgtgcctgaactgcggcttcgagacacacgcagccgagcaagccgccctgaacatcgccagatcctggctgttcctgcggagccaggagtacaagaaataccagacaaacaagacaaccggcaacaccgataagagagccttcgtcgagacctggcagtccttttaccggaagaagcttaaggaggtgtggaaacctgccgtgcggtctggcggatctggcggaggctccacaagcatgaacaacagccagggcagggtgaccttcgaggacgtgaccgtgaacttcacccagggcgagtggcagaggctgaaccccgagcagaggaacctgtacagggacgtgatgctggagaactacagcaacctggtgagcgtgggccagagggagaccaccaagcccgacgtgatcctgaggctggagcagggcaaggagccctggagcgaggaggaggaggtgctgggcagcggcagggccgagaccagccccaagaaaaagagaaaagtctaagctgccttctgcggggcttgccttctggccatgcccttcttctctcccttgcacctgtacctcttggtctttgaataaagcctgagtaggaaggctagcaaaaaaaaaaaaaaaaaaaaaaaaaaaaaaaaaaaaaaaaaaaaaaaaaaaaaaaaaaaaaaaaaaaaaaaaaaaaaaaa

SEQ ID NO: 3147 - RNA, 5419 nt, synthetic construct
  source 1..5419: mol_type = other RNA
aggaaataagagagaaaagaagagtaagaagaaatataagagccaccatggcccctaagaagaagcgtaaagtgagccgggtgaacggcagcggcagcggcggcggcatgaaccacgaccaggagttcgacccccctaaggtgtaccctcccgtccccgccgagaagagaaagcccatccgggtcctgagcctgttcgatggcatcgccaccggtctgctggtgctgaaggacctgggcatccaggtggataggtacattgcctccgaggtgtgcgaggactccatcaccgtgggaatggtgcgtcatcagggcaagatcatgtacgtgggcgacgtgcggagcgtgacacagaagcatatccaggagtggggccctttcgacctggtgatcggcggcagcccttgcaatgacctgagcatcgtgaacccagcccggaagggcctgtacgagggaaccggcagactgttcttcgagttttacagactgctgcacgacgcccggcctaaggaaggcgacgaccggcccttcttttggctgttcgagaatgtggtggccatgggagtcagcgacaagcgggatattagccggttcctggagagcaaccccgtgatgatcgatgccaaggaagtgagcgccgcccaccgggccagatacttctggggcaatctgcctggcatgaacagacccctggccagcaccgtgaacgacaagctggagctgcaggagtgcctggagcacggccggatcgccaagttcagcaaggtgagaaccatcaccacccgaagcaacagcatcaaacaaggcaaggaccagcactttcctgtgttcatgaacgagaaggaggacatcctgtggtgtaccgagatggagagagtgttcgggttcccagtccactacacagatgtcagcaacatgtctagactggccagacagagactgctgggaagaagctggtccgtccctgtgatcagacacctgttcgcccctctgaaggagtacttcgcctgcgtgagcagcggcaacagcaacgccaacagccggggccccagcttctctagcggcctggtgccactgtccctgagagggagccacatgggccccatggagatctacaaaaccgtgagcgcctggaagcggcagcctgtgcgcgtgctgagcctgtttcggaatatcgataaagtcctgaaaagcctgggattcctggagagcggctctggctccggcggtggcaccctgaagtacgtggaggatgtgacaaacgtggtcagacgggatgtggagaagtggggccccttcgatctggtgtacggcagcacccaacccctgggcagctcttgtgaccggtgccctggctggtacatgtttcagttccaccggatcctgcagtacgccctgccgagacaggagtcccagcggccattcttttggattttcatggacaacttgctgctgaccgaggatgaccaggaaactaccactcggttcctgcagaccgaagccgtgaccctgcaggacgtgagaggccgggactaccagaacgccatgcgggtgtggtccaacatccctggactgaaaagcaagcacgcacctctgacccctaaagaagaggagtacctgcaggcccaggtgcggagcagaagcaagctggacgcccctaaggtggatctgctggtgaagaattgcctcctgcccctgagagagtacttcaagtatttcagccagaatagtctgcccctgggcggcccaagcagcggcgcccctcctcccagcggcggcagcccagccggctccccaacctctaccgaggagggcacctctgagtccgccacccccgagagcggccctggcacctccaccgagcccagcgagggcagcgcacccggcagccctgccggcagccccacctccacagaggagggaaccagcaccgagcccagcgaaggcagcgccccaggcaccagcaccgagcctagtgagggcggctctggcggcggcagcgcccaggagattaaacggatcaacaagatcagaagaagacttgtgaaagacagcaacaccaagaaggccggcaagacaggccccatgaaaaccctgctggttagagtgatgacacccgatctgagagagcggctggaaaacctgagaaagaagcctgaaaatatcccccagcccatcagcaatacatctagagccaacctgaataagctgctgaccgattacaccgaaatgaagaaggcgatcctgcatgtgtactgggaagagttccagaaggaccctgtgggcctgatgagccgggtggcccagcctgccagcaagaagatcgatcagaacaagctgaaacctgagatggacgagaagggcaacctgaccaccgccggctttgcctgctctcagtgtggccagcccctgttcgtgtacaagctggagcaggtgtctgagaagggcaaggcttacaccaactacttcggacggtgcaatgtggccgagcacgaaaagctgatcctgctggcccagctgaagcccgagaaggatagcgacgaagccgtgacatatagcctgggaaagtttgggcagagggccctggatttctacagcattcatgtgaccaaggagtccacccaccccgtgaagcccctggcccagatcgccggaaacagatacgcctccggacctgtgggaaaggccctgagcgacgcatgtatgggcacaatcgcctccttcctgtctaagtaccaggacatcatcatcgaacaccagaaggtggtgaagggcaaccagaagagactggagagcctgcgggagctggccggcaaggaaaacctggaataccctagcgtgaccctgccacctcagcctcacaccaaggagggcgttgatgcctacaacgaagtgatcgcccgggtgcgaatgtgggtgaacctgaacctgtggcagaagctgaagctaagcagagatgatgccaagcctctgctgagactgaagggattcccttcctttcctctggtcgagagacaggccaacgaagtggactggtgggacatggtgtgtaacgtgaagaagctgatcaacgagaaaaaggaggatggcaaggtgttttggcagaatctggctggctacaagagacaggaagccctgagaccatacctgagcagcgaggaagatcggaagaagggaaagaaattcgctcggtaccagctgggcgacctgctgctgcacctggaaaagaagcacggcgaggactggggaaaggtgtacgacgaggcctgggagcggattgacaagaaagtggaaggcctgagcaagcacatcaagctggaagaggaacggagaagcgaggacgcccagagcaaggccgccctgaccgactggctgcgggctaaggccagcttcgtgatcgagggcctgaaggaggccgacaaggacgagttctgcagatgcgagctgaagctgcagaagtggtacggggacctgcggggaaagcccttcgccatcgaagccgagaacagcatcctggacatcagcggcttcagcaagcagtacaactgtgccttcatctggcagaaggacggcgtgaagaagctgaacctgtacctgatcatcaactacttcaagggcggcaagctgcggttcaagaagatcaaacctgaagccttcgaagccaacagattctacaccgtgatcaacaaaaagagcggcgagatcgtgcccatggaggtgaacttcaacttcgacgaccccaacctgatcatcctgcctctggcctttggcaagagacagggcagagaattcatctggaacgacctgctgtccctggaaaccggcagcctgaagctggccaacggaagagtgatcgagaagacactgtacaacagaagaacccggcaggatgagcctgccctgttcgtggccctgaccttcgagcggcgggaggtcctggactcctccaatatcaaaccaatgaacctgatcggcgtggcaagaggcgaaaacatccccgccgtgatcgccctgaccgaccccgagggctgcccactgagccggtttaaggatagcctgggaaacccaacccacatcctgagaatcggcgagagctataaggagaagcagcggaccatccaggccaagaaggaggtggagcagcggagagccggcggctacagccggaagtacgccagcaaagccaagaatctggcagacgatatggtgagaaacaccgctagagatctgctgtactacgccgtgacccaggatgccatgctgatcttcgccaacctgagccggggcttcggccggcagggcaagcggaccttcatggccgagagacagtacacacggatggaggactggctgaccgccaagctggcctacgagggcctgagcaagacctacctgtccaagacactggcccagtacacctccaagacatgcagcaactgtgggtttaccatcaccagcgccgactacgacagggtgctggagaagctgaagaagacagcaacaggctggatgaccacaattaacggcaaggagctgaaggtggagggccagattacctactacaacagatacaagagacagaacgtagtcaaggacctgtccgtcgagctggatagactgagcgaagaatctgtgaacaacgacatctcctcctggacaaagggcagaagcggagaagctctgagcctcctgaagaaaagattctcccatagacccgtgcaggagaagttcgtgtgcctgaactgcggcttcgagacacacgcagccgagcaagccgccctgaacatcgccagatcctggctgttcctgcggagccaggagtacaagaaataccagacaaacaagacaaccggcaacaccgataagagagccttcgtcgagacctggcagtccttttaccggaagaagcttaaggaggtgtggaaacctgccgtgcggtctggcggatctggcggaggctccacaagcatggacaccgtggtgttcgaggacgtggtggtggacttcacccccgaggagtgggccctgctgaaccccgcccagaggaagctgtacagggacgtgatgctggagaccttcaagcacctggccagcgtggacaacgaggcccagctgaaggccagcggcagcatcagccagcaggacaccagcggcgagaagctgagcctgaagcagaagatcgagaagttcaccaggaagaacatctgggccaccagccccaagaaaaagagaaaagtctaagctgccttctgcggggcttgccttctggccatgcccttcttctctcccttgcacctgtacctcttggtctttgaataaagcctgagtaggaaggctagcaaaaaaaaaaaaaaaaaaaaaaaaaaaaaaaaaaaaaaaaaaaaaaaaaaaaaaaaaaaaaaaaaaaaaaaaaaaaaaaa

SEQ ID NO: 3148 - RNA, 5419 nt, synthetic construct
  source 1..5419: mol_type = other RNA
aggaaataagagagaaaagaagagtaagaagaaatataagagccaccatggcccctaagaagaagcgtaaagtgagccgggtgaacggcagcggcagcggcggcggcatgaaccacgaccaggagttcgacccccctaaggtgtaccctcccgtccccgccgagaagagaaagcccatccgggtcctgagcctgttcgatggcatcgccaccggtctgctggtgctgaaggacctgggcatccaggtggataggtacattgcctccgaggtgtgcgaggactccatcaccgtgggaatggtgcgtcatcagggcaagatcatgtacgtgggcgacgtgcggagcgtgacacagaagcatatccaggagtggggccctttcgacctggtgatcggcggcagcccttgcaatgacctgagcatcgtgaacccagcccggaagggcctgtacgagggaaccggcagactgttcttcgagttttacagactgctgcacgacgcccggcctaaggaaggcgacgaccggcccttcttttggctgttcgagaatgtggtggccatgggagtcagcgacaagcgggatattagccggttcctggagagcaaccccgtgatgatcgatgccaaggaagtgagcgccgcccaccgggccagatacttctggggcaatctgcctggcatgaacagacccctggccagcaccgtgaacgacaagctggagctgcaggagtgcctggagcacggccggatcgccaagttcagcaaggtgagaaccatcaccacccgaagcaacagcatcaaacaaggcaaggaccagcactttcctgtgttcatgaacgagaaggaggacatcctgtggtgtaccgagatggagagagtgttcgggttcccagtccactacacagatgtcagcaacatgtctagactggccagacagagactgctgggaagaagctggtccgtccctgtgatcagacacctgttcgcccctctgaaggagtacttcgcctgcgtgagcagcggcaacagcaacgccaacagccggggccccagcttctctagcggcctggtgccactgtccctgagagggagccacatgggccccatggagatctacaaaaccgtgagcgcctggaagcggcagcctgtgcgcgtgctgagcctgtttcggaatatcgataaagtcctgaaaagcctgggattcctggagagcggctctggctccggcggtggcaccctgaagtacgtggaggatgtgacaaacgtggtcagacgggatgtggagaagtggggccccttcgatctggtgtacggcagcacccaacccctgggcagctcttgtgaccggtgccctggctggtacatgtttcagttccaccggatcctgcagtacgccctgccgagacaggagtcccagcggccattcttttggattttcatggacaacttgctgctgaccgaggatgaccaggaaactaccactcggttcctgcagaccgaagccgtgaccctgcaggacgtgagaggccgggactaccagaacgccatgcgggtgtggtccaacatccctggactgaaaagcaagcacgcacctctgacccctaaagaagaggagtacctgcaggcccaggtgcggagcagaagcaagctggacgcccctaaggtggatctgctggtgaagaattgcctcctgcccctgagagagtacttcaagtatttcagccagaatagtctgcccctgggcggcccaagcagcggcgcccctcctcccagcggcggcagcccagccggctccccaacctctaccgaggagggcacctctgagtccgccacccccgagagcggccctggcacctccaccgagcccagcgagggcagcgcacccggcagccctgccggcagccccacctccacagaggagggaaccagcaccgagcccagcgaaggcagcgccccaggcaccagcaccgagcctagtgagggcggctctggcggcggcagcgcccaggagattaaacggatcaacaagatcagaagaagacttgtgaaagacagcaacaccaagaaggccggcaagacaggccccatgaaaaccctgctggttagagtgatgacacccgatctgagagagcggctggaaaacctgagaaagaagcctgaaaatatcccccagcccatcagcaatacatctagagccaacctgaataagctgctgaccgattacaccgaaatgaagaaggcgatcctgcatgtgtactgggaagagttccagaaggaccctgtgggcctgatgagccgggtggcccagcctgccagcaagaagatcgatcagaacaagctgaaacctgagatggacgagaagggcaacctgaccaccgccggctttgcctgctctcagtgtggccagcccctgttcgtgtacaagctggagcaggtgtctgagaagggcaaggcttacaccaactacttcggacggtgcaatgtggccgagcacgaaaagctgatcctgctggcccagctgaagcccgagaaggatagcgacgaagccgtgacatatagcctgggaaagtttgggcagagggccctggatttctacagcattcatgtgaccaaggagtccacccaccccgtgaagcccctggcccagatcgccggaaacagatacgcctccggacctgtgggaaaggccctgagcgacgcatgtatgggcacaatcgcctccttcctgtctaagtaccaggacatcatcatcgaacaccagaaggtggtgaagggcaaccagaagagactggagagcctgcgggagctggccggcaaggaaaacctggaataccctagcgtgaccctgccacctcagcctcacaccaaggagggcgttgatgcctacaacgaagtgatcgcccgggtgcgaatgtgggtgaacctgaacctgtggcagaagctgaagctaagcagagatgatgccaagcctctgctgagactgaagggattcccttcctttcctctggtcgagagacaggccaacgaagtggactggtgggacatggtgtgtaacgtgaagaagctgatcaacgagaaaaaggaggatggcaaggtgttttggcagaatctggctggctacaagagacaggaagccctgagaccatacctgagcagcgaggaagatcggaagaagggaaagaaattcgctcggtaccagctgggcgacctgctgctgcacctggaaaagaagcacggcgaggactggggaaaggtgtacgacgaggcctgggagcggattgacaagaaagtggaaggcctgagcaagcacatcaagctggaagaggaacggagaagcgaggacgcccagagcaaggccgccctgaccgactggctgcgggctaaggccagcttcgtgatcgagggcctgaaggaggccgacaaggacgagttctgcagatgcgagctgaagctgcagaagtggtacggggacctgcggggaaagcccttcgccatcgaagccgagaacagcatcctggacatcagcggcttcagcaagcagtacaactgtgccttcatctggcagaaggacggcgtgaagaagctgaacctgtacctgatcatcaactacttcaagggcggcaagctgcggttcaagaagatcaaacctgaagccttcgaagccaacagattctacaccgtgatcaacaaaaagagcggcgagatcgtgcccatggaggtgaacttcaacttcgacgaccccaacctgatcatcctgcctctggcctttggcaagagacagggcagagaattcatctggaacgacctgctgtccctggaaaccggcagcctgaagctggccaacggaagagtgatcgagaagacactgtacaacagaagaacccggcaggatgagcctgccctgttcgtggccctgaccttcgagcggcgggaggtcctggactcctccaatatcaaaccaatgaacctgatcggcgtggcaagaggcgaaaacatccccgccgtgatcgccctgaccgaccccgagggctgcccactgagccggtttaaggatagcctgggaaacccaacccacatcctgagaatcggcgagagctataaggagaagcagcggaccatccaggccaagaaggaggtggagcagcggagagccggcggctacagccggaagtacgccagcaaagccaagaatctggcagacgatatggtgagaaacaccgctagagatctgctgtactacgccgtgacccaggatgccatgctgatcttcgccaacctgagccggggcttcggccggcagggcaagcggaccttcatggccgagagacagtacacacggatggaggactggctgaccgccaagctggcctacgagggcctgagcaagacctacctgtccaagacactggcccagtacacctccaagacatgcagcaactgtgggtttaccatcaccagcgccgactacgacagggtgctggagaagctgaagaagacagcaacaggctggatgaccacaattaacggcaaggagctgaaggtggagggccagattacctactacaacagatacaagagacagaacgtagtcaaggacctgtccgtcgagctggatagactgagcgaagaatctgtgaacaacgacatctcctcctggacaaagggcagaagcggagaagctctgagcctcctgaagaaaagattctcccatagacccgtgcaggagaagttcgtgtgcctgaactgcggcttcgagacacacgcagccgagcaagccgccctgaacatcgccagatcctggctgttcctgcggagccaggagtacaagaaataccagacaaacaagacaaccggcaacaccgataagagagccttcgtcgagacctggcagtccttttaccggaagaagcttaaggaggtgtggaaacctgccgtgcggtctggcggatctggcggaggctccacaagcgagagcctgaccctggaggacgtggccgtggagttcacctgggaggagtggcagctgctgggccccgcccagaaggacctgtactgggacgtgatgctggagaactacaaccacctggtgagcctgggctaccaggccagcaagcccgacgccctgagcaagctggcccagggcgaggagccctgcgtgatcgagggcaagatccagaacaggaactgccccggcatcaggaaggccgacagcaccagccccaagaaaaagagaaaagtctaagctgccttctgcggggcttgccttctggccatgcccttcttctctcccttgcacctgtacctcttggtctttgaataaagcctgagtaggaaggctagcaaaaaaaaaaaaaaaaaaaaaaaaaaaaaaaaaaaaaaaaaaaaaaaaaaaaaaaaaaaaaaaaaaaaaaaaaaaaaaaa

SEQ ID NO: 3149 - RNA, 5419 nt, synthetic construct
  source 1..5419: mol_type = other RNA
aggaaataagagagaaaagaagagtaagaagaaatataagagccaccatggcccctaagaagaagcgtaaagtgagccgggtgaacggcagcggcagcggcggcggcatgaaccacgaccaggagttcgacccccctaaggtgtaccctcccgtccccgccgagaagagaaagcccatccgggtcctgagcctgttcgatggcatcgccaccggtctgctggtgctgaaggacctgggcatccaggtggataggtacattgcctccgaggtgtgcgaggactccatcaccgtgggaatggtgcgtcatcagggcaagatcatgtacgtgggcgacgtgcggagcgtgacacagaagcatatccaggagtggggccctttcgacctggtgatcggcggcagcccttgcaatgacctgagcatcgtgaacccagcccggaagggcctgtacgagggaaccggcagactgttcttcgagttttacagactgctgcacgacgcccggcctaaggaaggcgacgaccggcccttcttttggctgttcgagaatgtggtggccatgggagtcagcgacaagcgggatattagccggttcctggagagcaaccccgtgatgatcgatgccaaggaagtgagcgccgcccaccgggccagatacttctggggcaatctgcctggcatgaacagacccctggccagcaccgtgaacgacaagctggagctgcaggagtgcctggagcacggccggatcgccaagttcagcaaggtgagaaccatcaccacccgaagcaacagcatcaaacaaggcaaggaccagcactttcctgtgttcatgaacgagaaggaggacatcctgtggtgtaccgagatggagagagtgttcgggttcccagtccactacacagatgtcagcaacatgtctagactggccagacagagactgctgggaagaagctggtccgtccctgtgatcagacacctgttcgcccctctgaaggagtacttcgcctgcgtgagcagcggcaacagcaacgccaacagccggggccccagcttctctagcggcctggtgccactgtccctgagagggagccacatgggccccatggagatctacaaaaccgtgagcgcctggaagcggcagcctgtgcgcgtgctgagcctgtttcggaatatcgataaagtcctgaaaagcctgggattcctggagagcggctctggctccggcggtggcaccctgaagtacgtggaggatgtgacaaacgtggtcagacgggatgtggagaagtggggccccttcgatctggtgtacggcagcacccaacccctgggcagctcttgtgaccggtgccctggctggtacatgtttcagttccaccggatcctgcagtacgccctgccgagacaggagtcccagcggccattcttttggattttcatggacaacttgctgctgaccgaggatgaccaggaaactaccactcggttcctgcagaccgaagccgtgaccctgcaggacgtgagaggccgggactaccagaacgccatgcgggtgtggtccaacatccctggactgaaaagcaagcacgcacctctgacccctaaagaagaggagtacctgcaggcccaggtgcggagcagaagcaagctggacgcccctaaggtggatctgctggtgaagaattgcctcctgcccctgagagagtacttcaagtatttcagccagaatagtctgcccctgggcggcccaagcagcggcgcccctcctcccagcggcggcagcccagccggctccccaacctctaccgaggagggcacctctgagtccgccacccccgagagcggccctggcacctccaccgagcccagcgagggcagcgcacccggcagccctgccggcagccccacctccacagaggagggaaccagcaccgagcccagcgaaggcagcgccccaggcaccagcaccgagcctagtgagggcggctctggcggcggcagcgcccaggagattaaacggatcaacaagatcagaagaagacttgtgaaagacagcaacaccaagaaggccggcaagacaggccccatgaaaaccctgctggttagagtgatgacacccgatctgagagagcggctggaaaacctgagaaagaagcctgaaaatatcccccagcccatcagcaatacatctagagccaacctgaataagctgctgaccgattacaccgaaatgaagaaggcgatcctgcatgtgtactgggaagagttccagaaggaccctgtgggcctgatgagccgggtggcccagcctgccagcaagaagatcgatcagaacaagctgaaacctgagatggacgagaagggcaacctgaccaccgccggctttgcctgctctcagtgtggccagcccctgttcgtgtacaagctggagcaggtgtctgagaagggcaaggcttacaccaactacttcggacggtgcaatgtggccgagcacgaaaagctgatcctgctggcccagctgaagcccgagaaggatagcgacgaagccgtgacatatagcctgggaaagtttgggcagagggccctggatttctacagcattcatgtgaccaaggagtccacccaccccgtgaagcccctggcccagatcgccggaaacagatacgcctccggacctgtgggaaaggccctgagcgacgcatgtatgggcacaatcgcctccttcctgtctaagtaccaggacatcatcatcgaacaccagaaggtggtgaagggcaaccagaagagactggagagcctgcgggagctggccggcaaggaaaacctggaataccctagcgtgaccctgccacctcagcctcacaccaaggagggcgttgatgcctacaacgaagtgatcgcccgggtgcgaatgtgggtgaacctgaacctgtggcagaagctgaagctaagcagagatgatgccaagcctctgctgagactgaagggattcccttcctttcctctggtcgagagacaggccaacgaagtggactggtgggacatggtgtgtaacgtgaagaagctgatcaacgagaaaaaggaggatggcaaggtgttttggcagaatctggctggctacaagagacaggaagccctgagaccatacctgagcagcgaggaagatcggaagaagggaaagaaattcgctcggtaccagctgggcgacctgctgctgcacctggaaaagaagcacggcgaggactggggaaaggtgtacgacgaggcctgggagcggattgacaagaaagtggaaggcctgagcaagcacatcaagctggaagaggaacggagaagcgaggacgcccagagcaaggccgccctgaccgactggctgcgggctaaggccagcttcgtgatcgagggcctgaaggaggccgacaaggacgagttctgcagatgcgagctgaagctgcagaagtggtacggggacctgcggggaaagcccttcgccatcgaagccgagaacagcatcctggacatcagcggcttcagcaagcagtacaactgtgccttcatctggcagaaggacggcgtgaagaagctgaacctgtacctgatcatcaactacttcaagggcggcaagctgcggttcaagaagatcaaacctgaagccttcgaagccaacagattctacaccgtgatcaacaaaaagagcggcgagatcgtgcccatggaggtgaacttcaacttcgacgaccccaacctgatcatcctgcctctggcctttggcaagagacagggcagagaattcatctggaacgacctgctgtccctggaaaccggcagcctgaagctggccaacggaagagtgatcgagaagacactgtacaacagaagaacccggcaggatgagcctgccctgttcgtggccctgaccttcgagcggcgggaggtcctggactcctccaatatcaaaccaatgaacctgatcggcgtggcaagaggcgaaaacatccccgccgtgatcgccctgaccgaccccgagggctgcccactgagccggtttaaggatagcctgggaaacccaacccacatcctgagaatcggcgagagctataaggagaagcagcggaccatccaggccaagaaggaggtggagcagcggagagccggcggctacagccggaagtacgccagcaaagccaagaatctggcagacgatatggtgagaaacaccgctagagatctgctgtactacgccgtgacccaggatgccatgctgatcttcgccaacctgagccggggcttcggccggcagggcaagcggaccttcatggccgagagacagtacacacggatggaggactggctgaccgccaagctggcctacgagggcctgagcaagacctacctgtccaagacactggcccagtacacctccaagacatgcagcaactgtgggtttaccatcaccagcgccgactacgacagggtgctggagaagctgaagaagacagcaacaggctggatgaccacaattaacggcaaggagctgaaggtggagggccagattacctactacaacagatacaagagacagaacgtagtcaaggacctgtccgtcgagctggatagactgagcgaagaatctgtgaacaacgacatctcctcctggacaaagggcagaagcggagaagctctgagcctcctgaagaaaagattctcccatagacccgtgcaggagaagttcgtgtgcctgaactgcggcttcgagacacacgcagccgagcaagccgccctgaacatcgccagatcctggctgttcctgcggagccaggagtacaagaaataccagacaaacaagacaaccggcaacaccgataagagagccttcgtcgagacctggcagtccttttaccggaagaagcttaaggaggtgtggaaacctgccgtgcggtctggcggatctggcggaggctccacaagcatgaccctgctgaccttcagggacgtggccatcgagttcagcctggaggagtggaagtgcctggacctggcccagcagaacctgtacagggacgtgatgctggagaactacaggaacctgttcagcgtgggcctgaccgtgagcaagcccggcctgatcacctgcctggagcagaggaaggagccctggaacgtgaagaggcaggaggccgccgacggccaccccggctggagcgccgtggtgaccagccccaagaaaaagagaaaagtctaagctgccttctgcggggcttgccttctggccatgcccttcttctctcccttgcacctgtacctcttggtctttgaataaagcctgagtaggaaggctagcaaaaaaaaaaaaaaaaaaaaaaaaaaaaaaaaaaaaaaaaaaaaaaaaaaaaaaaaaaaaaaaaaaaaaaaaaaaaaaaa

SEQ ID NO: 3150 - RNA, 5419 nt, synthetic construct
  source 1..5419: mol_type = other RNA
aggaaataagagagaaaagaagagtaagaagaaatataagagccaccatggcccctaagaagaagcgtaaagtgagccgggtgaacggcagcggcagcggcggcggcatgaaccacgaccaggagttcgacccccctaaggtgtaccctcccgtccccgccgagaagagaaagcccatccgggtcctgagcctgttcgatggcatcgccaccggtctgctggtgctgaaggacctgggcatccaggtggataggtacattgcctccgaggtgtgcgaggactccatcaccgtgggaatggtgcgtcatcagggcaagatcatgtacgtgggcgacgtgcggagcgtgacacagaagcatatccaggagtggggccctttcgacctggtgatcggcggcagcccttgcaatgacctgagcatcgtgaacccagcccggaagggcctgtacgagggaaccggcagactgttcttcgagttttacagactgctgcacgacgcccggcctaaggaaggcgacgaccggcccttcttttggctgttcgagaatgtggtggccatgggagtcagcgacaagcgggatattagccggttcctggagagcaaccccgtgatgatcgatgccaaggaagtgagcgccgcccaccgggccagatacttctggggcaatctgcctggcatgaacagacccctggccagcaccgtgaacgacaagctggagctgcaggagtgcctggagcacggccggatcgccaagttcagcaaggtgagaaccatcaccacccgaagcaacagcatcaaacaaggcaaggaccagcactttcctgtgttcatgaacgagaaggaggacatcctgtggtgtaccgagatggagagagtgttcgggttcccagtccactacacagatgtcagcaacatgtctagactggccagacagagactgctgggaagaagctggtccgtccctgtgatcagacacctgttcgcccctctgaaggagtacttcgcctgcgtgagcagcggcaacagcaacgccaacagccggggccccagcttctctagcggcctggtgccactgtccctgagagggagccacatgggccccatggagatctacaaaaccgtgagcgcctggaagcggcagcctgtgcgcgtgctgagcctgtttcggaatatcgataaagtcctgaaaagcctgggattcctggagagcggctctggctccggcggtggcaccctgaagtacgtggaggatgtgacaaacgtggtcagacgggatgtggagaagtggggccccttcgatctggtgtacggcagcacccaacccctgggcagctcttgtgaccggtgccctggctggtacatgtttcagttccaccggatcctgcagtacgccctgccgagacaggagtcccagcggccattcttttggattttcatggacaacttgctgctgaccgaggatgaccaggaaactaccactcggttcctgcagaccgaagccgtgaccctgcaggacgtgagaggccgggactaccagaacgccatgcgggtgtggtccaacatccctggactgaaaagcaagcacgcacctctgacccctaaagaagaggagtacctgcaggcccaggtgcggagcagaagcaagctggacgcccctaaggtggatctgctggtgaagaattgcctcctgcccctgagagagtacttcaagtatttcagccagaatagtctgcccctgggcggcccaagcagcggcgcccctcctcccagcggcggcagcccagccggctccccaacctctaccgaggagggcacctctgagtccgccacccccgagagcggccctggcacctccaccgagcccagcgagggcagcgcacccggcagccctgccggcagccccacctccacagaggagggaaccagcaccgagcccagcgaaggcagcgccccaggcaccagcaccgagcctagtgagggcggctctggcggcggcagcgcccaggagattaaacggatcaacaagatcagaagaagacttgtgaaagacagcaacaccaagaaggccggcaagacaggccccatgaaaaccctgctggttagagtgatgacacccgatctgagagagcggctggaaaacctgagaaagaagcctgaaaatatcccccagcccatcagcaatacatctagagccaacctgaataagctgctgaccgattacaccgaaatgaagaaggcgatcctgcatgtgtactgggaagagttccagaaggaccctgtgggcctgatgagccgggtggcccagcctgccagcaagaagatcgatcagaacaagctgaaacctgagatggacgagaagggcaacctgaccaccgccggctttgcctgctctcagtgtggccagcccctgttcgtgtacaagctggagcaggtgtctgagaagggcaaggcttacaccaactacttcggacggtgcaatgtggccgagcacgaaaagctgatcctgctggcccagctgaagcccgagaaggatagcgacgaagccgtgacatatagcctgggaaagtttgggcagagggccctggatttctacagcattcatgtgaccaaggagtccacccaccccgtgaagcccctggcccagatcgccggaaacagatacgcctccggacctgtgggaaaggccctgagcgacgcatgtatgggcacaatcgcctccttcctgtctaagtaccaggacatcatcatcgaacaccagaaggtggtgaagggcaaccagaagagactggagagcctgcgggagctggccggcaaggaaaacctggaataccctagcgtgaccctgccacctcagcctcacaccaaggagggcgttgatgcctacaacgaagtgatcgcccgggtgcgaatgtgggtgaacctgaacctgtggcagaagctgaagctaagcagagatgatgccaagcctctgctgagactgaagggattcccttcctttcctctggtcgagagacaggccaacgaagtggactggtgggacatggtgtgtaacgtgaagaagctgatcaacgagaaaaaggaggatggcaaggtgttttggcagaatctggctggctacaagagacaggaagccctgagaccatacctgagcagcgaggaagatcggaagaagggaaagaaattcgctcggtaccagctgggcgacctgctgctgcacctggaaaagaagcacggcgaggactggggaaaggtgtacgacgaggcctgggagcggattgacaagaaagtggaaggcctgagcaagcacatcaagctggaagaggaacggagaagcgaggacgcccagagcaaggccgccctgaccgactggctgcgggctaaggccagcttcgtgatcgagggcctgaaggaggccgacaaggacgagttctgcagatgcgagctgaagctgcagaagtggtacggggacctgcggggaaagcccttcgccatcgaagccgagaacagcatcctggacatcagcggcttcagcaagcagtacaactgtgccttcatctggcagaaggacggcgtgaagaagctgaacctgtacctgatcatcaactacttcaagggcggcaagctgcggttcaagaagatcaaacctgaagccttcgaagccaacagattctacaccgtgatcaacaaaaagagcggcgagatcgtgcccatggaggtgaacttcaacttcgacgaccccaacctgatcatcctgcctctggcctttggcaagagacagggcagagaattcatctggaacgacctgctgtccctggaaaccggcagcctgaagctggccaacggaagagtgatcgagaagacactgtacaacagaagaacccggcaggatgagcctgccctgttcgtggccctgaccttcgagcggcgggaggtcctggactcctccaatatcaaaccaatgaacctgatcggcgtggcaagaggcgaaaacatccccgccgtgatcgccctgaccgaccccgagggctgcccactgagccggtttaaggatagcctgggaaacccaacccacatcctgagaatcggcgagagctataaggagaagcagcggaccatccaggccaagaaggaggtggagcagcggagagccggcggctacagccggaagtacgccagcaaagccaagaatctggcagacgatatggtgagaaacaccgctagagatctgctgtactacgccgtgacccaggatgccatgctgatcttcgccaacctgagccggggcttcggccggcagggcaagcggaccttcatggccgagagacagtacacacggatggaggactggctgaccgccaagctggcctacgagggcctgagcaagacctacctgtccaagacactggcccagtacacctccaagacatgcagcaactgtgggtttaccatcaccagcgccgactacgacagggtgctggagaagctgaagaagacagcaacaggctggatgaccacaattaacggcaaggagctgaaggtggagggccagattacctactacaacagatacaagagacagaacgtagtcaaggacctgtccgtcgagctggatagactgagcgaagaatctgtgaacaacgacatctcctcctggacaaagggcagaagcggagaagctctgagcctcctgaagaaaagattctcccatagacccgtgcaggagaagttcgtgtgcctgaactgcggcttcgagacacacgcagccgagcaagccgccctgaacatcgccagatcctggctgttcctgcggagccaggagtacaagaaataccagacaaacaagacaaccggcaacaccgataagagagccttcgtcgagacctggcagtccttttaccggaagaagcttaaggaggtgtggaaacctgccgtgcggtctggcggatctggcggaggctccacaagcagccaggagctgctgaccttcaaggacgtgagcgtggacttcacccaggaggagtggggccagctggcccccgcccacaggaacctgtacagggaggtgatgctggagaactacggcaacctggtgagcgtgggctgccagctgagcaagcccggcgtgatcagccagctggagaagggcgaggagccctggctgatggagagggacatcagcggcgtgcccagcagcgacctgaagagcaagaccagccccaagaaaaagagaaaagtctaagctgccttctgcggggcttgccttctggccatgcccttcttctctcccttgcacctgtacctcttggtctttgaataaagcctgagtaggaaggctagcaaaaaaaaaaaaaaaaaaaaaaaaaaaaaaaaaaaaaaaaaaaaaaaaaaaaaaaaaaaaaaaaaaaaaaaaaaaaaaaa

SEQ ID NO: 3151 - RNA, 5419 nt, synthetic construct
  source 1..5419: mol_type = other RNA
aggaaataagagagaaaagaagagtaagaagaaatataagagccaccatggcccctaagaagaagcgtaaagtgagccgggtgaacggcagcggcagcggcggcggcatgaaccacgaccaggagttcgacccccctaaggtgtaccctcccgtccccgccgagaagagaaagcccatccgggtcctgagcctgttcgatggcatcgccaccggtctgctggtgctgaaggacctgggcatccaggtggataggtacattgcctccgaggtgtgcgaggactccatcaccgtgggaatggtgcgtcatcagggcaagatcatgtacgtgggcgacgtgcggagcgtgacacagaagcatatccaggagtggggccctttcgacctggtgatcggcggcagcccttgcaatgacctgagcatcgtgaacccagcccggaagggcctgtacgagggaaccggcagactgttcttcgagttttacagactgctgcacgacgcccggcctaaggaaggcgacgaccggcccttcttttggctgttcgagaatgtggtggccatgggagtcagcgacaagcgggatattagccggttcctggagagcaaccccgtgatgatcgatgccaaggaagtgagcgccgcccaccgggccagatacttctggggcaatctgcctggcatgaacagacccctggccagcaccgtgaacgacaagctggagctgcaggagtgcctggagcacggccggatcgccaagttcagcaaggtgagaaccatcaccacccgaagcaacagcatcaaacaaggcaaggaccagcactttcctgtgttcatgaacgagaaggaggacatcctgtggtgtaccgagatggagagagtgttcgggttcccagtccactacacagatgtcagcaacatgtctagactggccagacagagactgctgggaagaagctggtccgtccctgtgatcagacacctgttcgcccctctgaaggagtacttcgcctgcgtgagcagcggcaacagcaacgccaacagccggggccccagcttctctagcggcctggtgccactgtccctgagagggagccacatgggccccatggagatctacaaaaccgtgagcgcctggaagcggcagcctgtgcgcgtgctgagcctgtttcggaatatcgataaagtcctgaaaagcctgggattcctggagagcggctctggctccggcggtggcaccctgaagtacgtggaggatgtgacaaacgtggtcagacgggatgtggagaagtggggccccttcgatctggtgtacggcagcacccaacccctgggcagctcttgtgaccggtgccctggctggtacatgtttcagttccaccggatcctgcagtacgccctgccgagacaggagtcccagcggccattcttttggattttcatggacaacttgctgctgaccgaggatgaccaggaaactaccactcggttcctgcagaccgaagccgtgaccctgcaggacgtgagaggccgggactaccagaacgccatgcgggtgtggtccaacatccctggactgaaaagcaagcacgcacctctgacccctaaagaagaggagtacctgcaggcccaggtgcggagcagaagcaagctggacgcccctaaggtggatctgctggtgaagaattgcctcctgcccctgagagagtacttcaagtatttcagccagaatagtctgcccctgggcggcccaagcagcggcgcccctcctcccagcggcggcagcccagccggctccccaacctctaccgaggagggcacctctgagtccgccacccccgagagcggccctggcacctccaccgagcccagcgagggcagcgcacccggcagccctgccggcagccccacctccacagaggagggaaccagcaccgagcccagcgaaggcagcgccccaggcaccagcaccgagcctagtgagggcggctctggcggcggcagcgcccaggagattaaacggatcaacaagatcagaagaagacttgtgaaagacagcaacaccaagaaggccggcaagacaggccccatgaaaaccctgctggttagagtgatgacacccgatctgagagagcggctggaaaacctgagaaagaagcctgaaaatatcccccagcccatcagcaatacatctagagccaacctgaataagctgctgaccgattacaccgaaatgaagaaggcgatcctgcatgtgtactgggaagagttccagaaggaccctgtgggcctgatgagccgggtggcccagcctgccagcaagaagatcgatcagaacaagctgaaacctgagatggacgagaagggcaacctgaccaccgccggctttgcctgctctcagtgtggccagcccctgttcgtgtacaagctggagcaggtgtctgagaagggcaaggcttacaccaactacttcggacggtgcaatgtggccgagcacgaaaagctgatcctgctggcccagctgaagcccgagaaggatagcgacgaagccgtgacatatagcctgggaaagtttgggcagagggccctggatttctacagcattcatgtgaccaaggagtccacccaccccgtgaagcccctggcccagatcgccggaaacagatacgcctccggacctgtgggaaaggccctgagcgacgcatgtatgggcacaatcgcctccttcctgtctaagtaccaggacatcatcatcgaacaccagaaggtggtgaagggcaaccagaagagactggagagcctgcgggagctggccggcaaggaaaacctggaataccctagcgtgaccctgccacctcagcctcacaccaaggagggcgttgatgcctacaacgaagtgatcgcccgggtgcgaatgtgggtgaacctgaacctgtggcagaagctgaagctaagcagagatgatgccaagcctctgctgagactgaagggattcccttcctttcctctggtcgagagacaggccaacgaagtggactggtgggacatggtgtgtaacgtgaagaagctgatcaacgagaaaaaggaggatggcaaggtgttttggcagaatctggctggctacaagagacaggaagccctgagaccatacctgagcagcgaggaagatcggaagaagggaaagaaattcgctcggtaccagctgggcgacctgctgctgcacctggaaaagaagcacggcgaggactggggaaaggtgtacgacgaggcctgggagcggattgacaagaaagtggaaggcctgagcaagcacatcaagctggaagaggaacggagaagcgaggacgcccagagcaaggccgccctgaccgactggctgcgggctaaggccagcttcgtgatcgagggcctgaaggaggccgacaaggacgagttctgcagatgcgagctgaagctgcagaagtggtacggggacctgcggggaaagcccttcgccatcgaagccgagaacagcatcctggacatcagcggcttcagcaagcagtacaactgtgccttcatctggcagaaggacggcgtgaagaagctgaacctgtacctgatcatcaactacttcaagggcggcaagctgcggttcaagaagatcaaacctgaagccttcgaagccaacagattctacaccgtgatcaacaaaaagagcggcgagatcgtgcccatggaggtgaacttcaacttcgacgaccccaacctgatcatcctgcctctggcctttggcaagagacagggcagagaattcatctggaacgacctgctgtccctggaaaccggcagcctgaagctggccaacggaagagtgatcgagaagacactgtacaacagaagaacccggcaggatgagcctgccctgttcgtggccctgaccttcgagcggcgggaggtcctggactcctccaatatcaaaccaatgaacctgatcggcgtggcaagaggcgaaaacatccccgccgtgatcgccctgaccgaccccgagggctgcccactgagccggtttaaggatagcctgggaaacccaacccacatcctgagaatcggcgagagctataaggagaagcagcggaccatccaggccaagaaggaggtggagcagcggagagccggcggctacagccggaagtacgccagcaaagccaagaatctggcagacgatatggtgagaaacaccgctagagatctgctgtactacgccgtgacccaggatgccatgctgatcttcgccaacctgagccggggcttcggccggcagggcaagcggaccttcatggccgagagacagtacacacggatggaggactggctgaccgccaagctggcctacgagggcctgagcaagacctacctgtccaagacactggcccagtacacctccaagacatgcagcaactgtgggtttaccatcaccagcgccgactacgacagggtgctggagaagctgaagaagacagcaacaggctggatgaccacaattaacggcaaggagctgaaggtggagggccagattacctactacaacagatacaagagacagaacgtagtcaaggacctgtccgtcgagctggatagactgagcgaagaatctgtgaacaacgacatctcctcctggacaaagggcagaagcggagaagctctgagcctcctgaagaaaagattctcccatagacccgtgcaggagaagttcgtgtgcctgaactgcggcttcgagacacacgcagccgagcaagccgccctgaacatcgccagatcctggctgttcctgcggagccaggagtacaagaaataccagacaaacaagacaaccggcaacaccgataagagagccttcgtcgagacctggcagtccttttaccggaagaagcttaaggaggtgtggaaacctgccgtgcggtctggcggatctggcggaggctccacaagcatggccaacgccaccggcagcggcgtggagcagaagttccagggcagcgtgagcttcaaggacgtgaccgtgggcttcacccaggaggagtggcagcacctggaccccagccagagggccctgtacagggacgtgatgctggagaactacagcaacctggtgagcgtgggctactgcgtgcacaagcccgaggtgatcttcaggctggagcagggcgaggagccctggaagctggaggaggagaccagccccaagaaaaagagaaaagtctaagctgccttctgcggggcttgccttctggccatgcccttcttctctcccttgcacctgtacctcttggtctttgaataaagcctgagtaggaaggctagcaaaaaaaaaaaaaaaaaaaaaaaaaaaaaaaaaaaaaaaaaaaaaaaaaaaaaaaaaaaaaaaaaaaaaaaaaaaaaaaa

SEQ ID NO: 3152 - RNA, 5419 nt, synthetic construct
  source 1..5419: mol_type = other RNA
aggaaataagagagaaaagaagagtaagaagaaatataagagccaccatggcccctaagaagaagcgtaaagtgagccgggtgaacggcagcggcagcggcggcggcatgaaccacgaccaggagttcgacccccctaaggtgtaccctcccgtccccgccgagaagagaaagcccatccgggtcctgagcctgttcgatggcatcgccaccggtctgctggtgctgaaggacctgggcatccaggtggataggtacattgcctccgaggtgtgcgaggactccatcaccgtgggaatggtgcgtcatcagggcaagatcatgtacgtgggcgacgtgcggagcgtgacacagaagcatatccaggagtggggccctttcgacctggtgatcggcggcagcccttgcaatgacctgagcatcgtgaacccagcccggaagggcctgtacgagggaaccggcagactgttcttcgagttttacagactgctgcacgacgcccggcctaaggaaggcgacgaccggcccttcttttggctgttcgagaatgtggtggccatgggagtcagcgacaagcgggatattagccggttcctggagagcaaccccgtgatgatcgatgccaaggaagtgagcgccgcccaccgggccagatacttctggggcaatctgcctggcatgaacagacccctggccagcaccgtgaacgacaagctggagctgcaggagtgcctggagcacggccggatcgccaagttcagcaaggtgagaaccatcaccacccgaagcaacagcatcaaacaaggcaaggaccagcactttcctgtgttcatgaacgagaaggaggacatcctgtggtgtaccgagatggagagagtgttcgggttcccagtccactacacagatgtcagcaacatgtctagactggccagacagagactgctgggaagaagctggtccgtccctgtgatcagacacctgttcgcccctctgaaggagtacttcgcctgcgtgagcagcggcaacagcaacgccaacagccggggccccagcttctctagcggcctggtgccactgtccctgagagggagccacatgggccccatggagatctacaaaaccgtgagcgcctggaagcggcagcctgtgcgcgtgctgagcctgtttcggaatatcgataaagtcctgaaaagcctgggattcctggagagcggctctggctccggcggtggcaccctgaagtacgtggaggatgtgacaaacgtggtcagacgggatgtggagaagtggggccccttcgatctggtgtacggcagcacccaacccctgggcagctcttgtgaccggtgccctggctggtacatgtttcagttccaccggatcctgcagtacgccctgccgagacaggagtcccagcggccattcttttggattttcatggacaacttgctgctgaccgaggatgaccaggaaactaccactcggttcctgcagaccgaagccgtgaccctgcaggacgtgagaggccgggactaccagaacgccatgcgggtgtggtccaacatccctggactgaaaagcaagcacgcacctctgacccctaaagaagaggagtacctgcaggcccaggtgcggagcagaagcaagctggacgcccctaaggtggatctgctggtgaagaattgcctcctgcccctgagagagtacttcaagtatttcagccagaatagtctgcccctgggcggcccaagcagcggcgcccctcctcccagcggcggcagcccagccggctccccaacctctaccgaggagggcacctctgagtccgccacccccgagagcggccctggcacctccaccgagcccagcgagggcagcgcacccggcagccctgccggcagccccacctccacagaggagggaaccagcaccgagcccagcgaaggcagcgccccaggcaccagcaccgagcctagtgagggcggctctggcggcggcagcgcccaggagattaaacggatcaacaagatcagaagaagacttgtgaaagacagcaacaccaagaaggccggcaagacaggccccatgaaaaccctgctggttagagtgatgacacccgatctgagagagcggctggaaaacctgagaaagaagcctgaaaatatcccccagcccatcagcaatacatctagagccaacctgaataagctgctgaccgattacaccgaaatgaagaaggcgatcctgcatgtgtactgggaagagttccagaaggaccctgtgggcctgatgagccgggtggcccagcctgccagcaagaagatcgatcagaacaagctgaaacctgagatggacgagaagggcaacctgaccaccgccggctttgcctgctctcagtgtggccagcccctgttcgtgtacaagctggagcaggtgtctgagaagggcaaggcttacaccaactacttcggacggtgcaatgtggccgagcacgaaaagctgatcctgctggcccagctgaagcccgagaaggatagcgacgaagccgtgacatatagcctgggaaagtttgggcagagggccctggatttctacagcattcatgtgaccaaggagtccacccaccccgtgaagcccctggcccagatcgccggaaacagatacgcctccggacctgtgggaaaggccctgagcgacgcatgtatgggcacaatcgcctccttcctgtctaagtaccaggacatcatcatcgaacaccagaaggtggtgaagggcaaccagaagagactggagagcctgcgggagctggccggcaaggaaaacctggaataccctagcgtgaccctgccacctcagcctcacaccaaggagggcgttgatgcctacaacgaagtgatcgcccgggtgcgaatgtgggtgaacctgaacctgtggcagaagctgaagctaagcagagatgatgccaagcctctgctgagactgaagggattcccttcctttcctctggtcgagagacaggccaacgaagtggactggtgggacatggtgtgtaacgtgaagaagctgatcaacgagaaaaaggaggatggcaaggtgttttggcagaatctggctggctacaagagacaggaagccctgagaccatacctgagcagcgaggaagatcggaagaagggaaagaaattcgctcggtaccagctgggcgacctgctgctgcacctggaaaagaagcacggcgaggactggggaaaggtgtacgacgaggcctgggagcggattgacaagaaagtggaaggcctgagcaagcacatcaagctggaagaggaacggagaagcgaggacgcccagagcaaggccgccctgaccgactggctgcgggctaaggccagcttcgtgatcgagggcctgaaggaggccgacaaggacgagttctgcagatgcgagctgaagctgcagaagtggtacggggacctgcggggaaagcccttcgccatcgaagccgagaacagcatcctggacatcagcggcttcagcaagcagtacaactgtgccttcatctggcagaaggacggcgtgaagaagctgaacctgtacctgatcatcaactacttcaagggcggcaagctgcggttcaagaagatcaaacctgaagccttcgaagccaacagattctacaccgtgatcaacaaaaagagcggcgagatcgtgcccatggaggtgaacttcaacttcgacgaccccaacctgatcatcctgcctctggcctttggcaagagacagggcagagaattcatctggaacgacctgctgtccctggaaaccggcagcctgaagctggccaacggaagagtgatcgagaagacactgtacaacagaagaacccggcaggatgagcctgccctgttcgtggccctgaccttcgagcggcgggaggtcctggactcctccaatatcaaaccaatgaacctgatcggcgtggcaagaggcgaaaacatccccgccgtgatcgccctgaccgaccccgagggctgcccactgagccggtttaaggatagcctgggaaacccaacccacatcctgagaatcggcgagagctataaggagaagcagcggaccatccaggccaagaaggaggtggagcagcggagagccggcggctacagccggaagtacgccagcaaagccaagaatctggcagacgatatggtgagaaacaccgctagagatctgctgtactacgccgtgacccaggatgccatgctgatcttcgccaacctgagccggggcttcggccggcagggcaagcggaccttcatggccgagagacagtacacacggatggaggactggctgaccgccaagctggcctacgagggcctgagcaagacctacctgtccaagacactggcccagtacacctccaagacatgcagcaactgtgggtttaccatcaccagcgccgactacgacagggtgctggagaagctgaagaagacagcaacaggctggatgaccacaattaacggcaaggagctgaaggtggagggccagattacctactacaacagatacaagagacagaacgtagtcaaggacctgtccgtcgagctggatagactgagcgaagaatctgtgaacaacgacatctcctcctggacaaagggcagaagcggagaagctctgagcctcctgaagaaaagattctcccatagacccgtgcaggagaagttcgtgtgcctgaactgcggcttcgagacacacgcagccgagcaagccgccctgaacatcgccagatcctggctgttcctgcggagccaggagtacaagaaataccagacaaacaagacaaccggcaacaccgataagagagccttcgtcgagacctggcagtccttttaccggaagaagcttaaggaggtgtggaaacctgccgtgcggtctggcggatctggcggaggctccacaagcgaggaggtgcccgtggtgttcgaggacgtggccgtgtacttcaccagggacgagtggggcaccctggacaagaggcagaaggagctgtacagggacgtgatgcagatgaactacgagctgctggccagcctgggccccgccgccgccaagcccgacctgatcagcaagctggagcagagggccgccccctggatcaaggacccccacggccccacctggggcaagggcaggccccccggcaagaccagccccaagaaaaagagaaaagtctaagctgccttctgcggggcttgccttctggccatgcccttcttctctcccttgcacctgtacctcttggtctttgaataaagcctgagtaggaaggctagcaaaaaaaaaaaaaaaaaaaaaaaaaaaaaaaaaaaaaaaaaaaaaaaaaaaaaaaaaaaaaaaaaaaaaaaaaaaaaaaa

SEQ ID NO: 3153 - RNA, 5419 nt, synthetic construct
  source 1..5419: mol_type = other RNA
aggaaataagagagaaaagaagagtaagaagaaatataagagccaccatggcccctaagaagaagcgtaaagtgagccgggtgaacggcagcggcagcggcggcggcatgaaccacgaccaggagttcgacccccctaaggtgtaccctcccgtccccgccgagaagagaaagcccatccgggtcctgagcctgttcgatggcatcgccaccggtctgctggtgctgaaggacctgggcatccaggtggataggtacattgcctccgaggtgtgcgaggactccatcaccgtgggaatggtgcgtcatcagggcaagatcatgtacgtgggcgacgtgcggagcgtgacacagaagcatatccaggagtggggccctttcgacctggtgatcggcggcagcccttgcaatgacctgagcatcgtgaacccagcccggaagggcctgtacgagggaaccggcagactgttcttcgagttttacagactgctgcacgacgcccggcctaaggaaggcgacgaccggcccttcttttggctgttcgagaatgtggtggccatgggagtcagcgacaagcgggatattagccggttcctggagagcaaccccgtgatgatcgatgccaaggaagtgagcgccgcccaccgggccagatacttctggggcaatctgcctggcatgaacagacccctggccagcaccgtgaacgacaagctggagctgcaggagtgcctggagcacggccggatcgccaagttcagcaaggtgagaaccatcaccacccgaagcaacagcatcaaacaaggcaaggaccagcactttcctgtgttcatgaacgagaaggaggacatcctgtggtgtaccgagatggagagagtgttcgggttcccagtccactacacagatgtcagcaacatgtctagactggccagacagagactgctgggaagaagctggtccgtccctgtgatcagacacctgttcgcccctctgaaggagtacttcgcctgcgtgagcagcggcaacagcaacgccaacagccggggccccagcttctctagcggcctggtgccactgtccctgagagggagccacatgggccccatggagatctacaaaaccgtgagcgcctggaagcggcagcctgtgcgcgtgctgagcctgtttcggaatatcgataaagtcctgaaaagcctgggattcctggagagcggctctggctccggcggtggcaccctgaagtacgtggaggatgtgacaaacgtggtcagacgggatgtggagaagtggggccccttcgatctggtgtacggcagcacccaacccctgggcagctcttgtgaccggtgccctggctggtacatgtttcagttccaccggatcctgcagtacgccctgccgagacaggagtcccagcggccattcttttggattttcatggacaacttgctgctgaccgaggatgaccaggaaactaccactcggttcctgcagaccgaagccgtgaccctgcaggacgtgagaggccgggactaccagaacgccatgcgggtgtggtccaacatccctggactgaaaagcaagcacgcacctctgacccctaaagaagaggagtacctgcaggcccaggtgcggagcagaagcaagctggacgcccctaaggtggatctgctggtgaagaattgcctcctgcccctgagagagtacttcaagtatttcagccagaatagtctgcccctgggcggcccaagcagcggcgcccctcctcccagcggcggcagcccagccggctccccaacctctaccgaggagggcacctctgagtccgccacccccgagagcggccctggcacctccaccgagcccagcgagggcagcgcacccggcagccctgccggcagccccacctccacagaggagggaaccagcaccgagcccagcgaaggcagcgccccaggcaccagcaccgagcctagtgagggcggctctggcggcggcagcgcccaggagattaaacggatcaacaagatcagaagaagacttgtgaaagacagcaacaccaagaaggccggcaagacaggccccatgaaaaccctgctggttagagtgatgacacccgatctgagagagcggctggaaaacctgagaaagaagcctgaaaatatcccccagcccatcagcaatacatctagagccaacctgaataagctgctgaccgattacaccgaaatgaagaaggcgatcctgcatgtgtactgggaagagttccagaaggaccctgtgggcctgatgagccgggtggcccagcctgccagcaagaagatcgatcagaacaagctgaaacctgagatggacgagaagggcaacctgaccaccgccggctttgcctgctctcagtgtggccagcccctgttcgtgtacaagctggagcaggtgtctgagaagggcaaggcttacaccaactacttcggacggtgcaatgtggccgagcacgaaaagctgatcctgctggcccagctgaagcccgagaaggatagcgacgaagccgtgacatatagcctgggaaagtttgggcagagggccctggatttctacagcattcatgtgaccaaggagtccacccaccccgtgaagcccctggcccagatcgccggaaacagatacgcctccggacctgtgggaaaggccctgagcgacgcatgtatgggcacaatcgcctccttcctgtctaagtaccaggacatcatcatcgaacaccagaaggtggtgaagggcaaccagaagagactggagagcctgcgggagctggccggcaaggaaaacctggaataccctagcgtgaccctgccacctcagcctcacaccaaggagggcgttgatgcctacaacgaagtgatcgcccgggtgcgaatgtgggtgaacctgaacctgtggcagaagctgaagctaagcagagatgatgccaagcctctgctgagactgaagggattcccttcctttcctctggtcgagagacaggccaacgaagtggactggtgggacatggtgtgtaacgtgaagaagctgatcaacgagaaaaaggaggatggcaaggtgttttggcagaatctggctggctacaagagacaggaagccctgagaccatacctgagcagcgaggaagatcggaagaagggaaagaaattcgctcggtaccagctgggcgacctgctgctgcacctggaaaagaagcacggcgaggactggggaaaggtgtacgacgaggcctgggagcggattgacaagaaagtggaaggcctgagcaagcacatcaagctggaagaggaacggagaagcgaggacgcccagagcaaggccgccctgaccgactggctgcgggctaaggccagcttcgtgatcgagggcctgaaggaggccgacaaggacgagttctgcagatgcgagctgaagctgcagaagtggtacggggacctgcggggaaagcccttcgccatcgaagccgagaacagcatcctggacatcagcggcttcagcaagcagtacaactgtgccttcatctggcagaaggacggcgtgaagaagctgaacctgtacctgatcatcaactacttcaagggcggcaagctgcggttcaagaagatcaaacctgaagccttcgaagccaacagattctacaccgtgatcaacaaaaagagcggcgagatcgtgcccatggaggtgaacttcaacttcgacgaccccaacctgatcatcctgcctctggcctttggcaagagacagggcagagaattcatctggaacgacctgctgtccctggaaaccggcagcctgaagctggccaacggaagagtgatcgagaagacactgtacaacagaagaacccggcaggatgagcctgccctgttcgtggccctgaccttcgagcggcgggaggtcctggactcctccaatatcaaaccaatgaacctgatcggcgtggcaagaggcgaaaacatccccgccgtgatcgccctgaccgaccccgagggctgcccactgagccggtttaaggatagcctgggaaacccaacccacatcctgagaatcggcgagagctataaggagaagcagcggaccatccaggccaagaaggaggtggagcagcggagagccggcggctacagccggaagtacgccagcaaagccaagaatctggcagacgatatggtgagaaacaccgctagagatctgctgtactacgccgtgacccaggatgccatgctgatcttcgccaacctgagccggggcttcggccggcagggcaagcggaccttcatggccgagagacagtacacacggatggaggactggctgaccgccaagctggcctacgagggcctgagcaagacctacctgtccaagacactggcccagtacacctccaagacatgcagcaactgtgggtttaccatcaccagcgccgactacgacagggtgctggagaagctgaagaagacagcaacaggctggatgaccacaattaacggcaaggagctgaaggtggagggccagattacctactacaacagatacaagagacagaacgtagtcaaggacctgtccgtcgagctggatagactgagcgaagaatctgtgaacaacgacatctcctcctggacaaagggcagaagcggagaagctctgagcctcctgaagaaaagattctcccatagacccgtgcaggagaagttcgtgtgcctgaactgcggcttcgagacacacgcagccgagcaagccgccctgaacatcgccagatcctggctgttcctgcggagccaggagtacaagaaataccagacaaacaagacaaccggcaacaccgataagagagccttcgtcgagacctggcagtccttttaccggaagaagcttaaggaggtgtggaaacctgccgtgcggtctggcggatctggcggaggctccacaagcttcgaggagagcgtgaccttcgaggacgtggccgtgtacttcagcgagaacgagtggaccggcctggcccccgcccagagggtgctgtacagggacgtgatgctggagaactacggcgccgtggccagcctggccttccccttccccaagcccgccctgatcagccagctggagaggggcgaggccccctggtgcaaggccccccagggcgccctggacggcggcggccccaggggcatcagcaccagccccaagaaaaagagaaaagtctaagctgccttctgcggggcttgccttctggccatgcccttcttctctcccttgcacctgtacctcttggtctttgaataaagcctgagtaggaaggctagcaaaaaaaaaaaaaaaaaaaaaaaaaaaaaaaaaaaaaaaaaaaaaaaaaaaaaaaaaaaaaaaaaaaaaaaaaaaaaaaa

SEQ ID NO: 3154 - RNA, 5419 nt, synthetic construct
  source 1..5419: mol_type = other RNA
aggaaataagagagaaaagaagagtaagaagaaatataagagccaccatggcccctaagaagaagcgtaaagtgagccgggtgaacggcagcggcagcggcggcggcatgaaccacgaccaggagttcgacccccctaaggtgtaccctcccgtccccgccgagaagagaaagcccatccgggtcctgagcctgttcgatggcatcgccaccggtctgctggtgctgaaggacctgggcatccaggtggataggtacattgcctccgaggtgtgcgaggactccatcaccgtgggaatggtgcgtcatcagggcaagatcatgtacgtgggcgacgtgcggagcgtgacacagaagcatatccaggagtggggccctttcgacctggtgatcggcggcagcccttgcaatgacctgagcatcgtgaacccagcccggaagggcctgtacgagggaaccggcagactgttcttcgagttttacagactgctgcacgacgcccggcctaaggaaggcgacgaccggcccttcttttggctgttcgagaatgtggtggccatgggagtcagcgacaagcgggatattagccggttcctggagagcaaccccgtgatgatcgatgccaaggaagtgagcgccgcccaccgggccagatacttctggggcaatctgcctggcatgaacagacccctggccagcaccgtgaacgacaagctggagctgcaggagtgcctggagcacggccggatcgccaagttcagcaaggtgagaaccatcaccacccgaagcaacagcatcaaacaaggcaaggaccagcactttcctgtgttcatgaacgagaaggaggacatcctgtggtgtaccgagatggagagagtgttcgggttcccagtccactacacagatgtcagcaacatgtctagactggccagacagagactgctgggaagaagctggtccgtccctgtgatcagacacctgttcgcccctctgaaggagtacttcgcctgcgtgagcagcggcaacagcaacgccaacagccggggccccagcttctctagcggcctggtgccactgtccctgagagggagccacatgggccccatggagatctacaaaaccgtgagcgcctggaagcggcagcctgtgcgcgtgctgagcctgtttcggaatatcgataaagtcctgaaaagcctgggattcctggagagcggctctggctccggcggtggcaccctgaagtacgtggaggatgtgacaaacgtggtcagacgggatgtggagaagtggggccccttcgatctggtgtacggcagcacccaacccctgggcagctcttgtgaccggtgccctggctggtacatgtttcagttccaccggatcctgcagtacgccctgccgagacaggagtcccagcggccattcttttggattttcatggacaacttgctgctgaccgaggatgaccaggaaactaccactcggttcctgcagaccgaagccgtgaccctgcaggacgtgagaggccgggactaccagaacgccatgcgggtgtggtccaacatccctggactgaaaagcaagcacgcacctctgacccctaaagaagaggagtacctgcaggcccaggtgcggagcagaagcaagctggacgcccctaaggtggatctgctggtgaagaattgcctcctgcccctgagagagtacttcaagtatttcagccagaatagtctgcccctgggcggcccaagcagcggcgcccctcctcccagcggcggcagcccagccggctccccaacctctaccgaggagggcacctctgagtccgccacccccgagagcggccctggcacctccaccgagcccagcgagggcagcgcacccggcagccctgccggcagccccacctccacagaggagggaaccagcaccgagcccagcgaaggcagcgccccaggcaccagcaccgagcctagtgagggcggctctggcggcggcagcgcccaggagattaaacggatcaacaagatcagaagaagacttgtgaaagacagcaacaccaagaaggccggcaagacaggccccatgaaaaccctgctggttagagtgatgacacccgatctgagagagcggctggaaaacctgagaaagaagcctgaaaatatcccccagcccatcagcaatacatctagagccaacctgaataagctgctgaccgattacaccgaaatgaagaaggcgatcctgcatgtgtactgggaagagttccagaaggaccctgtgggcctgatgagccgggtggcccagcctgccagcaagaagatcgatcagaacaagctgaaacctgagatggacgagaagggcaacctgaccaccgccggctttgcctgctctcagtgtggccagcccctgttcgtgtacaagctggagcaggtgtctgagaagggcaaggcttacaccaactacttcggacggtgcaatgtggccgagcacgaaaagctgatcctgctggcccagctgaagcccgagaaggatagcgacgaagccgtgacatatagcctgggaaagtttgggcagagggccctggatttctacagcattcatgtgaccaaggagtccacccaccccgtgaagcccctggcccagatcgccggaaacagatacgcctccggacctgtgggaaaggccctgagcgacgcatgtatgggcacaatcgcctccttcctgtctaagtaccaggacatcatcatcgaacaccagaaggtggtgaagggcaaccagaagagactggagagcctgcgggagctggccggcaaggaaaacctggaataccctagcgtgaccctgccacctcagcctcacaccaaggagggcgttgatgcctacaacgaagtgatcgcccgggtgcgaatgtgggtgaacctgaacctgtggcagaagctgaagctaagcagagatgatgccaagcctctgctgagactgaagggattcccttcctttcctctggtcgagagacaggccaacgaagtggactggtgggacatggtgtgtaacgtgaagaagctgatcaacgagaaaaaggaggatggcaaggtgttttggcagaatctggctggctacaagagacaggaagccctgagaccatacctgagcagcgaggaagatcggaagaagggaaagaaattcgctcggtaccagctgggcgacctgctgctgcacctggaaaagaagcacggcgaggactggggaaaggtgtacgacgaggcctgggagcggattgacaagaaagtggaaggcctgagcaagcacatcaagctggaagaggaacggagaagcgaggacgcccagagcaaggccgccctgaccgactggctgcgggctaaggccagcttcgtgatcgagggcctgaaggaggccgacaaggacgagttctgcagatgcgagctgaagctgcagaagtggtacggggacctgcggggaaagcccttcgccatcgaagccgagaacagcatcctggacatcagcggcttcagcaagcagtacaactgtgccttcatctggcagaaggacggcgtgaagaagctgaacctgtacctgatcatcaactacttcaagggcggcaagctgcggttcaagaagatcaaacctgaagccttcgaagccaacagattctacaccgtgatcaacaaaaagagcggcgagatcgtgcccatggaggtgaacttcaacttcgacgaccccaacctgatcatcctgcctctggcctttggcaagagacagggcagagaattcatctggaacgacctgctgtccctggaaaccggcagcctgaagctggccaacggaagagtgatcgagaagacactgtacaacagaagaacccggcaggatgagcctgccctgttcgtggccctgaccttcgagcggcgggaggtcctggactcctccaatatcaaaccaatgaacctgatcggcgtggcaagaggcgaaaacatccccgccgtgatcgccctgaccgaccccgagggctgcccactgagccggtttaaggatagcctgggaaacccaacccacatcctgagaatcggcgagagctataaggagaagcagcggaccatccaggccaagaaggaggtggagcagcggagagccggcggctacagccggaagtacgccagcaaagccaagaatctggcagacgatatggtgagaaacaccgctagagatctgctgtactacgccgtgacccaggatgccatgctgatcttcgccaacctgagccggggcttcggccggcagggcaagcggaccttcatggccgagagacagtacacacggatggaggactggctgaccgccaagctggcctacgagggcctgagcaagacctacctgtccaagacactggcccagtacacctccaagacatgcagcaactgtgggtttaccatcaccagcgccgactacgacagggtgctggagaagctgaagaagacagcaacaggctggatgaccacaattaacggcaaggagctgaaggtggagggccagattacctactacaacagatacaagagacagaacgtagtcaaggacctgtccgtcgagctggatagactgagcgaagaatctgtgaacaacgacatctcctcctggacaaagggcagaagcggagaagctctgagcctcctgaagaaaagattctcccatagacccgtgcaggagaagttcgtgtgcctgaactgcggcttcgagacacacgcagccgagcaagccgccctgaacatcgccagatcctggctgttcctgcggagccaggagtacaagaaataccagacaaacaagacaaccggcaacaccgataagagagccttcgtcgagacctggcagtccttttaccggaagaagcttaaggaggtgtggaaacctgccgtgcggtctggcggatctggcggaggctccacaagccaggccgaggtgaccttcgaggacgtggccgtgctgttcagcagggaggagtggggcaggctgggccccacccagaggggcctgtacagggacgtgatgctggagacctacaggaacctggtgagcctgggcgccggcagggccggccccaagcccggcgtgatcacccagctggagaggggcgacgagccctgggtgctggacgcccagggcgccaagggcaagggcaggcccagggtgagcaccagccccaagaaaaagagaaaagtctaagctgccttctgcggggcttgccttctggccatgcccttcttctctcccttgcacctgtacctcttggtctttgaataaagcctgagtaggaaggctagcaaaaaaaaaaaaaaaaaaaaaaaaaaaaaaaaaaaaaaaaaaaaaaaaaaaaaaaaaaaaaaaaaaaaaaaaaaaaaaaa

SEQ ID NO: 3155 - RNA, 5419 nt, synthetic construct
  source 1..5419: mol_type = other RNA
aggaaataagagagaaaagaagagtaagaagaaatataagagccaccatggcccctaagaagaagcgtaaagtgagccgggtgaacggcagcggcagcggcggcggcatgaaccacgaccaggagttcgacccccctaaggtgtaccctcccgtccccgccgagaagagaaagcccatccgggtcctgagcctgttcgatggcatcgccaccggtctgctggtgctgaaggacctgggcatccaggtggataggtacattgcctccgaggtgtgcgaggactccatcaccgtgggaatggtgcgtcatcagggcaagatcatgtacgtgggcgacgtgcggagcgtgacacagaagcatatccaggagtggggccctttcgacctggtgatcggcggcagcccttgcaatgacctgagcatcgtgaacccagcccggaagggcctgtacgagggaaccggcagactgttcttcgagttttacagactgctgcacgacgcccggcctaaggaaggcgacgaccggcccttcttttggctgttcgagaatgtggtggccatgggagtcagcgacaagcgggatattagccggttcctggagagcaaccccgtgatgatcgatgccaaggaagtgagcgccgcccaccgggccagatacttctggggcaatctgcctggcatgaacagacccctggccagcaccgtgaacgacaagctggagctgcaggagtgcctggagcacggccggatcgccaagttcagcaaggtgagaaccatcaccacccgaagcaacagcatcaaacaaggcaaggaccagcactttcctgtgttcatgaacgagaaggaggacatcctgtggtgtaccgagatggagagagtgttcgggttcccagtccactacacagatgtcagcaacatgtctagactggccagacagagactgctgggaagaagctggtccgtccctgtgatcagacacctgttcgcccctctgaaggagtacttcgcctgcgtgagcagcggcaacagcaacgccaacagccggggccccagcttctctagcggcctggtgccactgtccctgagagggagccacatgggccccatggagatctacaaaaccgtgagcgcctggaagcggcagcctgtgcgcgtgctgagcctgtttcggaatatcgataaagtcctgaaaagcctgggattcctggagagcggctctggctccggcggtggcaccctgaagtacgtggaggatgtgacaaacgtggtcagacgggatgtggagaagtggggccccttcgatctggtgtacggcagcacccaacccctgggcagctcttgtgaccggtgccctggctggtacatgtttcagttccaccggatcctgcagtacgccctgccgagacaggagtcccagcggccattcttttggattttcatggacaacttgctgctgaccgaggatgaccaggaaactaccactcggttcctgcagaccgaagccgtgaccctgcaggacgtgagaggccgggactaccagaacgccatgcgggtgtggtccaacatccctggactgaaaagcaagcacgcacctctgacccctaaagaagaggagtacctgcaggcccaggtgcggagcagaagcaagctggacgcccctaaggtggatctgctggtgaagaattgcctcctgcccctgagagagtacttcaagtatttcagccagaatagtctgcccctgggcggcccaagcagcggcgcccctcctcccagcggcggcagcccagccggctccccaacctctaccgaggagggcacctctgagtccgccacccccgagagcggccctggcacctccaccgagcccagcgagggcagcgcacccggcagccctgccggcagccccacctccacagaggagggaaccagcaccgagcccagcgaaggcagcgccccaggcaccagcaccgagcctagtgagggcggctctggcggcggcagcgcccaggagattaaacggatcaacaagatcagaagaagacttgtgaaagacagcaacaccaagaaggccggcaagacaggccccatgaaaaccctgctggttagagtgatgacacccgatctgagagagcggctggaaaacctgagaaagaagcctgaaaatatcccccagcccatcagcaatacatctagagccaacctgaataagctgctgaccgattacaccgaaatgaagaaggcgatcctgcatgtgtactgggaagagttccagaaggaccctgtgggcctgatgagccgggtggcccagcctgccagcaagaagatcgatcagaacaagctgaaacctgagatggacgagaagggcaacctgaccaccgccggctttgcctgctctcagtgtggccagcccctgttcgtgtacaagctggagcaggtgtctgagaagggcaaggcttacaccaactacttcggacggtgcaatgtggccgagcacgaaaagctgatcctgctggcccagctgaagcccgagaaggatagcgacgaagccgtgacatatagcctgggaaagtttgggcagagggccctggatttctacagcattcatgtgaccaaggagtccacccaccccgtgaagcccctggcccagatcgccggaaacagatacgcctccggacctgtgggaaaggccctgagcgacgcatgtatgggcacaatcgcctccttcctgtctaagtaccaggacatcatcatcgaacaccagaaggtggtgaagggcaaccagaagagactggagagcctgcgggagctggccggcaaggaaaacctggaataccctagcgtgaccctgccacctcagcctcacaccaaggagggcgttgatgcctacaacgaagtgatcgcccgggtgcgaatgtgggtgaacctgaacctgtggcagaagctgaagctaagcagagatgatgccaagcctctgctgagactgaagggattcccttcctttcctctggtcgagagacaggccaacgaagtggactggtgggacatggtgtgtaacgtgaagaagctgatcaacgagaaaaaggaggatggcaaggtgttttggcagaatctggctggctacaagagacaggaagccctgagaccatacctgagcagcgaggaagatcggaagaagggaaagaaattcgctcggtaccagctgggcgacctgctgctgcacctggaaaagaagcacggcgaggactggggaaaggtgtacgacgaggcctgggagcggattgacaagaaagtggaaggcctgagcaagcacatcaagctggaagaggaacggagaagcgaggacgcccagagcaaggccgccctgaccgactggctgcgggctaaggccagcttcgtgatcgagggcctgaaggaggccgacaaggacgagttctgcagatgcgagctgaagctgcagaagtggtacggggacctgcggggaaagcccttcgccatcgaagccgagaacagcatcctggacatcagcggcttcagcaagcagtacaactgtgccttcatctggcagaaggacggcgtgaagaagctgaacctgtacctgatcatcaactacttcaagggcggcaagctgcggttcaagaagatcaaacctgaagccttcgaagccaacagattctacaccgtgatcaacaaaaagagcggcgagatcgtgcccatggaggtgaacttcaacttcgacgaccccaacctgatcatcctgcctctggcctttggcaagagacagggcagagaattcatctggaacgacctgctgtccctggaaaccggcagcctgaagctggccaacggaagagtgatcgagaagacactgtacaacagaagaacccggcaggatgagcctgccctgttcgtggccctgaccttcgagcggcgggaggtcctggactcctccaatatcaaaccaatgaacctgatcggcgtggcaagaggcgaaaacatccccgccgtgatcgccctgaccgaccccgagggctgcccactgagccggtttaaggatagcctgggaaacccaacccacatcctgagaatcggcgagagctataaggagaagcagcggaccatccaggccaagaaggaggtggagcagcggagagccggcggctacagccggaagtacgccagcaaagccaagaatctggcagacgatatggtgagaaacaccgctagagatctgctgtactacgccgtgacccaggatgccatgctgatcttcgccaacctgagccggggcttcggccggcagggcaagcggaccttcatggccgagagacagtacacacggatggaggactggctgaccgccaagctggcctacgagggcctgagcaagacctacctgtccaagacactggcccagtacacctccaagacatgcagcaactgtgggtttaccatcaccagcgccgactacgacagggtgctggagaagctgaagaagacagcaacaggctggatgaccacaattaacggcaaggagctgaaggtggagggccagattacctactacaacagatacaagagacagaacgtagtcaaggacctgtccgtcgagctggatagactgagcgaagaatctgtgaacaacgacatctcctcctggacaaagggcagaagcggagaagctctgagcctcctgaagaaaagattctcccatagacccgtgcaggagaagttcgtgtgcctgaactgcggcttcgagacacacgcagccgagcaagccgccctgaacatcgccagatcctggctgttcctgcggagccaggagtacaagaaataccagacaaacaagacaaccggcaacaccgataagagagccttcgtcgagacctggcagtccttttaccggaagaagcttaaggaggtgtggaaacctgccgtgcggtctggcggatctggcggaggctccacaagcatggccgccggccagagggaggccaggccccaggtgagcctgaccttcgaggacgtggccgtgctgttcaccagggacgagtggaggaagctggcccccagccagaggaacctgtacagggacgtgatgctggagaactacaggaacctggtgagcctgggcctgcccttcaccaagcccaaggtgatcagcctgctgcagcagggcgaggacccctgggaggtggagaaggacggcagcggcaccagccccaagaaaaagagaaaagtctaagctgccttctgcggggcttgccttctggccatgcccttcttctctcccttgcacctgtacctcttggtctttgaataaagcctgagtaggaaggctagcaaaaaaaaaaaaaaaaaaaaaaaaaaaaaaaaaaaaaaaaaaaaaaaaaaaaaaaaaaaaaaaaaaaaaaaaaaaaaaaa

SEQ ID NO: 3156 - RNA, 5419 nt, synthetic construct
  source 1..5419: mol_type = other RNA
aggaaataagagagaaaagaagagtaagaagaaatataagagccaccatggcccctaagaagaagcgtaaagtgagccgggtgaacggcagcggcagcggcggcggcatgaaccacgaccaggagttcgacccccctaaggtgtaccctcccgtccccgccgagaagagaaagcccatccgggtcctgagcctgttcgatggcatcgccaccggtctgctggtgctgaaggacctgggcatccaggtggataggtacattgcctccgaggtgtgcgaggactccatcaccgtgggaatggtgcgtcatcagggcaagatcatgtacgtgggcgacgtgcggagcgtgacacagaagcatatccaggagtggggccctttcgacctggtgatcggcggcagcccttgcaatgacctgagcatcgtgaacccagcccggaagggcctgtacgagggaaccggcagactgttcttcgagttttacagactgctgcacgacgcccggcctaaggaaggcgacgaccggcccttcttttggctgttcgagaatgtggtggccatgggagtcagcgacaagcgggatattagccggttcctggagagcaaccccgtgatgatcgatgccaaggaagtgagcgccgcccaccgggccagatacttctggggcaatctgcctggcatgaacagacccctggccagcaccgtgaacgacaagctggagctgcaggagtgcctggagcacggccggatcgccaagttcagcaaggtgagaaccatcaccacccgaagcaacagcatcaaacaaggcaaggaccagcactttcctgtgttcatgaacgagaaggaggacatcctgtggtgtaccgagatggagagagtgttcgggttcccagtccactacacagatgtcagcaacatgtctagactggccagacagagactgctgggaagaagctggtccgtccctgtgatcagacacctgttcgcccctctgaaggagtacttcgcctgcgtgagcagcggcaacagcaacgccaacagccggggccccagcttctctagcggcctggtgccactgtccctgagagggagccacatgggccccatggagatctacaaaaccgtgagcgcctggaagcggcagcctgtgcgcgtgctgagcctgtttcggaatatcgataaagtcctgaaaagcctgggattcctggagagcggctctggctccggcggtggcaccctgaagtacgtggaggatgtgacaaacgtggtcagacgggatgtggagaagtggggccccttcgatctggtgtacggcagcacccaacccctgggcagctcttgtgaccggtgccctggctggtacatgtttcagttccaccggatcctgcagtacgccctgccgagacaggagtcccagcggccattcttttggattttcatggacaacttgctgctgaccgaggatgaccaggaaactaccactcggttcctgcagaccgaagccgtgaccctgcaggacgtgagaggccgggactaccagaacgccatgcgggtgtggtccaacatccctggactgaaaagcaagcacgcacctctgacccctaaagaagaggagtacctgcaggcccaggtgcggagcagaagcaagctggacgcccctaaggtggatctgctggtgaagaattgcctcctgcccctgagagagtacttcaagtatttcagccagaatagtctgcccctgggcggcccaagcagcggcgcccctcctcccagcggcggcagcccagccggctccccaacctctaccgaggagggcacctctgagtccgccacccccgagagcggccctggcacctccaccgagcccagcgagggcagcgcacccggcagccctgccggcagccccacctccacagaggagggaaccagcaccgagcccagcgaaggcagcgccccaggcaccagcaccgagcctagtgagggcggctctggcggcggcagcgcccaggagattaaacggatcaacaagatcagaagaagacttgtgaaagacagcaacaccaagaaggccggcaagacaggccccatgaaaaccctgctggttagagtgatgacacccgatctgagagagcggctggaaaacctgagaaagaagcctgaaaatatcccccagcccatcagcaatacatctagagccaacctgaataagctgctgaccgattacaccgaaatgaagaaggcgatcctgcatgtgtactgggaagagttccagaaggaccctgtgggcctgatgagccgggtggcccagcctgccagcaagaagatcgatcagaacaagctgaaacctgagatggacgagaagggcaacctgaccaccgccggctttgcctgctctcagtgtggccagcccctgttcgtgtacaagctggagcaggtgtctgagaagggcaaggcttacaccaactacttcggacggtgcaatgtggccgagcacgaaaagctgatcctgctggcccagctgaagcccgagaaggatagcgacgaagccgtgacatatagcctgggaaagtttgggcagagggccctggatttctacagcattcatgtgaccaaggagtccacccaccccgtgaagcccctggcccagatcgccggaaacagatacgcctccggacctgtgggaaaggccctgagcgacgcatgtatgggcacaatcgcctccttcctgtctaagtaccaggacatcatcatcgaacaccagaaggtggtgaagggcaaccagaagagactggagagcctgcgggagctggccggcaaggaaaacctggaataccctagcgtgaccctgccacctcagcctcacaccaaggagggcgttgatgcctacaacgaagtgatcgcccgggtgcgaatgtgggtgaacctgaacctgtggcagaagctgaagctaagcagagatgatgccaagcctctgctgagactgaagggattcccttcctttcctctggtcgagagacaggccaacgaagtggactggtgggacatggtgtgtaacgtgaagaagctgatcaacgagaaaaaggaggatggcaaggtgttttggcagaatctggctggctacaagagacaggaagccctgagaccatacctgagcagcgaggaagatcggaagaagggaaagaaattcgctcggtaccagctgggcgacctgctgctgcacctggaaaagaagcacggcgaggactggggaaaggtgtacgacgaggcctgggagcggattgacaagaaagtggaaggcctgagcaagcacatcaagctggaagaggaacggagaagcgaggacgcccagagcaaggccgccctgaccgactggctgcgggctaaggccagcttcgtgatcgagggcctgaaggaggccgacaaggacgagttctgcagatgcgagctgaagctgcagaagtggtacggggacctgcggggaaagcccttcgccatcgaagccgagaacagcatcctggacatcagcggcttcagcaagcagtacaactgtgccttcatctggcagaaggacggcgtgaagaagctgaacctgtacctgatcatcaactacttcaagggcggcaagctgcggttcaagaagatcaaacctgaagccttcgaagccaacagattctacaccgtgatcaacaaaaagagcggcgagatcgtgcccatggaggtgaacttcaacttcgacgaccccaacctgatcatcctgcctctggcctttggcaagagacagggcagagaattcatctggaacgacctgctgtccctggaaaccggcagcctgaagctggccaacggaagagtgatcgagaagacactgtacaacagaagaacccggcaggatgagcctgccctgttcgtggccctgaccttcgagcggcgggaggtcctggactcctccaatatcaaaccaatgaacctgatcggcgtggcaagaggcgaaaacatccccgccgtgatcgccctgaccgaccccgagggctgcccactgagccggtttaaggatagcctgggaaacccaacccacatcctgagaatcggcgagagctataaggagaagcagcggaccatccaggccaagaaggaggtggagcagcggagagccggcggctacagccggaagtacgccagcaaagccaagaatctggcagacgatatggtgagaaacaccgctagagatctgctgtactacgccgtgacccaggatgccatgctgatcttcgccaacctgagccggggcttcggccggcagggcaagcggaccttcatggccgagagacagtacacacggatggaggactggctgaccgccaagctggcctacgagggcctgagcaagacctacctgtccaagacactggcccagtacacctccaagacatgcagcaactgtgggtttaccatcaccagcgccgactacgacagggtgctggagaagctgaagaagacagcaacaggctggatgaccacaattaacggcaaggagctgaaggtggagggccagattacctactacaacagatacaagagacagaacgtagtcaaggacctgtccgtcgagctggatagactgagcgaagaatctgtgaacaacgacatctcctcctggacaaagggcagaagcggagaagctctgagcctcctgaagaaaagattctcccatagacccgtgcaggagaagttcgtgtgcctgaactgcggcttcgagacacacgcagccgagcaagccgccctgaacatcgccagatcctggctgttcctgcggagccaggagtacaagaaataccagacaaacaagacaaccggcaacaccgataagagagccttcgtcgagacctggcagtccttttaccggaagaagcttaaggaggtgtggaaacctgccgtgcggtctggcggatctggcggaggctccacaagcatccagaggctgctgaccttcggcgacgtggccgtggccttcaccaggatcgagtggaggcacctggacgccgcccagagggccctgtacagggacgtgatgctggagaactacggcaacctggtgagcgtgggcctgctgagcagcaagcccaagctgatcgcccagctggagcagggcgccgagccctggatggaggccagggagacccccagcggcaccagggccgtgcccgactactggaccagccccaagaaaaagagaaaagtctaagctgccttctgcggggcttgccttctggccatgcccttcttctctcccttgcacctgtacctcttggtctttgaataaagcctgagtaggaaggctagcaaaaaaaaaaaaaaaaaaaaaaaaaaaaaaaaaaaaaaaaaaaaaaaaaaaaaaaaaaaaaaaaaaaaaaaaaaaaaaaa

SEQ ID NO: 3157 - RNA, 5419 nt, synthetic construct
  source 1..5419: mol_type = other RNA
aggaaataagagagaaaagaagagtaagaagaaatataagagccaccatggcccctaagaagaagcgtaaagtgagccgggtgaacggcagcggcagcggcggcggcatgaaccacgaccaggagttcgacccccctaaggtgtaccctcccgtccccgccgagaagagaaagcccatccgggtcctgagcctgttcgatggcatcgccaccggtctgctggtgctgaaggacctgggcatccaggtggataggtacattgcctccgaggtgtgcgaggactccatcaccgtgggaatggtgcgtcatcagggcaagatcatgtacgtgggcgacgtgcggagcgtgacacagaagcatatccaggagtggggccctttcgacctggtgatcggcggcagcccttgcaatgacctgagcatcgtgaacccagcccggaagggcctgtacgagggaaccggcagactgttcttcgagttttacagactgctgcacgacgcccggcctaaggaaggcgacgaccggcccttcttttggctgttcgagaatgtggtggccatgggagtcagcgacaagcgggatattagccggttcctggagagcaaccccgtgatgatcgatgccaaggaagtgagcgccgcccaccgggccagatacttctggggcaatctgcctggcatgaacagacccctggccagcaccgtgaacgacaagctggagctgcaggagtgcctggagcacggccggatcgccaagttcagcaaggtgagaaccatcaccacccgaagcaacagcatcaaacaaggcaaggaccagcactttcctgtgttcatgaacgagaaggaggacatcctgtggtgtaccgagatggagagagtgttcgggttcccagtccactacacagatgtcagcaacatgtctagactggccagacagagactgctgggaagaagctggtccgtccctgtgatcagacacctgttcgcccctctgaaggagtacttcgcctgcgtgagcagcggcaacagcaacgccaacagccggggccccagcttctctagcggcctggtgccactgtccctgagagggagccacatgggccccatggagatctacaaaaccgtgagcgcctggaagcggcagcctgtgcgcgtgctgagcctgtttcggaatatcgataaagtcctgaaaagcctgggattcctggagagcggctctggctccggcggtggcaccctgaagtacgtggaggatgtgacaaacgtggtcagacgggatgtggagaagtggggccccttcgatctggtgtacggcagcacccaacccctgggcagctcttgtgaccggtgccctggctggtacatgtttcagttccaccggatcctgcagtacgccctgccgagacaggagtcccagcggccattcttttggattttcatggacaacttgctgctgaccgaggatgaccaggaaactaccactcggttcctgcagaccgaagccgtgaccctgcaggacgtgagaggccgggactaccagaacgccatgcgggtgtggtccaacatccctggactgaaaagcaagcacgcacctctgacccctaaagaagaggagtacctgcaggcccaggtgcggagcagaagcaagctggacgcccctaaggtggatctgctggtgaagaattgcctcctgcccctgagagagtacttcaagtatttcagccagaatagtctgcccctgggcggcccaagcagcggcgcccctcctcccagcggcggcagcccagccggctccccaacctctaccgaggagggcacctctgagtccgccacccccgagagcggccctggcacctccaccgagcccagcgagggcagcgcacccggcagccctgccggcagccccacctccacagaggagggaaccagcaccgagcccagcgaaggcagcgccccaggcaccagcaccgagcctagtgagggcggctctggcggcggcagcgcccaggagattaaacggatcaacaagatcagaagaagacttgtgaaagacagcaacaccaagaaggccggcaagacaggccccatgaaaaccctgctggttagagtgatgacacccgatctgagagagcggctggaaaacctgagaaagaagcctgaaaatatcccccagcccatcagcaatacatctagagccaacctgaataagctgctgaccgattacaccgaaatgaagaaggcgatcctgcatgtgtactgggaagagttccagaaggaccctgtgggcctgatgagccgggtggcccagcctgccagcaagaagatcgatcagaacaagctgaaacctgagatggacgagaagggcaacctgaccaccgccggctttgcctgctctcagtgtggccagcccctgttcgtgtacaagctggagcaggtgtctgagaagggcaaggcttacaccaactacttcggacggtgcaatgtggccgagcacgaaaagctgatcctgctggcccagctgaagcccgagaaggatagcgacgaagccgtgacatatagcctgggaaagtttgggcagagggccctggatttctacagcattcatgtgaccaaggagtccacccaccccgtgaagcccctggcccagatcgccggaaacagatacgcctccggacctgtgggaaaggccctgagcgacgcatgtatgggcacaatcgcctccttcctgtctaagtaccaggacatcatcatcgaacaccagaaggtggtgaagggcaaccagaagagactggagagcctgcgggagctggccggcaaggaaaacctggaataccctagcgtgaccctgccacctcagcctcacaccaaggagggcgttgatgcctacaacgaagtgatcgcccgggtgcgaatgtgggtgaacctgaacctgtggcagaagctgaagctaagcagagatgatgccaagcctctgctgagactgaagggattcccttcctttcctctggtcgagagacaggccaacgaagtggactggtgggacatggtgtgtaacgtgaagaagctgatcaacgagaaaaaggaggatggcaaggtgttttggcagaatctggctggctacaagagacaggaagccctgagaccatacctgagcagcgaggaagatcggaagaagggaaagaaattcgctcggtaccagctgggcgacctgctgctgcacctggaaaagaagcacggcgaggactggggaaaggtgtacgacgaggcctgggagcggattgacaagaaagtggaaggcctgagcaagcacatcaagctggaagaggaacggagaagcgaggacgcccagagcaaggccgccctgaccgactggctgcgggctaaggccagcttcgtgatcgagggcctgaaggaggccgacaaggacgagttctgcagatgcgagctgaagctgcagaagtggtacggggacctgcggggaaagcccttcgccatcgaagccgagaacagcatcctggacatcagcggcttcagcaagcagtacaactgtgccttcatctggcagaaggacggcgtgaagaagctgaacctgtacctgatcatcaactacttcaagggcggcaagctgcggttcaagaagatcaaacctgaagccttcgaagccaacagattctacaccgtgatcaacaaaaagagcggcgagatcgtgcccatggaggtgaacttcaacttcgacgaccccaacctgatcatcctgcctctggcctttggcaagagacagggcagagaattcatctggaacgacctgctgtccctggaaaccggcagcctgaagctggccaacggaagagtgatcgagaagacactgtacaacagaagaacccggcaggatgagcctgccctgttcgtggccctgaccttcgagcggcgggaggtcctggactcctccaatatcaaaccaatgaacctgatcggcgtggcaagaggcgaaaacatccccgccgtgatcgccctgaccgaccccgagggctgcccactgagccggtttaaggatagcctgggaaacccaacccacatcctgagaatcggcgagagctataaggagaagcagcggaccatccaggccaagaaggaggtggagcagcggagagccggcggctacagccggaagtacgccagcaaagccaagaatctggcagacgatatggtgagaaacaccgctagagatctgctgtactacgccgtgacccaggatgccatgctgatcttcgccaacctgagccggggcttcggccggcagggcaagcggaccttcatggccgagagacagtacacacggatggaggactggctgaccgccaagctggcctacgagggcctgagcaagacctacctgtccaagacactggcccagtacacctccaagacatgcagcaactgtgggtttaccatcaccagcgccgactacgacagggtgctggagaagctgaagaagacagcaacaggctggatgaccacaattaacggcaaggagctgaaggtggagggccagattacctactacaacagatacaagagacagaacgtagtcaaggacctgtccgtcgagctggatagactgagcgaagaatctgtgaacaacgacatctcctcctggacaaagggcagaagcggagaagctctgagcctcctgaagaaaagattctcccatagacccgtgcaggagaagttcgtgtgcctgaactgcggcttcgagacacacgcagccgagcaagccgccctgaacatcgccagatcctggctgttcctgcggagccaggagtacaagaaataccagacaaacaagacaaccggcaacaccgataagagagccttcgtcgagacctggcagtccttttaccggaagaagcttaaggaggtgtggaaacctgccgtgcggtctggcggatctggcggaggctccacaagccaggtgcccgtgaccttcgaggacatcgccatctacttctgccaggaggagtgggaggtgctggaggagtggcagaaggacctgtacaaggacgtgatgaaggagaactaccaggccctgatcagcctgggcaccggcagcctgatcgtgagccccgacatcatcagcaggatcgagaggggcgaggacccctacatcagggacgagaggggcagcaagaagagggagaccgagaacagcagcaccagccccaagaaaaagagaaaagtctaagctgccttctgcggggcttgccttctggccatgcccttcttctctcccttgcacctgtacctcttggtctttgaataaagcctgagtaggaaggctagcaaaaaaaaaaaaaaaaaaaaaaaaaaaaaaaaaaaaaaaaaaaaaaaaaaaaaaaaaaaaaaaaaaaaaaaaaaaaaaaa

SEQ ID NO: 3158 - RNA, 5419 nt, synthetic construct
  source 1..5419: mol_type = other RNA
aggaaataagagagaaaagaagagtaagaagaaatataagagccaccatggcccctaagaagaagcgtaaagtgagccgggtgaacggcagcggcagcggcggcggcatgaaccacgaccaggagttcgacccccctaaggtgtaccctcccgtccccgccgagaagagaaagcccatccgggtcctgagcctgttcgatggcatcgccaccggtctgctggtgctgaaggacctgggcatccaggtggataggtacattgcctccgaggtgtgcgaggactccatcaccgtgggaatggtgcgtcatcagggcaagatcatgtacgtgggcgacgtgcggagcgtgacacagaagcatatccaggagtggggccctttcgacctggtgatcggcggcagcccttgcaatgacctgagcatcgtgaacccagcccggaagggcctgtacgagggaaccggcagactgttcttcgagttttacagactgctgcacgacgcccggcctaaggaaggcgacgaccggcccttcttttggctgttcgagaatgtggtggccatgggagtcagcgacaagcgggatattagccggttcctggagagcaaccccgtgatgatcgatgccaaggaagtgagcgccgcccaccgggccagatacttctggggcaatctgcctggcatgaacagacccctggccagcaccgtgaacgacaagctggagctgcaggagtgcctggagcacggccggatcgccaagttcagcaaggtgagaaccatcaccacccgaagcaacagcatcaaacaaggcaaggaccagcactttcctgtgttcatgaacgagaaggaggacatcctgtggtgtaccgagatggagagagtgttcgggttcccagtccactacacagatgtcagcaacatgtctagactggccagacagagactgctgggaagaagctggtccgtccctgtgatcagacacctgttcgcccctctgaaggagtacttcgcctgcgtgagcagcggcaacagcaacgccaacagccggggccccagcttctctagcggcctggtgccactgtccctgagagggagccacatgggccccatggagatctacaaaaccgtgagcgcctggaagcggcagcctgtgcgcgtgctgagcctgtttcggaatatcgataaagtcctgaaaagcctgggattcctggagagcggctctggctccggcggtggcaccctgaagtacgtggaggatgtgacaaacgtggtcagacgggatgtggagaagtggggccccttcgatctggtgtacggcagcacccaacccctgggcagctcttgtgaccggtgccctggctggtacatgtttcagttccaccggatcctgcagtacgccctgccgagacaggagtcccagcggccattcttttggattttcatggacaacttgctgctgaccgaggatgaccaggaaactaccactcggttcctgcagaccgaagccgtgaccctgcaggacgtgagaggccgggactaccagaacgccatgcgggtgtggtccaacatccctggactgaaaagcaagcacgcacctctgacccctaaagaagaggagtacctgcaggcccaggtgcggagcagaagcaagctggacgcccctaaggtggatctgctggtgaagaattgcctcctgcccctgagagagtacttcaagtatttcagccagaatagtctgcccctgggcggcccaagcagcggcgcccctcctcccagcggcggcagcccagccggctccccaacctctaccgaggagggcacctctgagtccgccacccccgagagcggccctggcacctccaccgagcccagcgagggcagcgcacccggcagccctgccggcagccccacctccacagaggagggaaccagcaccgagcccagcgaaggcagcgccccaggcaccagcaccgagcctagtgagggcggctctggcggcggcagcgcccaggagattaaacggatcaacaagatcagaagaagacttgtgaaagacagcaacaccaagaaggccggcaagacaggccccatgaaaaccctgctggttagagtgatgacacccgatctgagagagcggctggaaaacctgagaaagaagcctgaaaatatcccccagcccatcagcaatacatctagagccaacctgaataagctgctgaccgattacaccgaaatgaagaaggcgatcctgcatgtgtactgggaagagttccagaaggaccctgtgggcctgatgagccgggtggcccagcctgccagcaagaagatcgatcagaacaagctgaaacctgagatggacgagaagggcaacctgaccaccgccggctttgcctgctctcagtgtggccagcccctgttcgtgtacaagctggagcaggtgtctgagaagggcaaggcttacaccaactacttcggacggtgcaatgtggccgagcacgaaaagctgatcctgctggcccagctgaagcccgagaaggatagcgacgaagccgtgacatatagcctgggaaagtttgggcagagggccctggatttctacagcattcatgtgaccaaggagtccacccaccccgtgaagcccctggcccagatcgccggaaacagatacgcctccggacctgtgggaaaggccctgagcgacgcatgtatgggcacaatcgcctccttcctgtctaagtaccaggacatcatcatcgaacaccagaaggtggtgaagggcaaccagaagagactggagagcctgcgggagctggccggcaaggaaaacctggaataccctagcgtgaccctgccacctcagcctcacaccaaggagggcgttgatgcctacaacgaagtgatcgcccgggtgcgaatgtgggtgaacctgaacctgtggcagaagctgaagctaagcagagatgatgccaagcctctgctgagactgaagggattcccttcctttcctctggtcgagagacaggccaacgaagtggactggtgggacatggtgtgtaacgtgaagaagctgatcaacgagaaaaaggaggatggcaaggtgttttggcagaatctggctggctacaagagacaggaagccctgagaccatacctgagcagcgaggaagatcggaagaagggaaagaaattcgctcggtaccagctgggcgacctgctgctgcacctggaaaagaagcacggcgaggactggggaaaggtgtacgacgaggcctgggagcggattgacaagaaagtggaaggcctgagcaagcacatcaagctggaagaggaacggagaagcgaggacgcccagagcaaggccgccctgaccgactggctgcgggctaaggccagcttcgtgatcgagggcctgaaggaggccgacaaggacgagttctgcagatgcgagctgaagctgcagaagtggtacggggacctgcggggaaagcccttcgccatcgaagccgagaacagcatcctggacatcagcggcttcagcaagcagtacaactgtgccttcatctggcagaaggacggcgtgaagaagctgaacctgtacctgatcatcaactacttcaagggcggcaagctgcggttcaagaagatcaaacctgaagccttcgaagccaacagattctacaccgtgatcaacaaaaagagcggcgagatcgtgcccatggaggtgaacttcaacttcgacgaccccaacctgatcatcctgcctctggcctttggcaagagacagggcagagaattcatctggaacgacctgctgtccctggaaaccggcagcctgaagctggccaacggaagagtgatcgagaagacactgtacaacagaagaacccggcaggatgagcctgccctgttcgtggccctgaccttcgagcggcgggaggtcctggactcctccaatatcaaaccaatgaacctgatcggcgtggcaagaggcgaaaacatccccgccgtgatcgccctgaccgaccccgagggctgcccactgagccggtttaaggatagcctgggaaacccaacccacatcctgagaatcggcgagagctataaggagaagcagcggaccatccaggccaagaaggaggtggagcagcggagagccggcggctacagccggaagtacgccagcaaagccaagaatctggcagacgatatggtgagaaacaccgctagagatctgctgtactacgccgtgacccaggatgccatgctgatcttcgccaacctgagccggggcttcggccggcagggcaagcggaccttcatggccgagagacagtacacacggatggaggactggctgaccgccaagctggcctacgagggcctgagcaagacctacctgtccaagacactggcccagtacacctccaagacatgcagcaactgtgggtttaccatcaccagcgccgactacgacagggtgctggagaagctgaagaagacagcaacaggctggatgaccacaattaacggcaaggagctgaaggtggagggccagattacctactacaacagatacaagagacagaacgtagtcaaggacctgtccgtcgagctggatagactgagcgaagaatctgtgaacaacgacatctcctcctggacaaagggcagaagcggagaagctctgagcctcctgaagaaaagattctcccatagacccgtgcaggagaagttcgtgtgcctgaactgcggcttcgagacacacgcagccgagcaagccgccctgaacatcgccagatcctggctgttcctgcggagccaggagtacaagaaataccagacaaacaagacaaccggcaacaccgataagagagccttcgtcgagacctggcagtccttttaccggaagaagcttaaggaggtgtggaaacctgccgtgcggtctggcggatctggcggaggctccacaagcatgatcaactaccagacccccgtgagcttcagggacgtggtggtgggcttcacccaggaggagtggcacaggctgaaccccacccagagggccctgtacagggacgtgatgctggagacctacagcaacctggtgagcgtgggctacgagggcaccaagcccgacgtgatcctgaggctggagcaggaggaggccccctggatcggcgaggccgcctgcctgggctgccactgctgggaggacaccagccccaagaaaaagagaaaagtctaagctgccttctgcggggcttgccttctggccatgcccttcttctctcccttgcacctgtacctcttggtctttgaataaagcctgagtaggaaggctagcaaaaaaaaaaaaaaaaaaaaaaaaaaaaaaaaaaaaaaaaaaaaaaaaaaaaaaaaaaaaaaaaaaaaaaaaaaaaaaaa

SEQ ID NO: 3159 - RNA, 5419 nt, synthetic construct
  source 1..5419: mol_type = other RNA
aggaaataagagagaaaagaagagtaagaagaaatataagagccaccatggcccctaagaagaagcgtaaagtgagccgggtgaacggcagcggcagcggcggcggcatgaaccacgaccaggagttcgacccccctaaggtgtaccctcccgtccccgccgagaagagaaagcccatccgggtcctgagcctgttcgatggcatcgccaccggtctgctggtgctgaaggacctgggcatccaggtggataggtacattgcctccgaggtgtgcgaggactccatcaccgtgggaatggtgcgtcatcagggcaagatcatgtacgtgggcgacgtgcggagcgtgacacagaagcatatccaggagtggggccctttcgacctggtgatcggcggcagcccttgcaatgacctgagcatcgtgaacccagcccggaagggcctgtacgagggaaccggcagactgttcttcgagttttacagactgctgcacgacgcccggcctaaggaaggcgacgaccggcccttcttttggctgttcgagaatgtggtggccatgggagtcagcgacaagcgggatattagccggttcctggagagcaaccccgtgatgatcgatgccaaggaagtgagcgccgcccaccgggccagatacttctggggcaatctgcctggcatgaacagacccctggccagcaccgtgaacgacaagctggagctgcaggagtgcctggagcacggccggatcgccaagttcagcaaggtgagaaccatcaccacccgaagcaacagcatcaaacaaggcaaggaccagcactttcctgtgttcatgaacgagaaggaggacatcctgtggtgtaccgagatggagagagtgttcgggttcccagtccactacacagatgtcagcaacatgtctagactggccagacagagactgctgggaagaagctggtccgtccctgtgatcagacacctgttcgcccctctgaaggagtacttcgcctgcgtgagcagcggcaacagcaacgccaacagccggggccccagcttctctagcggcctggtgccactgtccctgagagggagccacatgggccccatggagatctacaaaaccgtgagcgcctggaagcggcagcctgtgcgcgtgctgagcctgtttcggaatatcgataaagtcctgaaaagcctgggattcctggagagcggctctggctccggcggtggcaccctgaagtacgtggaggatgtgacaaacgtggtcagacgggatgtggagaagtggggccccttcgatctggtgtacggcagcacccaacccctgggcagctcttgtgaccggtgccctggctggtacatgtttcagttccaccggatcctgcagtacgccctgccgagacaggagtcccagcggccattcttttggattttcatggacaacttgctgctgaccgaggatgaccaggaaactaccactcggttcctgcagaccgaagccgtgaccctgcaggacgtgagaggccgggactaccagaacgccatgcgggtgtggtccaacatccctggactgaaaagcaagcacgcacctctgacccctaaagaagaggagtacctgcaggcccaggtgcggagcagaagcaagctggacgcccctaaggtggatctgctggtgaagaattgcctcctgcccctgagagagtacttcaagtatttcagccagaatagtctgcccctgggcggcccaagcagcggcgcccctcctcccagcggcggcagcccagccggctccccaacctctaccgaggagggcacctctgagtccgccacccccgagagcggccctggcacctccaccgagcccagcgagggcagcgcacccggcagccctgccggcagccccacctccacagaggagggaaccagcaccgagcccagcgaaggcagcgccccaggcaccagcaccgagcctagtgagggcggctctggcggcggcagcgcccaggagattaaacggatcaacaagatcagaagaagacttgtgaaagacagcaacaccaagaaggccggcaagacaggccccatgaaaaccctgctggttagagtgatgacacccgatctgagagagcggctggaaaacctgagaaagaagcctgaaaatatcccccagcccatcagcaatacatctagagccaacctgaataagctgctgaccgattacaccgaaatgaagaaggcgatcctgcatgtgtactgggaagagttccagaaggaccctgtgggcctgatgagccgggtggcccagcctgccagcaagaagatcgatcagaacaagctgaaacctgagatggacgagaagggcaacctgaccaccgccggctttgcctgctctcagtgtggccagcccctgttcgtgtacaagctggagcaggtgtctgagaagggcaaggcttacaccaactacttcggacggtgcaatgtggccgagcacgaaaagctgatcctgctggcccagctgaagcccgagaaggatagcgacgaagccgtgacatatagcctgggaaagtttgggcagagggccctggatttctacagcattcatgtgaccaaggagtccacccaccccgtgaagcccctggcccagatcgccggaaacagatacgcctccggacctgtgggaaaggccctgagcgacgcatgtatgggcacaatcgcctccttcctgtctaagtaccaggacatcatcatcgaacaccagaaggtggtgaagggcaaccagaagagactggagagcctgcgggagctggccggcaaggaaaacctggaataccctagcgtgaccctgccacctcagcctcacaccaaggagggcgttgatgcctacaacgaagtgatcgcccgggtgcgaatgtgggtgaacctgaacctgtggcagaagctgaagctaagcagagatgatgccaagcctctgctgagactgaagggattcccttcctttcctctggtcgagagacaggccaacgaagtggactggtgggacatggtgtgtaacgtgaagaagctgatcaacgagaaaaaggaggatggcaaggtgttttggcagaatctggctggctacaagagacaggaagccctgagaccatacctgagcagcgaggaagatcggaagaagggaaagaaattcgctcggtaccagctgggcgacctgctgctgcacctggaaaagaagcacggcgaggactggggaaaggtgtacgacgaggcctgggagcggattgacaagaaagtggaaggcctgagcaagcacatcaagctggaagaggaacggagaagcgaggacgcccagagcaaggccgccctgaccgactggctgcgggctaaggccagcttcgtgatcgagggcctgaaggaggccgacaaggacgagttctgcagatgcgagctgaagctgcagaagtggtacggggacctgcggggaaagcccttcgccatcgaagccgagaacagcatcctggacatcagcggcttcagcaagcagtacaactgtgccttcatctggcagaaggacggcgtgaagaagctgaacctgtacctgatcatcaactacttcaagggcggcaagctgcggttcaagaagatcaaacctgaagccttcgaagccaacagattctacaccgtgatcaacaaaaagagcggcgagatcgtgcccatggaggtgaacttcaacttcgacgaccccaacctgatcatcctgcctctggcctttggcaagagacagggcagagaattcatctggaacgacctgctgtccctggaaaccggcagcctgaagctggccaacggaagagtgatcgagaagacactgtacaacagaagaacccggcaggatgagcctgccctgttcgtggccctgaccttcgagcggcgggaggtcctggactcctccaatatcaaaccaatgaacctgatcggcgtggcaagaggcgaaaacatccccgccgtgatcgccctgaccgaccccgagggctgcccactgagccggtttaaggatagcctgggaaacccaacccacatcctgagaatcggcgagagctataaggagaagcagcggaccatccaggccaagaaggaggtggagcagcggagagccggcggctacagccggaagtacgccagcaaagccaagaatctggcagacgatatggtgagaaacaccgctagagatctgctgtactacgccgtgacccaggatgccatgctgatcttcgccaacctgagccggggcttcggccggcagggcaagcggaccttcatggccgagagacagtacacacggatggaggactggctgaccgccaagctggcctacgagggcctgagcaagacctacctgtccaagacactggcccagtacacctccaagacatgcagcaactgtgggtttaccatcaccagcgccgactacgacagggtgctggagaagctgaagaagacagcaacaggctggatgaccacaattaacggcaaggagctgaaggtggagggccagattacctactacaacagatacaagagacagaacgtagtcaaggacctgtccgtcgagctggatagactgagcgaagaatctgtgaacaacgacatctcctcctggacaaagggcagaagcggagaagctctgagcctcctgaagaaaagattctcccatagacccgtgcaggagaagttcgtgtgcctgaactgcggcttcgagacacacgcagccgagcaagccgccctgaacatcgccagatcctggctgttcctgcggagccaggagtacaagaaataccagacaaacaagacaaccggcaacaccgataagagagccttcgtcgagacctggcagtccttttaccggaagaagcttaaggaggtgtggaaacctgccgtgcggtctggcggatctggcggaggctccacaagcaagagcgccgccgtgagcttcagcgacgtggccgtgtacttcagcctggaggagtggggctgcctgaggcccgcccagagggccctgtacagggacgtgatgagggagacctacggccacctgggcgccctgggcttccccggccccaagcccgccctgatcagctggatggagcaggagagcgaggcctggagccccgccgcccaggaccccgaggagggcgagagcctgggcggcgccctgaccagccccaagaaaaagagaaaagtctaagctgccttctgcggggcttgccttctggccatgcccttcttctctcccttgcacctgtacctcttggtctttgaataaagcctgagtaggaaggctagcaaaaaaaaaaaaaaaaaaaaaaaaaaaaaaaaaaaaaaaaaaaaaaaaaaaaaaaaaaaaaaaaaaaaaaaaaaaaaaaa

SEQ ID NO: 3160 - RNA, 5419 nt, synthetic construct
  source 1..5419: mol_type = other RNA
aggaaataagagagaaaagaagagtaagaagaaatataagagccaccatggcccctaagaagaagcgtaaagtgagccgggtgaacggcagcggcagcggcggcggcatgaaccacgaccaggagttcgacccccctaaggtgtaccctcccgtccccgccgagaagagaaagcccatccgggtcctgagcctgttcgatggcatcgccaccggtctgctggtgctgaaggacctgggcatccaggtggataggtacattgcctccgaggtgtgcgaggactccatcaccgtgggaatggtgcgtcatcagggcaagatcatgtacgtgggcgacgtgcggagcgtgacacagaagcatatccaggagtggggccctttcgacctggtgatcggcggcagcccttgcaatgacctgagcatcgtgaacccagcccggaagggcctgtacgagggaaccggcagactgttcttcgagttttacagactgctgcacgacgcccggcctaaggaaggcgacgaccggcccttcttttggctgttcgagaatgtggtggccatgggagtcagcgacaagcgggatattagccggttcctggagagcaaccccgtgatgatcgatgccaaggaagtgagcgccgcccaccgggccagatacttctggggcaatctgcctggcatgaacagacccctggccagcaccgtgaacgacaagctggagctgcaggagtgcctggagcacggccggatcgccaagttcagcaaggtgagaaccatcaccacccgaagcaacagcatcaaacaaggcaaggaccagcactttcctgtgttcatgaacgagaaggaggacatcctgtggtgtaccgagatggagagagtgttcgggttcccagtccactacacagatgtcagcaacatgtctagactggccagacagagactgctgggaagaagctggtccgtccctgtgatcagacacctgttcgcccctctgaaggagtacttcgcctgcgtgagcagcggcaacagcaacgccaacagccggggccccagcttctctagcggcctggtgccactgtccctgagagggagccacatgggccccatggagatctacaaaaccgtgagcgcctggaagcggcagcctgtgcgcgtgctgagcctgtttcggaatatcgataaagtcctgaaaagcctgggattcctggagagcggctctggctccggcggtggcaccctgaagtacgtggaggatgtgacaaacgtggtcagacgggatgtggagaagtggggccccttcgatctggtgtacggcagcacccaacccctgggcagctcttgtgaccggtgccctggctggtacatgtttcagttccaccggatcctgcagtacgccctgccgagacaggagtcccagcggccattcttttggattttcatggacaacttgctgctgaccgaggatgaccaggaaactaccactcggttcctgcagaccgaagccgtgaccctgcaggacgtgagaggccgggactaccagaacgccatgcgggtgtggtccaacatccctggactgaaaagcaagcacgcacctctgacccctaaagaagaggagtacctgcaggcccaggtgcggagcagaagcaagctggacgcccctaaggtggatctgctggtgaagaattgcctcctgcccctgagagagtacttcaagtatttcagccagaatagtctgcccctgggcggcccaagcagcggcgcccctcctcccagcggcggcagcccagccggctccccaacctctaccgaggagggcacctctgagtccgccacccccgagagcggccctggcacctccaccgagcccagcgagggcagcgcacccggcagccctgccggcagccccacctccacagaggagggaaccagcaccgagcccagcgaaggcagcgccccaggcaccagcaccgagcctagtgagggcggctctggcggcggcagcgcccaggagattaaacggatcaacaagatcagaagaagacttgtgaaagacagcaacaccaagaaggccggcaagacaggccccatgaaaaccctgctggttagagtgatgacacccgatctgagagagcggctggaaaacctgagaaagaagcctgaaaatatcccccagcccatcagcaatacatctagagccaacctgaataagctgctgaccgattacaccgaaatgaagaaggcgatcctgcatgtgtactgggaagagttccagaaggaccctgtgggcctgatgagccgggtggcccagcctgccagcaagaagatcgatcagaacaagctgaaacctgagatggacgagaagggcaacctgaccaccgccggctttgcctgctctcagtgtggccagcccctgttcgtgtacaagctggagcaggtgtctgagaagggcaaggcttacaccaactacttcggacggtgcaatgtggccgagcacgaaaagctgatcctgctggcccagctgaagcccgagaaggatagcgacgaagccgtgacatatagcctgggaaagtttgggcagagggccctggatttctacagcattcatgtgaccaaggagtccacccaccccgtgaagcccctggcccagatcgccggaaacagatacgcctccggacctgtgggaaaggccctgagcgacgcatgtatgggcacaatcgcctccttcctgtctaagtaccaggacatcatcatcgaacaccagaaggtggtgaagggcaaccagaagagactggagagcctgcgggagctggccggcaaggaaaacctggaataccctagcgtgaccctgccacctcagcctcacaccaaggagggcgttgatgcctacaacgaagtgatcgcccgggtgcgaatgtgggtgaacctgaacctgtggcagaagctgaagctaagcagagatgatgccaagcctctgctgagactgaagggattcccttcctttcctctggtcgagagacaggccaacgaagtggactggtgggacatggtgtgtaacgtgaagaagctgatcaacgagaaaaaggaggatggcaaggtgttttggcagaatctggctggctacaagagacaggaagccctgagaccatacctgagcagcgaggaagatcggaagaagggaaagaaattcgctcggtaccagctgggcgacctgctgctgcacctggaaaagaagcacggcgaggactggggaaaggtgtacgacgaggcctgggagcggattgacaagaaagtggaaggcctgagcaagcacatcaagctggaagaggaacggagaagcgaggacgcccagagcaaggccgccctgaccgactggctgcgggctaaggccagcttcgtgatcgagggcctgaaggaggccgacaaggacgagttctgcagatgcgagctgaagctgcagaagtggtacggggacctgcggggaaagcccttcgccatcgaagccgagaacagcatcctggacatcagcggcttcagcaagcagtacaactgtgccttcatctggcagaaggacggcgtgaagaagctgaacctgtacctgatcatcaactacttcaagggcggcaagctgcggttcaagaagatcaaacctgaagccttcgaagccaacagattctacaccgtgatcaacaaaaagagcggcgagatcgtgcccatggaggtgaacttcaacttcgacgaccccaacctgatcatcctgcctctggcctttggcaagagacagggcagagaattcatctggaacgacctgctgtccctggaaaccggcagcctgaagctggccaacggaagagtgatcgagaagacactgtacaacagaagaacccggcaggatgagcctgccctgttcgtggccctgaccttcgagcggcgggaggtcctggactcctccaatatcaaaccaatgaacctgatcggcgtggcaagaggcgaaaacatccccgccgtgatcgccctgaccgaccccgagggctgcccactgagccggtttaaggatagcctgggaaacccaacccacatcctgagaatcggcgagagctataaggagaagcagcggaccatccaggccaagaaggaggtggagcagcggagagccggcggctacagccggaagtacgccagcaaagccaagaatctggcagacgatatggtgagaaacaccgctagagatctgctgtactacgccgtgacccaggatgccatgctgatcttcgccaacctgagccggggcttcggccggcagggcaagcggaccttcatggccgagagacagtacacacggatggaggactggctgaccgccaagctggcctacgagggcctgagcaagacctacctgtccaagacactggcccagtacacctccaagacatgcagcaactgtgggtttaccatcaccagcgccgactacgacagggtgctggagaagctgaagaagacagcaacaggctggatgaccacaattaacggcaaggagctgaaggtggagggccagattacctactacaacagatacaagagacagaacgtagtcaaggacctgtccgtcgagctggatagactgagcgaagaatctgtgaacaacgacatctcctcctggacaaagggcagaagcggagaagctctgagcctcctgaagaaaagattctcccatagacccgtgcaggagaagttcgtgtgcctgaactgcggcttcgagacacacgcagccgagcaagccgccctgaacatcgccagatcctggctgttcctgcggagccaggagtacaagaaataccagacaaacaagacaaccggcaacaccgataagagagccttcgtcgagacctggcagtccttttaccggaagaagcttaaggaggtgtggaaacctgccgtgcggtctggcggatctggcggaggctccacaagcccccaggagtgcgtgaccttcaaggacgtggccgtgaacttcacccaggaggagtggcagcagctgaaccccgcccagagggacctgtacagggaggtgatgctggagaactacaggaacctgatcagcctgggcctgcccgtgagcaagcccgacgtgatcttccagctggagcagggcgaggagccctggatgctggacctgcagaggatcgaggagggcgagatcagcaggaacatgtacaccagccccaagaaaaagagaaaagtctaagctgccttctgcggggcttgccttctggccatgcccttcttctctcccttgcacctgtacctcttggtctttgaataaagcctgagtaggaaggctagcaaaaaaaaaaaaaaaaaaaaaaaaaaaaaaaaaaaaaaaaaaaaaaaaaaaaaaaaaaaaaaaaaaaaaaaaaaaaaaaa

SEQ ID NO: 3161 - RNA, 5419 nt, synthetic construct
  source 1..5419: mol_type = other RNA
aggaaataagagagaaaagaagagtaagaagaaatataagagccaccatggcccctaagaagaagcgtaaagtgagccgggtgaacggcagcggcagcggcggcggcatgaaccacgaccaggagttcgacccccctaaggtgtaccctcccgtccccgccgagaagagaaagcccatccgggtcctgagcctgttcgatggcatcgccaccggtctgctggtgctgaaggacctgggcatccaggtggataggtacattgcctccgaggtgtgcgaggactccatcaccgtgggaatggtgcgtcatcagggcaagatcatgtacgtgggcgacgtgcggagcgtgacacagaagcatatccaggagtggggccctttcgacctggtgatcggcggcagcccttgcaatgacctgagcatcgtgaacccagcccggaagggcctgtacgagggaaccggcagactgttcttcgagttttacagactgctgcacgacgcccggcctaaggaaggcgacgaccggcccttcttttggctgttcgagaatgtggtggccatgggagtcagcgacaagcgggatattagccggttcctggagagcaaccccgtgatgatcgatgccaaggaagtgagcgccgcccaccgggccagatacttctggggcaatctgcctggcatgaacagacccctggccagcaccgtgaacgacaagctggagctgcaggagtgcctggagcacggccggatcgccaagttcagcaaggtgagaaccatcaccacccgaagcaacagcatcaaacaaggcaaggaccagcactttcctgtgttcatgaacgagaaggaggacatcctgtggtgtaccgagatggagagagtgttcgggttcccagtccactacacagatgtcagcaacatgtctagactggccagacagagactgctgggaagaagctggtccgtccctgtgatcagacacctgttcgcccctctgaaggagtacttcgcctgcgtgagcagcggcaacagcaacgccaacagccggggccccagcttctctagcggcctggtgccactgtccctgagagggagccacatgggccccatggagatctacaaaaccgtgagcgcctggaagcggcagcctgtgcgcgtgctgagcctgtttcggaatatcgataaagtcctgaaaagcctgggattcctggagagcggctctggctccggcggtggcaccctgaagtacgtggaggatgtgacaaacgtggtcagacgggatgtggagaagtggggccccttcgatctggtgtacggcagcacccaacccctgggcagctcttgtgaccggtgccctggctggtacatgtttcagttccaccggatcctgcagtacgccctgccgagacaggagtcccagcggccattcttttggattttcatggacaacttgctgctgaccgaggatgaccaggaaactaccactcggttcctgcagaccgaagccgtgaccctgcaggacgtgagaggccgggactaccagaacgccatgcgggtgtggtccaacatccctggactgaaaagcaagcacgcacctctgacccctaaagaagaggagtacctgcaggcccaggtgcggagcagaagcaagctggacgcccctaaggtggatctgctggtgaagaattgcctcctgcccctgagagagtacttcaagtatttcagccagaatagtctgcccctgggcggcccaagcagcggcgcccctcctcccagcggcggcagcccagccggctccccaacctctaccgaggagggcacctctgagtccgccacccccgagagcggccctggcacctccaccgagcccagcgagggcagcgcacccggcagccctgccggcagccccacctccacagaggagggaaccagcaccgagcccagcgaaggcagcgccccaggcaccagcaccgagcctagtgagggcggctctggcggcggcagcgcccaggagattaaacggatcaacaagatcagaagaagacttgtgaaagacagcaacaccaagaaggccggcaagacaggccccatgaaaaccctgctggttagagtgatgacacccgatctgagagagcggctggaaaacctgagaaagaagcctgaaaatatcccccagcccatcagcaatacatctagagccaacctgaataagctgctgaccgattacaccgaaatgaagaaggcgatcctgcatgtgtactgggaagagttccagaaggaccctgtgggcctgatgagccgggtggcccagcctgccagcaagaagatcgatcagaacaagctgaaacctgagatggacgagaagggcaacctgaccaccgccggctttgcctgctctcagtgtggccagcccctgttcgtgtacaagctggagcaggtgtctgagaagggcaaggcttacaccaactacttcggacggtgcaatgtggccgagcacgaaaagctgatcctgctggcccagctgaagcccgagaaggatagcgacgaagccgtgacatatagcctgggaaagtttgggcagagggccctggatttctacagcattcatgtgaccaaggagtccacccaccccgtgaagcccctggcccagatcgccggaaacagatacgcctccggacctgtgggaaaggccctgagcgacgcatgtatgggcacaatcgcctccttcctgtctaagtaccaggacatcatcatcgaacaccagaaggtggtgaagggcaaccagaagagactggagagcctgcgggagctggccggcaaggaaaacctggaataccctagcgtgaccctgccacctcagcctcacaccaaggagggcgttgatgcctacaacgaagtgatcgcccgggtgcgaatgtgggtgaacctgaacctgtggcagaagctgaagctaagcagagatgatgccaagcctctgctgagactgaagggattcccttcctttcctctggtcgagagacaggccaacgaagtggactggtgggacatggtgtgtaacgtgaagaagctgatcaacgagaaaaaggaggatggcaaggtgttttggcagaatctggctggctacaagagacaggaagccctgagaccatacctgagcagcgaggaagatcggaagaagggaaagaaattcgctcggtaccagctgggcgacctgctgctgcacctggaaaagaagcacggcgaggactggggaaaggtgtacgacgaggcctgggagcggattgacaagaaagtggaaggcctgagcaagcacatcaagctggaagaggaacggagaagcgaggacgcccagagcaaggccgccctgaccgactggctgcgggctaaggccagcttcgtgatcgagggcctgaaggaggccgacaaggacgagttctgcagatgcgagctgaagctgcagaagtggtacggggacctgcggggaaagcccttcgccatcgaagccgagaacagcatcctggacatcagcggcttcagcaagcagtacaactgtgccttcatctggcagaaggacggcgtgaagaagctgaacctgtacctgatcatcaactacttcaagggcggcaagctgcggttcaagaagatcaaacctgaagccttcgaagccaacagattctacaccgtgatcaacaaaaagagcggcgagatcgtgcccatggaggtgaacttcaacttcgacgaccccaacctgatcatcctgcctctggcctttggcaagagacagggcagagaattcatctggaacgacctgctgtccctggaaaccggcagcctgaagctggccaacggaagagtgatcgagaagacactgtacaacagaagaacccggcaggatgagcctgccctgttcgtggccctgaccttcgagcggcgggaggtcctggactcctccaatatcaaaccaatgaacctgatcggcgtggcaagaggcgaaaacatccccgccgtgatcgccctgaccgaccccgagggctgcccactgagccggtttaaggatagcctgggaaacccaacccacatcctgagaatcggcgagagctataaggagaagcagcggaccatccaggccaagaaggaggtggagcagcggagagccggcggctacagccggaagtacgccagcaaagccaagaatctggcagacgatatggtgagaaacaccgctagagatctgctgtactacgccgtgacccaggatgccatgctgatcttcgccaacctgagccggggcttcggccggcagggcaagcggaccttcatggccgagagacagtacacacggatggaggactggctgaccgccaagctggcctacgagggcctgagcaagacctacctgtccaagacactggcccagtacacctccaagacatgcagcaactgtgggtttaccatcaccagcgccgactacgacagggtgctggagaagctgaagaagacagcaacaggctggatgaccacaattaacggcaaggagctgaaggtggagggccagattacctactacaacagatacaagagacagaacgtagtcaaggacctgtccgtcgagctggatagactgagcgaagaatctgtgaacaacgacatctcctcctggacaaagggcagaagcggagaagctctgagcctcctgaagaaaagattctcccatagacccgtgcaggagaagttcgtgtgcctgaactgcggcttcgagacacacgcagccgagcaagccgccctgaacatcgccagatcctggctgttcctgcggagccaggagtacaagaaataccagacaaacaagacaaccggcaacaccgataagagagccttcgtcgagacctggcagtccttttaccggaagaagcttaaggaggtgtggaaacctgccgtgcggtctggcggatctggcggaggctccacaagcgagatgggcctgctgaccttcagggacatcgccatcgagttcagcctggaggagtggcagtgcctggactgcgcccagaggaacctgtacagggacgtgatgctggagaactacaggaacctggtgagcctgggcatcgccgtgagcaagcccgacctgatcacctgcctggagcagaacaaggagagccagaacatcaagaggaacaagatggtggccaagcaccccgtgatgcacagccacaccagccccaagaaaaagagaaaagtctaagctgccttctgcggggcttgccttctggccatgcccttcttctctcccttgcacctgtacctcttggtctttgaataaagcctgagtaggaaggctagcaaaaaaaaaaaaaaaaaaaaaaaaaaaaaaaaaaaaaaaaaaaaaaaaaaaaaaaaaaaaaaaaaaaaaaaaaaaaaaaa

SEQ ID NO: 3162 - RNA, 5419 nt, synthetic construct
  source 1..5419: mol_type = other RNA
aggaaataagagagaaaagaagagtaagaagaaatataagagccaccatggcccctaagaagaagcgtaaagtgagccgggtgaacggcagcggcagcggcggcggcatgaaccacgaccaggagttcgacccccctaaggtgtaccctcccgtccccgccgagaagagaaagcccatccgggtcctgagcctgttcgatggcatcgccaccggtctgctggtgctgaaggacctgggcatccaggtggataggtacattgcctccgaggtgtgcgaggactccatcaccgtgggaatggtgcgtcatcagggcaagatcatgtacgtgggcgacgtgcggagcgtgacacagaagcatatccaggagtggggccctttcgacctggtgatcggcggcagcccttgcaatgacctgagcatcgtgaacccagcccggaagggcctgtacgagggaaccggcagactgttcttcgagttttacagactgctgcacgacgcccggcctaaggaaggcgacgaccggcccttcttttggctgttcgagaatgtggtggccatgggagtcagcgacaagcgggatattagccggttcctggagagcaaccccgtgatgatcgatgccaaggaagtgagcgccgcccaccgggccagatacttctggggcaatctgcctggcatgaacagacccctggccagcaccgtgaacgacaagctggagctgcaggagtgcctggagcacggccggatcgccaagttcagcaaggtgagaaccatcaccacccgaagcaacagcatcaaacaaggcaaggaccagcactttcctgtgttcatgaacgagaaggaggacatcctgtggtgtaccgagatggagagagtgttcgggttcccagtccactacacagatgtcagcaacatgtctagactggccagacagagactgctgggaagaagctggtccgtccctgtgatcagacacctgttcgcccctctgaaggagtacttcgcctgcgtgagcagcggcaacagcaacgccaacagccggggccccagcttctctagcggcctggtgccactgtccctgagagggagccacatgggccccatggagatctacaaaaccgtgagcgcctggaagcggcagcctgtgcgcgtgctgagcctgtttcggaatatcgataaagtcctgaaaagcctgggattcctggagagcggctctggctccggcggtggcaccctgaagtacgtggaggatgtgacaaacgtggtcagacgggatgtggagaagtggggccccttcgatctggtgtacggcagcacccaacccctgggcagctcttgtgaccggtgccctggctggtacatgtttcagttccaccggatcctgcagtacgccctgccgagacaggagtcccagcggccattcttttggattttcatggacaacttgctgctgaccgaggatgaccaggaaactaccactcggttcctgcagaccgaagccgtgaccctgcaggacgtgagaggccgggactaccagaacgccatgcgggtgtggtccaacatccctggactgaaaagcaagcacgcacctctgacccctaaagaagaggagtacctgcaggcccaggtgcggagcagaagcaagctggacgcccctaaggtggatctgctggtgaagaattgcctcctgcccctgagagagtacttcaagtatttcagccagaatagtctgcccctgggcggcccaagcagcggcgcccctcctcccagcggcggcagcccagccggctccccaacctctaccgaggagggcacctctgagtccgccacccccgagagcggccctggcacctccaccgagcccagcgagggcagcgcacccggcagccctgccggcagccccacctccacagaggagggaaccagcaccgagcccagcgaaggcagcgccccaggcaccagcaccgagcctagtgagggcggctctggcggcggcagcgcccaggagattaaacggatcaacaagatcagaagaagacttgtgaaagacagcaacaccaagaaggccggcaagacaggccccatgaaaaccctgctggttagagtgatgacacccgatctgagagagcggctggaaaacctgagaaagaagcctgaaaatatcccccagcccatcagcaatacatctagagccaacctgaataagctgctgaccgattacaccgaaatgaagaaggcgatcctgcatgtgtactgggaagagttccagaaggaccctgtgggcctgatgagccgggtggcccagcctgccagcaagaagatcgatcagaacaagctgaaacctgagatggacgagaagggcaacctgaccaccgccggctttgcctgctctcagtgtggccagcccctgttcgtgtacaagctggagcaggtgtctgagaagggcaaggcttacaccaactacttcggacggtgcaatgtggccgagcacgaaaagctgatcctgctggcccagctgaagcccgagaaggatagcgacgaagccgtgacatatagcctgggaaagtttgggcagagggccctggatttctacagcattcatgtgaccaaggagtccacccaccccgtgaagcccctggcccagatcgccggaaacagatacgcctccggacctgtgggaaaggccctgagcgacgcatgtatgggcacaatcgcctccttcctgtctaagtaccaggacatcatcatcgaacaccagaaggtggtgaagggcaaccagaagagactggagagcctgcgggagctggccggcaaggaaaacctggaataccctagcgtgaccctgccacctcagcctcacaccaaggagggcgttgatgcctacaacgaagtgatcgcccgggtgcgaatgtgggtgaacctgaacctgtggcagaagctgaagctaagcagagatgatgccaagcctctgctgagactgaagggattcccttcctttcctctggtcgagagacaggccaacgaagtggactggtgggacatggtgtgtaacgtgaagaagctgatcaacgagaaaaaggaggatggcaaggtgttttggcagaatctggctggctacaagagacaggaagccctgagaccatacctgagcagcgaggaagatcggaagaagggaaagaaattcgctcggtaccagctgggcgacctgctgctgcacctggaaaagaagcacggcgaggactggggaaaggtgtacgacgaggcctgggagcggattgacaagaaagtggaaggcctgagcaagcacatcaagctggaagaggaacggagaagcgaggacgcccagagcaaggccgccctgaccgactggctgcgggctaaggccagcttcgtgatcgagggcctgaaggaggccgacaaggacgagttctgcagatgcgagctgaagctgcagaagtggtacggggacctgcggggaaagcccttcgccatcgaagccgagaacagcatcctggacatcagcggcttcagcaagcagtacaactgtgccttcatctggcagaaggacggcgtgaagaagctgaacctgtacctgatcatcaactacttcaagggcggcaagctgcggttcaagaagatcaaacctgaagccttcgaagccaacagattctacaccgtgatcaacaaaaagagcggcgagatcgtgcccatggaggtgaacttcaacttcgacgaccccaacctgatcatcctgcctctggcctttggcaagagacagggcagagaattcatctggaacgacctgctgtccctggaaaccggcagcctgaagctggccaacggaagagtgatcgagaagacactgtacaacagaagaacccggcaggatgagcctgccctgttcgtggccctgaccttcgagcggcgggaggtcctggactcctccaatatcaaaccaatgaacctgatcggcgtggcaagaggcgaaaacatccccgccgtgatcgccctgaccgaccccgagggctgcccactgagccggtttaaggatagcctgggaaacccaacccacatcctgagaatcggcgagagctataaggagaagcagcggaccatccaggccaagaaggaggtggagcagcggagagccggcggctacagccggaagtacgccagcaaagccaagaatctggcagacgatatggtgagaaacaccgctagagatctgctgtactacgccgtgacccaggatgccatgctgatcttcgccaacctgagccggggcttcggccggcagggcaagcggaccttcatggccgagagacagtacacacggatggaggactggctgaccgccaagctggcctacgagggcctgagcaagacctacctgtccaagacactggcccagtacacctccaagacatgcagcaactgtgggtttaccatcaccagcgccgactacgacagggtgctggagaagctgaagaagacagcaacaggctggatgaccacaattaacggcaaggagctgaaggtggagggccagattacctactacaacagatacaagagacagaacgtagtcaaggacctgtccgtcgagctggatagactgagcgaagaatctgtgaacaacgacatctcctcctggacaaagggcagaagcggagaagctctgagcctcctgaagaaaagattctcccatagacccgtgcaggagaagttcgtgtgcctgaactgcggcttcgagacacacgcagccgagcaagccgccctgaacatcgccagatcctggctgttcctgcggagccaggagtacaagaaataccagacaaacaagacaaccggcaacaccgataagagagccttcgtcgagacctggcagtccttttaccggaagaagcttaaggaggtgtggaaacctgccgtgcggtctggcggatctggcggaggctccacaagcttcgaggagctggtgaccttcgaggacgtgctggtggacttcagccccgaggagctgagcagcctgagcgccgcccagaggaacctgtacagggaggtgatgctggagaactacaggaacctggtgagcctgggccaccagttcagcaagcccgacgtgatcagcaggctggaggaggaggagagccacgccatggagaccgacagcaggcacaccgtgatctgccccggcgagagccacgacaccagccccaagaaaaagagaaaagtctaagctgccttctgcggggcttgccttctggccatgcccttcttctctcccttgcacctgtacctcttggtctttgaataaagcctgagtaggaaggctagcaaaaaaaaaaaaaaaaaaaaaaaaaaaaaaaaaaaaaaaaaaaaaaaaaaaaaaaaaaaaaaaaaaaaaaaaaaaaaaaa

SEQ ID NO: 3163 - RNA, 5419 nt, synthetic construct
  source 1..5419: mol_type = other RNA
aggaaataagagagaaaagaagagtaagaagaaatataagagccaccatggcccctaagaagaagcgtaaagtgagccgggtgaacggcagcggcagcggcggcggcatgaaccacgaccaggagttcgacccccctaaggtgtaccctcccgtccccgccgagaagagaaagcccatccgggtcctgagcctgttcgatggcatcgccaccggtctgctggtgctgaaggacctgggcatccaggtggataggtacattgcctccgaggtgtgcgaggactccatcaccgtgggaatggtgcgtcatcagggcaagatcatgtacgtgggcgacgtgcggagcgtgacacagaagcatatccaggagtggggccctttcgacctggtgatcggcggcagcccttgcaatgacctgagcatcgtgaacccagcccggaagggcctgtacgagggaaccggcagactgttcttcgagttttacagactgctgcacgacgcccggcctaaggaaggcgacgaccggcccttcttttggctgttcgagaatgtggtggccatgggagtcagcgacaagcgggatattagccggttcctggagagcaaccccgtgatgatcgatgccaaggaagtgagcgccgcccaccgggccagatacttctggggcaatctgcctggcatgaacagacccctggccagcaccgtgaacgacaagctggagctgcaggagtgcctggagcacggccggatcgccaagttcagcaaggtgagaaccatcaccacccgaagcaacagcatcaaacaaggcaaggaccagcactttcctgtgttcatgaacgagaaggaggacatcctgtggtgtaccgagatggagagagtgttcgggttcccagtccactacacagatgtcagcaacatgtctagactggccagacagagactgctgggaagaagctggtccgtccctgtgatcagacacctgttcgcccctctgaaggagtacttcgcctgcgtgagcagcggcaacagcaacgccaacagccggggccccagcttctctagcggcctggtgccactgtccctgagagggagccacatgggccccatggagatctacaaaaccgtgagcgcctggaagcggcagcctgtgcgcgtgctgagcctgtttcggaatatcgataaagtcctgaaaagcctgggattcctggagagcggctctggctccggcggtggcaccctgaagtacgtggaggatgtgacaaacgtggtcagacgggatgtggagaagtggggccccttcgatctggtgtacggcagcacccaacccctgggcagctcttgtgaccggtgccctggctggtacatgtttcagttccaccggatcctgcagtacgccctgccgagacaggagtcccagcggccattcttttggattttcatggacaacttgctgctgaccgaggatgaccaggaaactaccactcggttcctgcagaccgaagccgtgaccctgcaggacgtgagaggccgggactaccagaacgccatgcgggtgtggtccaacatccctggactgaaaagcaagcacgcacctctgacccctaaagaagaggagtacctgcaggcccaggtgcggagcagaagcaagctggacgcccctaaggtggatctgctggtgaagaattgcctcctgcccctgagagagtacttcaagtatttcagccagaatagtctgcccctgggcggcccaagcagcggcgcccctcctcccagcggcggcagcccagccggctccccaacctctaccgaggagggcacctctgagtccgccacccccgagagcggccctggcacctccaccgagcccagcgagggcagcgcacccggcagccctgccggcagccccacctccacagaggagggaaccagcaccgagcccagcgaaggcagcgccccaggcaccagcaccgagcctagtgagggcggctctggcggcggcagcgcccaggagattaaacggatcaacaagatcagaagaagacttgtgaaagacagcaacaccaagaaggccggcaagacaggccccatgaaaaccctgctggttagagtgatgacacccgatctgagagagcggctggaaaacctgagaaagaagcctgaaaatatcccccagcccatcagcaatacatctagagccaacctgaataagctgctgaccgattacaccgaaatgaagaaggcgatcctgcatgtgtactgggaagagttccagaaggaccctgtgggcctgatgagccgggtggcccagcctgccagcaagaagatcgatcagaacaagctgaaacctgagatggacgagaagggcaacctgaccaccgccggctttgcctgctctcagtgtggccagcccctgttcgtgtacaagctggagcaggtgtctgagaagggcaaggcttacaccaactacttcggacggtgcaatgtggccgagcacgaaaagctgatcctgctggcccagctgaagcccgagaaggatagcgacgaagccgtgacatatagcctgggaaagtttgggcagagggccctggatttctacagcattcatgtgaccaaggagtccacccaccccgtgaagcccctggcccagatcgccggaaacagatacgcctccggacctgtgggaaaggccctgagcgacgcatgtatgggcacaatcgcctccttcctgtctaagtaccaggacatcatcatcgaacaccagaaggtggtgaagggcaaccagaagagactggagagcctgcgggagctggccggcaaggaaaacctggaataccctagcgtgaccctgccacctcagcctcacaccaaggagggcgttgatgcctacaacgaagtgatcgcccgggtgcgaatgtgggtgaacctgaacctgtggcagaagctgaagctaagcagagatgatgccaagcctctgctgagactgaagggattcccttcctttcctctggtcgagagacaggccaacgaagtggactggtgggacatggtgtgtaacgtgaagaagctgatcaacgagaaaaaggaggatggcaaggtgttttggcagaatctggctggctacaagagacaggaagccctgagaccatacctgagcagcgaggaagatcggaagaagggaaagaaattcgctcggtaccagctgggcgacctgctgctgcacctggaaaagaagcacggcgaggactggggaaaggtgtacgacgaggcctgggagcggattgacaagaaagtggaaggcctgagcaagcacatcaagctggaagaggaacggagaagcgaggacgcccagagcaaggccgccctgaccgactggctgcgggctaaggccagcttcgtgatcgagggcctgaaggaggccgacaaggacgagttctgcagatgcgagctgaagctgcagaagtggtacggggacctgcggggaaagcccttcgccatcgaagccgagaacagcatcctggacatcagcggcttcagcaagcagtacaactgtgccttcatctggcagaaggacggcgtgaagaagctgaacctgtacctgatcatcaactacttcaagggcggcaagctgcggttcaagaagatcaaacctgaagccttcgaagccaacagattctacaccgtgatcaacaaaaagagcggcgagatcgtgcccatggaggtgaacttcaacttcgacgaccccaacctgatcatcctgcctctggcctttggcaagagacagggcagagaattcatctggaacgacctgctgtccctggaaaccggcagcctgaagctggccaacggaagagtgatcgagaagacactgtacaacagaagaacccggcaggatgagcctgccctgttcgtggccctgaccttcgagcggcgggaggtcctggactcctccaatatcaaaccaatgaacctgatcggcgtggcaagaggcgaaaacatccccgccgtgatcgccctgaccgaccccgagggctgcccactgagccggtttaaggatagcctgggaaacccaacccacatcctgagaatcggcgagagctataaggagaagcagcggaccatccaggccaagaaggaggtggagcagcggagagccggcggctacagccggaagtacgccagcaaagccaagaatctggcagacgatatggtgagaaacaccgctagagatctgctgtactacgccgtgacccaggatgccatgctgatcttcgccaacctgagccggggcttcggccggcagggcaagcggaccttcatggccgagagacagtacacacggatggaggactggctgaccgccaagctggcctacgagggcctgagcaagacctacctgtccaagacactggcccagtacacctccaagacatgcagcaactgtgggtttaccatcaccagcgccgactacgacagggtgctggagaagctgaagaagacagcaacaggctggatgaccacaattaacggcaaggagctgaaggtggagggccagattacctactacaacagatacaagagacagaacgtagtcaaggacctgtccgtcgagctggatagactgagcgaagaatctgtgaacaacgacatctcctcctggacaaagggcagaagcggagaagctctgagcctcctgaagaaaagattctcccatagacccgtgcaggagaagttcgtgtgcctgaactgcggcttcgagacacacgcagccgagcaagccgccctgaacatcgccagatcctggctgttcctgcggagccaggagtacaagaaataccagacaaacaagacaaccggcaacaccgataagagagccttcgtcgagacctggcagtccttttaccggaagaagcttaaggaggtgtggaaacctgccgtgcggtctggcggatctggcggaggctccacaagcatgatgaccgccgtgagcctgaccaccaggccccaggagagcgtggccttcgaggacgtggccgtgtacttcaccgccaaggagtgggacatcatggtgcccgccgagagggccctgtacagggacgtgatgctggagaactacgaggccgtggccttcgtggtgccccccaccagcaagcccgccctggtgagccacctggagcagggcaaggagagctgcttcaccaggccccagggcgtgaccagccccaagaaaaagagaaaagtctaagctgccttctgcggggcttgccttctggccatgcccttcttctctcccttgcacctgtacctcttggtctttgaataaagcctgagtaggaaggctagcaaaaaaaaaaaaaaaaaaaaaaaaaaaaaaaaaaaaaaaaaaaaaaaaaaaaaaaaaaaaaaaaaaaaaaaaaaaaaaaa

SEQ ID NO: 3164 - RNA, 5419 nt, synthetic construct
  source 1..5419: mol_type = other RNA
aggaaataagagagaaaagaagagtaagaagaaatataagagccaccatggcccctaagaagaagcgtaaagtgagccgggtgaacggcagcggcagcggcggcggcatgaaccacgaccaggagttcgacccccctaaggtgtaccctcccgtccccgccgagaagagaaagcccatccgggtcctgagcctgttcgatggcatcgccaccggtctgctggtgctgaaggacctgggcatccaggtggataggtacattgcctccgaggtgtgcgaggactccatcaccgtgggaatggtgcgtcatcagggcaagatcatgtacgtgggcgacgtgcggagcgtgacacagaagcatatccaggagtggggccctttcgacctggtgatcggcggcagcccttgcaatgacctgagcatcgtgaacccagcccggaagggcctgtacgagggaaccggcagactgttcttcgagttttacagactgctgcacgacgcccggcctaaggaaggcgacgaccggcccttcttttggctgttcgagaatgtggtggccatgggagtcagcgacaagcgggatattagccggttcctggagagcaaccccgtgatgatcgatgccaaggaagtgagcgccgcccaccgggccagatacttctggggcaatctgcctggcatgaacagacccctggccagcaccgtgaacgacaagctggagctgcaggagtgcctggagcacggccggatcgccaagttcagcaaggtgagaaccatcaccacccgaagcaacagcatcaaacaaggcaaggaccagcactttcctgtgttcatgaacgagaaggaggacatcctgtggtgtaccgagatggagagagtgttcgggttcccagtccactacacagatgtcagcaacatgtctagactggccagacagagactgctgggaagaagctggtccgtccctgtgatcagacacctgttcgcccctctgaaggagtacttcgcctgcgtgagcagcggcaacagcaacgccaacagccggggccccagcttctctagcggcctggtgccactgtccctgagagggagccacatgggccccatggagatctacaaaaccgtgagcgcctggaagcggcagcctgtgcgcgtgctgagcctgtttcggaatatcgataaagtcctgaaaagcctgggattcctggagagcggctctggctccggcggtggcaccctgaagtacgtggaggatgtgacaaacgtggtcagacgggatgtggagaagtggggccccttcgatctggtgtacggcagcacccaacccctgggcagctcttgtgaccggtgccctggctggtacatgtttcagttccaccggatcctgcagtacgccctgccgagacaggagtcccagcggccattcttttggattttcatggacaacttgctgctgaccgaggatgaccaggaaactaccactcggttcctgcagaccgaagccgtgaccctgcaggacgtgagaggccgggactaccagaacgccatgcgggtgtggtccaacatccctggactgaaaagcaagcacgcacctctgacccctaaagaagaggagtacctgcaggcccaggtgcggagcagaagcaagctggacgcccctaaggtggatctgctggtgaagaattgcctcctgcccctgagagagtacttcaagtatttcagccagaatagtctgcccctgggcggcccaagcagcggcgcccctcctcccagcggcggcagcccagccggctccccaacctctaccgaggagggcacctctgagtccgccacccccgagagcggccctggcacctccaccgagcccagcgagggcagcgcacccggcagccctgccggcagccccacctccacagaggagggaaccagcaccgagcccagcgaaggcagcgccccaggcaccagcaccgagcctagtgagggcggctctggcggcggcagcgcccaggagattaaacggatcaacaagatcagaagaagacttgtgaaagacagcaacaccaagaaggccggcaagacaggccccatgaaaaccctgctggttagagtgatgacacccgatctgagagagcggctggaaaacctgagaaagaagcctgaaaatatcccccagcccatcagcaatacatctagagccaacctgaataagctgctgaccgattacaccgaaatgaagaaggcgatcctgcatgtgtactgggaagagttccagaaggaccctgtgggcctgatgagccgggtggcccagcctgccagcaagaagatcgatcagaacaagctgaaacctgagatggacgagaagggcaacctgaccaccgccggctttgcctgctctcagtgtggccagcccctgttcgtgtacaagctggagcaggtgtctgagaagggcaaggcttacaccaactacttcggacggtgcaatgtggccgagcacgaaaagctgatcctgctggcccagctgaagcccgagaaggatagcgacgaagccgtgacatatagcctgggaaagtttgggcagagggccctggatttctacagcattcatgtgaccaaggagtccacccaccccgtgaagcccctggcccagatcgccggaaacagatacgcctccggacctgtgggaaaggccctgagcgacgcatgtatgggcacaatcgcctccttcctgtctaagtaccaggacatcatcatcgaacaccagaaggtggtgaagggcaaccagaagagactggagagcctgcgggagctggccggcaaggaaaacctggaataccctagcgtgaccctgccacctcagcctcacaccaaggagggcgttgatgcctacaacgaagtgatcgcccgggtgcgaatgtgggtgaacctgaacctgtggcagaagctgaagctaagcagagatgatgccaagcctctgctgagactgaagggattcccttcctttcctctggtcgagagacaggccaacgaagtggactggtgggacatggtgtgtaacgtgaagaagctgatcaacgagaaaaaggaggatggcaaggtgttttggcagaatctggctggctacaagagacaggaagccctgagaccatacctgagcagcgaggaagatcggaagaagggaaagaaattcgctcggtaccagctgggcgacctgctgctgcacctggaaaagaagcacggcgaggactggggaaaggtgtacgacgaggcctgggagcggattgacaagaaagtggaaggcctgagcaagcacatcaagctggaagaggaacggagaagcgaggacgcccagagcaaggccgccctgaccgactggctgcgggctaaggccagcttcgtgatcgagggcctgaaggaggccgacaaggacgagttctgcagatgcgagctgaagctgcagaagtggtacggggacctgcggggaaagcccttcgccatcgaagccgagaacagcatcctggacatcagcggcttcagcaagcagtacaactgtgccttcatctggcagaaggacggcgtgaagaagctgaacctgtacctgatcatcaactacttcaagggcggcaagctgcggttcaagaagatcaaacctgaagccttcgaagccaacagattctacaccgtgatcaacaaaaagagcggcgagatcgtgcccatggaggtgaacttcaacttcgacgaccccaacctgatcatcctgcctctggcctttggcaagagacagggcagagaattcatctggaacgacctgctgtccctggaaaccggcagcctgaagctggccaacggaagagtgatcgagaagacactgtacaacagaagaacccggcaggatgagcctgccctgttcgtggccctgaccttcgagcggcgggaggtcctggactcctccaatatcaaaccaatgaacctgatcggcgtggcaagaggcgaaaacatccccgccgtgatcgccctgaccgaccccgagggctgcccactgagccggtttaaggatagcctgggaaacccaacccacatcctgagaatcggcgagagctataaggagaagcagcggaccatccaggccaagaaggaggtggagcagcggagagccggcggctacagccggaagtacgccagcaaagccaagaatctggcagacgatatggtgagaaacaccgctagagatctgctgtactacgccgtgacccaggatgccatgctgatcttcgccaacctgagccggggcttcggccggcagggcaagcggaccttcatggccgagagacagtacacacggatggaggactggctgaccgccaagctggcctacgagggcctgagcaagacctacctgtccaagacactggcccagtacacctccaagacatgcagcaactgtgggtttaccatcaccagcgccgactacgacagggtgctggagaagctgaagaagacagcaacaggctggatgaccacaattaacggcaaggagctgaaggtggagggccagattacctactacaacagatacaagagacagaacgtagtcaaggacctgtccgtcgagctggatagactgagcgaagaatctgtgaacaacgacatctcctcctggacaaagggcagaagcggagaagctctgagcctcctgaagaaaagattctcccatagacccgtgcaggagaagttcgtgtgcctgaactgcggcttcgagacacacgcagccgagcaagccgccctgaacatcgccagatcctggctgttcctgcggagccaggagtacaagaaataccagacaaacaagacaaccggcaacaccgataagagagccttcgtcgagacctggcagtccttttaccggaagaagcttaaggaggtgtggaaacctgccgtgcggtctggcggatctggcggaggctccacaagcatggtgcacggcagcgtgaccttcagggacgtggccatcgacttcagccaggaggagtgggagtgcctgcagcccgaccagaggaccctgtacagggacgtgatgctggagaactacagccacctgatcagcctggccggcagcagcatcagcaagcccggcgtgatcaccctgctggagcaggagaaggagccctggatggtggtgaggaaggagaccagcaggtggtaccccgacctggagaccagccccaagaaaaagagaaaagtctaagctgccttctgcggggcttgccttctggccatgcccttcttctctcccttgcacctgtacctcttggtctttgaataaagcctgagtaggaaggctagcaaaaaaaaaaaaaaaaaaaaaaaaaaaaaaaaaaaaaaaaaaaaaaaaaaaaaaaaaaaaaaaaaaaaaaaaaaaaaaaa

SEQ ID NO: 3165 - RNA, 5419 nt, synthetic construct
  source 1..5419: mol_type = other RNA
aggaaataagagagaaaagaagagtaagaagaaatataagagccaccatggcccctaagaagaagcgtaaagtgagccgggtgaacggcagcggcagcggcggcggcatgaaccacgaccaggagttcgacccccctaaggtgtaccctcccgtccccgccgagaagagaaagcccatccgggtcctgagcctgttcgatggcatcgccaccggtctgctggtgctgaaggacctgggcatccaggtggataggtacattgcctccgaggtgtgcgaggactccatcaccgtgggaatggtgcgtcatcagggcaagatcatgtacgtgggcgacgtgcggagcgtgacacagaagcatatccaggagtggggccctttcgacctggtgatcggcggcagcccttgcaatgacctgagcatcgtgaacccagcccggaagggcctgtacgagggaaccggcagactgttcttcgagttttacagactgctgcacgacgcccggcctaaggaaggcgacgaccggcccttcttttggctgttcgagaatgtggtggccatgggagtcagcgacaagcgggatattagccggttcctggagagcaaccccgtgatgatcgatgccaaggaagtgagcgccgcccaccgggccagatacttctggggcaatctgcctggcatgaacagacccctggccagcaccgtgaacgacaagctggagctgcaggagtgcctggagcacggccggatcgccaagttcagcaaggtgagaaccatcaccacccgaagcaacagcatcaaacaaggcaaggaccagcactttcctgtgttcatgaacgagaaggaggacatcctgtggtgtaccgagatggagagagtgttcgggttcccagtccactacacagatgtcagcaacatgtctagactggccagacagagactgctgggaagaagctggtccgtccctgtgatcagacacctgttcgcccctctgaaggagtacttcgcctgcgtgagcagcggcaacagcaacgccaacagccggggccccagcttctctagcggcctggtgccactgtccctgagagggagccacatgggccccatggagatctacaaaaccgtgagcgcctggaagcggcagcctgtgcgcgtgctgagcctgtttcggaatatcgataaagtcctgaaaagcctgggattcctggagagcggctctggctccggcggtggcaccctgaagtacgtggaggatgtgacaaacgtggtcagacgggatgtggagaagtggggccccttcgatctggtgtacggcagcacccaacccctgggcagctcttgtgaccggtgccctggctggtacatgtttcagttccaccggatcctgcagtacgccctgccgagacaggagtcccagcggccattcttttggattttcatggacaacttgctgctgaccgaggatgaccaggaaactaccactcggttcctgcagaccgaagccgtgaccctgcaggacgtgagaggccgggactaccagaacgccatgcgggtgtggtccaacatccctggactgaaaagcaagcacgcacctctgacccctaaagaagaggagtacctgcaggcccaggtgcggagcagaagcaagctggacgcccctaaggtggatctgctggtgaagaattgcctcctgcccctgagagagtacttcaagtatttcagccagaatagtctgcccctgggcggcccaagcagcggcgcccctcctcccagcggcggcagcccagccggctccccaacctctaccgaggagggcacctctgagtccgccacccccgagagcggccctggcacctccaccgagcccagcgagggcagcgcacccggcagccctgccggcagccccacctccacagaggagggaaccagcaccgagcccagcgaaggcagcgccccaggcaccagcaccgagcctagtgagggcggctctggcggcggcagcgcccaggagattaaacggatcaacaagatcagaagaagacttgtgaaagacagcaacaccaagaaggccggcaagacaggccccatgaaaaccctgctggttagagtgatgacacccgatctgagagagcggctggaaaacctgagaaagaagcctgaaaatatcccccagcccatcagcaatacatctagagccaacctgaataagctgctgaccgattacaccgaaatgaagaaggcgatcctgcatgtgtactgggaagagttccagaaggaccctgtgggcctgatgagccgggtggcccagcctgccagcaagaagatcgatcagaacaagctgaaacctgagatggacgagaagggcaacctgaccaccgccggctttgcctgctctcagtgtggccagcccctgttcgtgtacaagctggagcaggtgtctgagaagggcaaggcttacaccaactacttcggacggtgcaatgtggccgagcacgaaaagctgatcctgctggcccagctgaagcccgagaaggatagcgacgaagccgtgacatatagcctgggaaagtttgggcagagggccctggatttctacagcattcatgtgaccaaggagtccacccaccccgtgaagcccctggcccagatcgccggaaacagatacgcctccggacctgtgggaaaggccctgagcgacgcatgtatgggcacaatcgcctccttcctgtctaagtaccaggacatcatcatcgaacaccagaaggtggtgaagggcaaccagaagagactggagagcctgcgggagctggccggcaaggaaaacctggaataccctagcgtgaccctgccacctcagcctcacaccaaggagggcgttgatgcctacaacgaagtgatcgcccgggtgcgaatgtgggtgaacctgaacctgtggcagaagctgaagctaagcagagatgatgccaagcctctgctgagactgaagggattcccttcctttcctctggtcgagagacaggccaacgaagtggactggtgggacatggtgtgtaacgtgaagaagctgatcaacgagaaaaaggaggatggcaaggtgttttggcagaatctggctggctacaagagacaggaagccctgagaccatacctgagcagcgaggaagatcggaagaagggaaagaaattcgctcggtaccagctgggcgacctgctgctgcacctggaaaagaagcacggcgaggactggggaaaggtgtacgacgaggcctgggagcggattgacaagaaagtggaaggcctgagcaagcacatcaagctggaagaggaacggagaagcgaggacgcccagagcaaggccgccctgaccgactggctgcgggctaaggccagcttcgtgatcgagggcctgaaggaggccgacaaggacgagttctgcagatgcgagctgaagctgcagaagtggtacggggacctgcggggaaagcccttcgccatcgaagccgagaacagcatcctggacatcagcggcttcagcaagcagtacaactgtgccttcatctggcagaaggacggcgtgaagaagctgaacctgtacctgatcatcaactacttcaagggcggcaagctgcggttcaagaagatcaaacctgaagccttcgaagccaacagattctacaccgtgatcaacaaaaagagcggcgagatcgtgcccatggaggtgaacttcaacttcgacgaccccaacctgatcatcctgcctctggcctttggcaagagacagggcagagaattcatctggaacgacctgctgtccctggaaaccggcagcctgaagctggccaacggaagagtgatcgagaagacactgtacaacagaagaacccggcaggatgagcctgccctgttcgtggccctgaccttcgagcggcgggaggtcctggactcctccaatatcaaaccaatgaacctgatcggcgtggcaagaggcgaaaacatccccgccgtgatcgccctgaccgaccccgagggctgcccactgagccggtttaaggatagcctgggaaacccaacccacatcctgagaatcggcgagagctataaggagaagcagcggaccatccaggccaagaaggaggtggagcagcggagagccggcggctacagccggaagtacgccagcaaagccaagaatctggcagacgatatggtgagaaacaccgctagagatctgctgtactacgccgtgacccaggatgccatgctgatcttcgccaacctgagccggggcttcggccggcagggcaagcggaccttcatggccgagagacagtacacacggatggaggactggctgaccgccaagctggcctacgagggcctgagcaagacctacctgtccaagacactggcccagtacacctccaagacatgcagcaactgtgggtttaccatcaccagcgccgactacgacagggtgctggagaagctgaagaagacagcaacaggctggatgaccacaattaacggcaaggagctgaaggtggagggccagattacctactacaacagatacaagagacagaacgtagtcaaggacctgtccgtcgagctggatagactgagcgaagaatctgtgaacaacgacatctcctcctggacaaagggcagaagcggagaagctctgagcctcctgaagaaaagattctcccatagacccgtgcaggagaagttcgtgtgcctgaactgcggcttcgagacacacgcagccgagcaagccgccctgaacatcgccagatcctggctgttcctgcggagccaggagtacaagaaataccagacaaacaagacaaccggcaacaccgataagagagccttcgtcgagacctggcagtccttttaccggaagaagcttaaggaggtgtggaaacctgccgtgcggtctggcggatctggcggaggctccacaagcccccaggagctggtgaccttcagggacgtggccgtggacttcacccccgaggagtggggccagctgggccccgcccagaaggagctgtaccaggaggtgatgctggagaactacaggaacctggtgtgcctgggcctgaccgtgagcaagcccgacgtgatcagccagctggagcagggcgaggccccctggaggctggagggcggcagcgccaggggcaggtgcctggactggggcatgaggaccagccccaagaaaaagagaaaagtctaagctgccttctgcggggcttgccttctggccatgcccttcttctctcccttgcacctgtacctcttggtctttgaataaagcctgagtaggaaggctagcaaaaaaaaaaaaaaaaaaaaaaaaaaaaaaaaaaaaaaaaaaaaaaaaaaaaaaaaaaaaaaaaaaaaaaaaaaaaaaaa

SEQ ID NO: 3166 - RNA, 5419 nt, synthetic construct
  source 1..5419: mol_type = other RNA
aggaaataagagagaaaagaagagtaagaagaaatataagagccaccatggcccctaagaagaagcgtaaagtgagccgggtgaacggcagcggcagcggcggcggcatgaaccacgaccaggagttcgacccccctaaggtgtaccctcccgtccccgccgagaagagaaagcccatccgggtcctgagcctgttcgatggcatcgccaccggtctgctggtgctgaaggacctgggcatccaggtggataggtacattgcctccgaggtgtgcgaggactccatcaccgtgggaatggtgcgtcatcagggcaagatcatgtacgtgggcgacgtgcggagcgtgacacagaagcatatccaggagtggggccctttcgacctggtgatcggcggcagcccttgcaatgacctgagcatcgtgaacccagcccggaagggcctgtacgagggaaccggcagactgttcttcgagttttacagactgctgcacgacgcccggcctaaggaaggcgacgaccggcccttcttttggctgttcgagaatgtggtggccatgggagtcagcgacaagcgggatattagccggttcctggagagcaaccccgtgatgatcgatgccaaggaagtgagcgccgcccaccgggccagatacttctggggcaatctgcctggcatgaacagacccctggccagcaccgtgaacgacaagctggagctgcaggagtgcctggagcacggccggatcgccaagttcagcaaggtgagaaccatcaccacccgaagcaacagcatcaaacaaggcaaggaccagcactttcctgtgttcatgaacgagaaggaggacatcctgtggtgtaccgagatggagagagtgttcgggttcccagtccactacacagatgtcagcaacatgtctagactggccagacagagactgctgggaagaagctggtccgtccctgtgatcagacacctgttcgcccctctgaaggagtacttcgcctgcgtgagcagcggcaacagcaacgccaacagccggggccccagcttctctagcggcctggtgccactgtccctgagagggagccacatgggccccatggagatctacaaaaccgtgagcgcctggaagcggcagcctgtgcgcgtgctgagcctgtttcggaatatcgataaagtcctgaaaagcctgggattcctggagagcggctctggctccggcggtggcaccctgaagtacgtggaggatgtgacaaacgtggtcagacgggatgtggagaagtggggccccttcgatctggtgtacggcagcacccaacccctgggcagctcttgtgaccggtgccctggctggtacatgtttcagttccaccggatcctgcagtacgccctgccgagacaggagtcccagcggccattcttttggattttcatggacaacttgctgctgaccgaggatgaccaggaaactaccactcggttcctgcagaccgaagccgtgaccctgcaggacgtgagaggccgggactaccagaacgccatgcgggtgtggtccaacatccctggactgaaaagcaagcacgcacctctgacccctaaagaagaggagtacctgcaggcccaggtgcggagcagaagcaagctggacgcccctaaggtggatctgctggtgaagaattgcctcctgcccctgagagagtacttcaagtatttcagccagaatagtctgcccctgggcggcccaagcagcggcgcccctcctcccagcggcggcagcccagccggctccccaacctctaccgaggagggcacctctgagtccgccacccccgagagcggccctggcacctccaccgagcccagcgagggcagcgcacccggcagccctgccggcagccccacctccacagaggagggaaccagcaccgagcccagcgaaggcagcgccccaggcaccagcaccgagcctagtgagggcggctctggcggcggcagcgcccaggagattaaacggatcaacaagatcagaagaagacttgtgaaagacagcaacaccaagaaggccggcaagacaggccccatgaaaaccctgctggttagagtgatgacacccgatctgagagagcggctggaaaacctgagaaagaagcctgaaaatatcccccagcccatcagcaatacatctagagccaacctgaataagctgctgaccgattacaccgaaatgaagaaggcgatcctgcatgtgtactgggaagagttccagaaggaccctgtgggcctgatgagccgggtggcccagcctgccagcaagaagatcgatcagaacaagctgaaacctgagatggacgagaagggcaacctgaccaccgccggctttgcctgctctcagtgtggccagcccctgttcgtgtacaagctggagcaggtgtctgagaagggcaaggcttacaccaactacttcggacggtgcaatgtggccgagcacgaaaagctgatcctgctggcccagctgaagcccgagaaggatagcgacgaagccgtgacatatagcctgggaaagtttgggcagagggccctggatttctacagcattcatgtgaccaaggagtccacccaccccgtgaagcccctggcccagatcgccggaaacagatacgcctccggacctgtgggaaaggccctgagcgacgcatgtatgggcacaatcgcctccttcctgtctaagtaccaggacatcatcatcgaacaccagaaggtggtgaagggcaaccagaagagactggagagcctgcgggagctggccggcaaggaaaacctggaataccctagcgtgaccctgccacctcagcctcacaccaaggagggcgttgatgcctacaacgaagtgatcgcccgggtgcgaatgtgggtgaacctgaacctgtggcagaagctgaagctaagcagagatgatgccaagcctctgctgagactgaagggattcccttcctttcctctggtcgagagacaggccaacgaagtggactggtgggacatggtgtgtaacgtgaagaagctgatcaacgagaaaaaggaggatggcaaggtgttttggcagaatctggctggctacaagagacaggaagccctgagaccatacctgagcagcgaggaagatcggaagaagggaaagaaattcgctcggtaccagctgggcgacctgctgctgcacctggaaaagaagcacggcgaggactggggaaaggtgtacgacgaggcctgggagcggattgacaagaaagtggaaggcctgagcaagcacatcaagctggaagaggaacggagaagcgaggacgcccagagcaaggccgccctgaccgactggctgcgggctaaggccagcttcgtgatcgagggcctgaaggaggccgacaaggacgagttctgcagatgcgagctgaagctgcagaagtggtacggggacctgcggggaaagcccttcgccatcgaagccgagaacagcatcctggacatcagcggcttcagcaagcagtacaactgtgccttcatctggcagaaggacggcgtgaagaagctgaacctgtacctgatcatcaactacttcaagggcggcaagctgcggttcaagaagatcaaacctgaagccttcgaagccaacagattctacaccgtgatcaacaaaaagagcggcgagatcgtgcccatggaggtgaacttcaacttcgacgaccccaacctgatcatcctgcctctggcctttggcaagagacagggcagagaattcatctggaacgacctgctgtccctggaaaccggcagcctgaagctggccaacggaagagtgatcgagaagacactgtacaacagaagaacccggcaggatgagcctgccctgttcgtggccctgaccttcgagcggcgggaggtcctggactcctccaatatcaaaccaatgaacctgatcggcgtggcaagaggcgaaaacatccccgccgtgatcgccctgaccgaccccgagggctgcccactgagccggtttaaggatagcctgggaaacccaacccacatcctgagaatcggcgagagctataaggagaagcagcggaccatccaggccaagaaggaggtggagcagcggagagccggcggctacagccggaagtacgccagcaaagccaagaatctggcagacgatatggtgagaaacaccgctagagatctgctgtactacgccgtgacccaggatgccatgctgatcttcgccaacctgagccggggcttcggccggcagggcaagcggaccttcatggccgagagacagtacacacggatggaggactggctgaccgccaagctggcctacgagggcctgagcaagacctacctgtccaagacactggcccagtacacctccaagacatgcagcaactgtgggtttaccatcaccagcgccgactacgacagggtgctggagaagctgaagaagacagcaacaggctggatgaccacaattaacggcaaggagctgaaggtggagggccagattacctactacaacagatacaagagacagaacgtagtcaaggacctgtccgtcgagctggatagactgagcgaagaatctgtgaacaacgacatctcctcctggacaaagggcagaagcggagaagctctgagcctcctgaagaaaagattctcccatagacccgtgcaggagaagttcgtgtgcctgaactgcggcttcgagacacacgcagccgagcaagccgccctgaacatcgccagatcctggctgttcctgcggagccaggagtacaagaaataccagacaaacaagacaaccggcaacaccgataagagagccttcgtcgagacctggcagtccttttaccggaagaagcttaaggaggtgtggaaacctgccgtgcggtctggcggatctggcggaggctccacaagcaggaagaggggcagcctgaccctggaggacgtggccgtggacttcacctgggaggagtggcagctgctggcccccgcccagaaggccctgtaccaggaggtgatgctggagaactacggcaacctggtgttcgtgggctaccaggccagcaagcccgccgccctgagcaggctggagaggggcgagccctggcccgtggaggacgaggtgcacagccagctgtgccccgagatgaggaaggacaccagccccaagaaaaagagaaaagtctaagctgccttctgcggggcttgccttctggccatgcccttcttctctcccttgcacctgtacctcttggtctttgaataaagcctgagtaggaaggctagcaaaaaaaaaaaaaaaaaaaaaaaaaaaaaaaaaaaaaaaaaaaaaaaaaaaaaaaaaaaaaaaaaaaaaaaaaaaaaaaa

SEQ ID NO: 3167 - RNA, 5419 nt, synthetic construct
  source 1..5419: mol_type = other RNA
aggaaataagagagaaaagaagagtaagaagaaatataagagccaccatggcccctaagaagaagcgtaaagtgagccgggtgaacggcagcggcagcggcggcggcatgaaccacgaccaggagttcgacccccctaaggtgtaccctcccgtccccgccgagaagagaaagcccatccgggtcctgagcctgttcgatggcatcgccaccggtctgctggtgctgaaggacctgggcatccaggtggataggtacattgcctccgaggtgtgcgaggactccatcaccgtgggaatggtgcgtcatcagggcaagatcatgtacgtgggcgacgtgcggagcgtgacacagaagcatatccaggagtggggccctttcgacctggtgatcggcggcagcccttgcaatgacctgagcatcgtgaacccagcccggaagggcctgtacgagggaaccggcagactgttcttcgagttttacagactgctgcacgacgcccggcctaaggaaggcgacgaccggcccttcttttggctgttcgagaatgtggtggccatgggagtcagcgacaagcgggatattagccggttcctggagagcaaccccgtgatgatcgatgccaaggaagtgagcgccgcccaccgggccagatacttctggggcaatctgcctggcatgaacagacccctggccagcaccgtgaacgacaagctggagctgcaggagtgcctggagcacggccggatcgccaagttcagcaaggtgagaaccatcaccacccgaagcaacagcatcaaacaaggcaaggaccagcactttcctgtgttcatgaacgagaaggaggacatcctgtggtgtaccgagatggagagagtgttcgggttcccagtccactacacagatgtcagcaacatgtctagactggccagacagagactgctgggaagaagctggtccgtccctgtgatcagacacctgttcgcccctctgaaggagtacttcgcctgcgtgagcagcggcaacagcaacgccaacagccggggccccagcttctctagcggcctggtgccactgtccctgagagggagccacatgggccccatggagatctacaaaaccgtgagcgcctggaagcggcagcctgtgcgcgtgctgagcctgtttcggaatatcgataaagtcctgaaaagcctgggattcctggagagcggctctggctccggcggtggcaccctgaagtacgtggaggatgtgacaaacgtggtcagacgggatgtggagaagtggggccccttcgatctggtgtacggcagcacccaacccctgggcagctcttgtgaccggtgccctggctggtacatgtttcagttccaccggatcctgcagtacgccctgccgagacaggagtcccagcggccattcttttggattttcatggacaacttgctgctgaccgaggatgaccaggaaactaccactcggttcctgcagaccgaagccgtgaccctgcaggacgtgagaggccgggactaccagaacgccatgcgggtgtggtccaacatccctggactgaaaagcaagcacgcacctctgacccctaaagaagaggagtacctgcaggcccaggtgcggagcagaagcaagctggacgcccctaaggtggatctgctggtgaagaattgcctcctgcccctgagagagtacttcaagtatttcagccagaatagtctgcccctgggcggcccaagcagcggcgcccctcctcccagcggcggcagcccagccggctccccaacctctaccgaggagggcacctctgagtccgccacccccgagagcggccctggcacctccaccgagcccagcgagggcagcgcacccggcagccctgccggcagccccacctccacagaggagggaaccagcaccgagcccagcgaaggcagcgccccaggcaccagcaccgagcctagtgagggcggctctggcggcggcagcgcccaggagattaaacggatcaacaagatcagaagaagacttgtgaaagacagcaacaccaagaaggccggcaagacaggccccatgaaaaccctgctggttagagtgatgacacccgatctgagagagcggctggaaaacctgagaaagaagcctgaaaatatcccccagcccatcagcaatacatctagagccaacctgaataagctgctgaccgattacaccgaaatgaagaaggcgatcctgcatgtgtactgggaagagttccagaaggaccctgtgggcctgatgagccgggtggcccagcctgccagcaagaagatcgatcagaacaagctgaaacctgagatggacgagaagggcaacctgaccaccgccggctttgcctgctctcagtgtggccagcccctgttcgtgtacaagctggagcaggtgtctgagaagggcaaggcttacaccaactacttcggacggtgcaatgtggccgagcacgaaaagctgatcctgctggcccagctgaagcccgagaaggatagcgacgaagccgtgacatatagcctgggaaagtttgggcagagggccctggatttctacagcattcatgtgaccaaggagtccacccaccccgtgaagcccctggcccagatcgccggaaacagatacgcctccggacctgtgggaaaggccctgagcgacgcatgtatgggcacaatcgcctccttcctgtctaagtaccaggacatcatcatcgaacaccagaaggtggtgaagggcaaccagaagagactggagagcctgcgggagctggccggcaaggaaaacctggaataccctagcgtgaccctgccacctcagcctcacaccaaggagggcgttgatgcctacaacgaagtgatcgcccgggtgcgaatgtgggtgaacctgaacctgtggcagaagctgaagctaagcagagatgatgccaagcctctgctgagactgaagggattcccttcctttcctctggtcgagagacaggccaacgaagtggactggtgggacatggtgtgtaacgtgaagaagctgatcaacgagaaaaaggaggatggcaaggtgttttggcagaatctggctggctacaagagacaggaagccctgagaccatacctgagcagcgaggaagatcggaagaagggaaagaaattcgctcggtaccagctgggcgacctgctgctgcacctggaaaagaagcacggcgaggactggggaaaggtgtacgacgaggcctgggagcggattgacaagaaagtggaaggcctgagcaagcacatcaagctggaagaggaacggagaagcgaggacgcccagagcaaggccgccctgaccgactggctgcgggctaaggccagcttcgtgatcgagggcctgaaggaggccgacaaggacgagttctgcagatgcgagctgaagctgcagaagtggtacggggacctgcggggaaagcccttcgccatcgaagccgagaacagcatcctggacatcagcggcttcagcaagcagtacaactgtgccttcatctggcagaaggacggcgtgaagaagctgaacctgtacctgatcatcaactacttcaagggcggcaagctgcggttcaagaagatcaaacctgaagccttcgaagccaacagattctacaccgtgatcaacaaaaagagcggcgagatcgtgcccatggaggtgaacttcaacttcgacgaccccaacctgatcatcctgcctctggcctttggcaagagacagggcagagaattcatctggaacgacctgctgtccctggaaaccggcagcctgaagctggccaacggaagagtgatcgagaagacactgtacaacagaagaacccggcaggatgagcctgccctgttcgtggccctgaccttcgagcggcgggaggtcctggactcctccaatatcaaaccaatgaacctgatcggcgtggcaagaggcgaaaacatccccgccgtgatcgccctgaccgaccccgagggctgcccactgagccggtttaaggatagcctgggaaacccaacccacatcctgagaatcggcgagagctataaggagaagcagcggaccatccaggccaagaaggaggtggagcagcggagagccggcggctacagccggaagtacgccagcaaagccaagaatctggcagacgatatggtgagaaacaccgctagagatctgctgtactacgccgtgacccaggatgccatgctgatcttcgccaacctgagccggggcttcggccggcagggcaagcggaccttcatggccgagagacagtacacacggatggaggactggctgaccgccaagctggcctacgagggcctgagcaagacctacctgtccaagacactggcccagtacacctccaagacatgcagcaactgtgggtttaccatcaccagcgccgactacgacagggtgctggagaagctgaagaagacagcaacaggctggatgaccacaattaacggcaaggagctgaaggtggagggccagattacctactacaacagatacaagagacagaacgtagtcaaggacctgtccgtcgagctggatagactgagcgaagaatctgtgaacaacgacatctcctcctggacaaagggcagaagcggagaagctctgagcctcctgaagaaaagattctcccatagacccgtgcaggagaagttcgtgtgcctgaactgcggcttcgagacacacgcagccgagcaagccgccctgaacatcgccagatcctggctgttcctgcggagccaggagtacaagaaataccagacaaacaagacaaccggcaacaccgataagagagccttcgtcgagacctggcagtccttttaccggaagaagcttaaggaggtgtggaaacctgccgtgcggtctggcggatctggcggaggctccacaagcccccaggagcaggtgaccttcagcgacgtggccgtggacttcaccgtggaggagtggggcaggctggcccccgcccagaaggagctgtacaggagcgtgatgctggagaactacaggaacctggtgtgcctgggcctggccgccagcagccccgacgtgatcggccagctggagaggggcgagggcccctggagggtggagggcaaggtgaggaagggcctgtgcgccgaccagaagaccagcaccagccccaagaaaaagagaaaagtctaagctgccttctgcggggcttgccttctggccatgcccttcttctctcccttgcacctgtacctcttggtctttgaataaagcctgagtaggaaggctagcaaaaaaaaaaaaaaaaaaaaaaaaaaaaaaaaaaaaaaaaaaaaaaaaaaaaaaaaaaaaaaaaaaaaaaaaaaaaaaaa

SEQ ID NO: 3168 - RNA, 5419 nt, synthetic construct
  source 1..5419: mol_type = other RNA
aggaaataagagagaaaagaagagtaagaagaaatataagagccaccatggcccctaagaagaagcgtaaagtgagccgggtgaacggcagcggcagcggcggcggcatgaaccacgaccaggagttcgacccccctaaggtgtaccctcccgtccccgccgagaagagaaagcccatccgggtcctgagcctgttcgatggcatcgccaccggtctgctggtgctgaaggacctgggcatccaggtggataggtacattgcctccgaggtgtgcgaggactccatcaccgtgggaatggtgcgtcatcagggcaagatcatgtacgtgggcgacgtgcggagcgtgacacagaagcatatccaggagtggggccctttcgacctggtgatcggcggcagcccttgcaatgacctgagcatcgtgaacccagcccggaagggcctgtacgagggaaccggcagactgttcttcgagttttacagactgctgcacgacgcccggcctaaggaaggcgacgaccggcccttcttttggctgttcgagaatgtggtggccatgggagtcagcgacaagcgggatattagccggttcctggagagcaaccccgtgatgatcgatgccaaggaagtgagcgccgcccaccgggccagatacttctggggcaatctgcctggcatgaacagacccctggccagcaccgtgaacgacaagctggagctgcaggagtgcctggagcacggccggatcgccaagttcagcaaggtgagaaccatcaccacccgaagcaacagcatcaaacaaggcaaggaccagcactttcctgtgttcatgaacgagaaggaggacatcctgtggtgtaccgagatggagagagtgttcgggttcccagtccactacacagatgtcagcaacatgtctagactggccagacagagactgctgggaagaagctggtccgtccctgtgatcagacacctgttcgcccctctgaaggagtacttcgcctgcgtgagcagcggcaacagcaacgccaacagccggggccccagcttctctagcggcctggtgccactgtccctgagagggagccacatgggccccatggagatctacaaaaccgtgagcgcctggaagcggcagcctgtgcgcgtgctgagcctgtttcggaatatcgataaagtcctgaaaagcctgggattcctggagagcggctctggctccggcggtggcaccctgaagtacgtggaggatgtgacaaacgtggtcagacgggatgtggagaagtggggccccttcgatctggtgtacggcagcacccaacccctgggcagctcttgtgaccggtgccctggctggtacatgtttcagttccaccggatcctgcagtacgccctgccgagacaggagtcccagcggccattcttttggattttcatggacaacttgctgctgaccgaggatgaccaggaaactaccactcggttcctgcagaccgaagccgtgaccctgcaggacgtgagaggccgggactaccagaacgccatgcgggtgtggtccaacatccctggactgaaaagcaagcacgcacctctgacccctaaagaagaggagtacctgcaggcccaggtgcggagcagaagcaagctggacgcccctaaggtggatctgctggtgaagaattgcctcctgcccctgagagagtacttcaagtatttcagccagaatagtctgcccctgggcggcccaagcagcggcgcccctcctcccagcggcggcagcccagccggctccccaacctctaccgaggagggcacctctgagtccgccacccccgagagcggccctggcacctccaccgagcccagcgagggcagcgcacccggcagccctgccggcagccccacctccacagaggagggaaccagcaccgagcccagcgaaggcagcgccccaggcaccagcaccgagcctagtgagggcggctctggcggcggcagcgcccaggagattaaacggatcaacaagatcagaagaagacttgtgaaagacagcaacaccaagaaggccggcaagacaggccccatgaaaaccctgctggttagagtgatgacacccgatctgagagagcggctggaaaacctgagaaagaagcctgaaaatatcccccagcccatcagcaatacatctagagccaacctgaataagctgctgaccgattacaccgaaatgaagaaggcgatcctgcatgtgtactgggaagagttccagaaggaccctgtgggcctgatgagccgggtggcccagcctgccagcaagaagatcgatcagaacaagctgaaacctgagatggacgagaagggcaacctgaccaccgccggctttgcctgctctcagtgtggccagcccctgttcgtgtacaagctggagcaggtgtctgagaagggcaaggcttacaccaactacttcggacggtgcaatgtggccgagcacgaaaagctgatcctgctggcccagctgaagcccgagaaggatagcgacgaagccgtgacatatagcctgggaaagtttgggcagagggccctggatttctacagcattcatgtgaccaaggagtccacccaccccgtgaagcccctggcccagatcgccggaaacagatacgcctccggacctgtgggaaaggccctgagcgacgcatgtatgggcacaatcgcctccttcctgtctaagtaccaggacatcatcatcgaacaccagaaggtggtgaagggcaaccagaagagactggagagcctgcgggagctggccggcaaggaaaacctggaataccctagcgtgaccctgccacctcagcctcacaccaaggagggcgttgatgcctacaacgaagtgatcgcccgggtgcgaatgtgggtgaacctgaacctgtggcagaagctgaagctaagcagagatgatgccaagcctctgctgagactgaagggattcccttcctttcctctggtcgagagacaggccaacgaagtggactggtgggacatggtgtgtaacgtgaagaagctgatcaacgagaaaaaggaggatggcaaggtgttttggcagaatctggctggctacaagagacaggaagccctgagaccatacctgagcagcgaggaagatcggaagaagggaaagaaattcgctcggtaccagctgggcgacctgctgctgcacctggaaaagaagcacggcgaggactggggaaaggtgtacgacgaggcctgggagcggattgacaagaaagtggaaggcctgagcaagcacatcaagctggaagaggaacggagaagcgaggacgcccagagcaaggccgccctgaccgactggctgcgggctaaggccagcttcgtgatcgagggcctgaaggaggccgacaaggacgagttctgcagatgcgagctgaagctgcagaagtggtacggggacctgcggggaaagcccttcgccatcgaagccgagaacagcatcctggacatcagcggcttcagcaagcagtacaactgtgccttcatctggcagaaggacggcgtgaagaagctgaacctgtacctgatcatcaactacttcaagggcggcaagctgcggttcaagaagatcaaacctgaagccttcgaagccaacagattctacaccgtgatcaacaaaaagagcggcgagatcgtgcccatggaggtgaacttcaacttcgacgaccccaacctgatcatcctgcctctggcctttggcaagagacagggcagagaattcatctggaacgacctgctgtccctggaaaccggcagcctgaagctggccaacggaagagtgatcgagaagacactgtacaacagaagaacccggcaggatgagcctgccctgttcgtggccctgaccttcgagcggcgggaggtcctggactcctccaatatcaaaccaatgaacctgatcggcgtggcaagaggcgaaaacatccccgccgtgatcgccctgaccgaccccgagggctgcccactgagccggtttaaggatagcctgggaaacccaacccacatcctgagaatcggcgagagctataaggagaagcagcggaccatccaggccaagaaggaggtggagcagcggagagccggcggctacagccggaagtacgccagcaaagccaagaatctggcagacgatatggtgagaaacaccgctagagatctgctgtactacgccgtgacccaggatgccatgctgatcttcgccaacctgagccggggcttcggccggcagggcaagcggaccttcatggccgagagacagtacacacggatggaggactggctgaccgccaagctggcctacgagggcctgagcaagacctacctgtccaagacactggcccagtacacctccaagacatgcagcaactgtgggtttaccatcaccagcgccgactacgacagggtgctggagaagctgaagaagacagcaacaggctggatgaccacaattaacggcaaggagctgaaggtggagggccagattacctactacaacagatacaagagacagaacgtagtcaaggacctgtccgtcgagctggatagactgagcgaagaatctgtgaacaacgacatctcctcctggacaaagggcagaagcggagaagctctgagcctcctgaagaaaagattctcccatagacccgtgcaggagaagttcgtgtgcctgaactgcggcttcgagacacacgcagccgagcaagccgccctgaacatcgccagatcctggctgttcctgcggagccaggagtacaagaaataccagacaaacaagacaaccggcaacaccgataagagagccttcgtcgagacctggcagtccttttaccggaagaagcttaaggaggtgtggaaacctgccgtgcggtctggcggatctggcggaggctccacaagcatggccgccggccagagggaggccaggccccaggtgagcctgaccttcgaggacgtggccgtgctgttcaccagggacgagtggaggaagctggcccccagccagaggaacctgtacagggacgtgatgctggagaactacaggaacctgctgagcctgggcctgcccttcaccaagccccaggtgatcagcctgctgcagcagggcgaggacccctgggaggtggagaaggagggcagcggcaccagccccaagaaaaagagaaaagtctaagctgccttctgcggggcttgccttctggccatgcccttcttctctcccttgcacctgtacctcttggtctttgaataaagcctgagtaggaaggctagcaaaaaaaaaaaaaaaaaaaaaaaaaaaaaaaaaaaaaaaaaaaaaaaaaaaaaaaaaaaaaaaaaaaaaaaaaaaaaaaa

SEQ ID NO: 3169 - RNA, 5419 nt, synthetic construct
  source 1..5419: mol_type = other RNA
aggaaataagagagaaaagaagagtaagaagaaatataagagccaccatggcccctaagaagaagcgtaaagtgagccgggtgaacggcagcggcagcggcggcggcatgaaccacgaccaggagttcgacccccctaaggtgtaccctcccgtccccgccgagaagagaaagcccatccgggtcctgagcctgttcgatggcatcgccaccggtctgctggtgctgaaggacctgggcatccaggtggataggtacattgcctccgaggtgtgcgaggactccatcaccgtgggaatggtgcgtcatcagggcaagatcatgtacgtgggcgacgtgcggagcgtgacacagaagcatatccaggagtggggccctttcgacctggtgatcggcggcagcccttgcaatgacctgagcatcgtgaacccagcccggaagggcctgtacgagggaaccggcagactgttcttcgagttttacagactgctgcacgacgcccggcctaaggaaggcgacgaccggcccttcttttggctgttcgagaatgtggtggccatgggagtcagcgacaagcgggatattagccggttcctggagagcaaccccgtgatgatcgatgccaaggaagtgagcgccgcccaccgggccagatacttctggggcaatctgcctggcatgaacagacccctggccagcaccgtgaacgacaagctggagctgcaggagtgcctggagcacggccggatcgccaagttcagcaaggtgagaaccatcaccacccgaagcaacagcatcaaacaaggcaaggaccagcactttcctgtgttcatgaacgagaaggaggacatcctgtggtgtaccgagatggagagagtgttcgggttcccagtccactacacagatgtcagcaacatgtctagactggccagacagagactgctgggaagaagctggtccgtccctgtgatcagacacctgttcgcccctctgaaggagtacttcgcctgcgtgagcagcggcaacagcaacgccaacagccggggccccagcttctctagcggcctggtgccactgtccctgagagggagccacatgggccccatggagatctacaaaaccgtgagcgcctggaagcggcagcctgtgcgcgtgctgagcctgtttcggaatatcgataaagtcctgaaaagcctgggattcctggagagcggctctggctccggcggtggcaccctgaagtacgtggaggatgtgacaaacgtggtcagacgggatgtggagaagtggggccccttcgatctggtgtacggcagcacccaacccctgggcagctcttgtgaccggtgccctggctggtacatgtttcagttccaccggatcctgcagtacgccctgccgagacaggagtcccagcggccattcttttggattttcatggacaacttgctgctgaccgaggatgaccaggaaactaccactcggttcctgcagaccgaagccgtgaccctgcaggacgtgagaggccgggactaccagaacgccatgcgggtgtggtccaacatccctggactgaaaagcaagcacgcacctctgacccctaaagaagaggagtacctgcaggcccaggtgcggagcagaagcaagctggacgcccctaaggtggatctgctggtgaagaattgcctcctgcccctgagagagtacttcaagtatttcagccagaatagtctgcccctgggcggcccaagcagcggcgcccctcctcccagcggcggcagcccagccggctccccaacctctaccgaggagggcacctctgagtccgccacccccgagagcggccctggcacctccaccgagcccagcgagggcagcgcacccggcagccctgccggcagccccacctccacagaggagggaaccagcaccgagcccagcgaaggcagcgccccaggcaccagcaccgagcctagtgagggcggctctggcggcggcagcgcccaggagattaaacggatcaacaagatcagaagaagacttgtgaaagacagcaacaccaagaaggccggcaagacaggccccatgaaaaccctgctggttagagtgatgacacccgatctgagagagcggctggaaaacctgagaaagaagcctgaaaatatcccccagcccatcagcaatacatctagagccaacctgaataagctgctgaccgattacaccgaaatgaagaaggcgatcctgcatgtgtactgggaagagttccagaaggaccctgtgggcctgatgagccgggtggcccagcctgccagcaagaagatcgatcagaacaagctgaaacctgagatggacgagaagggcaacctgaccaccgccggctttgcctgctctcagtgtggccagcccctgttcgtgtacaagctggagcaggtgtctgagaagggcaaggcttacaccaactacttcggacggtgcaatgtggccgagcacgaaaagctgatcctgctggcccagctgaagcccgagaaggatagcgacgaagccgtgacatatagcctgggaaagtttgggcagagggccctggatttctacagcattcatgtgaccaaggagtccacccaccccgtgaagcccctggcccagatcgccggaaacagatacgcctccggacctgtgggaaaggccctgagcgacgcatgtatgggcacaatcgcctccttcctgtctaagtaccaggacatcatcatcgaacaccagaaggtggtgaagggcaaccagaagagactggagagcctgcgggagctggccggcaaggaaaacctggaataccctagcgtgaccctgccacctcagcctcacaccaaggagggcgttgatgcctacaacgaagtgatcgcccgggtgcgaatgtgggtgaacctgaacctgtggcagaagctgaagctaagcagagatgatgccaagcctctgctgagactgaagggattcccttcctttcctctggtcgagagacaggccaacgaagtggactggtgggacatggtgtgtaacgtgaagaagctgatcaacgagaaaaaggaggatggcaaggtgttttggcagaatctggctggctacaagagacaggaagccctgagaccatacctgagcagcgaggaagatcggaagaagggaaagaaattcgctcggtaccagctgggcgacctgctgctgcacctggaaaagaagcacggcgaggactggggaaaggtgtacgacgaggcctgggagcggattgacaagaaagtggaaggcctgagcaagcacatcaagctggaagaggaacggagaagcgaggacgcccagagcaaggccgccctgaccgactggctgcgggctaaggccagcttcgtgatcgagggcctgaaggaggccgacaaggacgagttctgcagatgcgagctgaagctgcagaagtggtacggggacctgcggggaaagcccttcgccatcgaagccgagaacagcatcctggacatcagcggcttcagcaagcagtacaactgtgccttcatctggcagaaggacggcgtgaagaagctgaacctgtacctgatcatcaactacttcaagggcggcaagctgcggttcaagaagatcaaacctgaagccttcgaagccaacagattctacaccgtgatcaacaaaaagagcggcgagatcgtgcccatggaggtgaacttcaacttcgacgaccccaacctgatcatcctgcctctggcctttggcaagagacagggcagagaattcatctggaacgacctgctgtccctggaaaccggcagcctgaagctggccaacggaagagtgatcgagaagacactgtacaacagaagaacccggcaggatgagcctgccctgttcgtggccctgaccttcgagcggcgggaggtcctggactcctccaatatcaaaccaatgaacctgatcggcgtggcaagaggcgaaaacatccccgccgtgatcgccctgaccgaccccgagggctgcccactgagccggtttaaggatagcctgggaaacccaacccacatcctgagaatcggcgagagctataaggagaagcagcggaccatccaggccaagaaggaggtggagcagcggagagccggcggctacagccggaagtacgccagcaaagccaagaatctggcagacgatatggtgagaaacaccgctagagatctgctgtactacgccgtgacccaggatgccatgctgatcttcgccaacctgagccggggcttcggccggcagggcaagcggaccttcatggccgagagacagtacacacggatggaggactggctgaccgccaagctggcctacgagggcctgagcaagacctacctgtccaagacactggcccagtacacctccaagacatgcagcaactgtgggtttaccatcaccagcgccgactacgacagggtgctggagaagctgaagaagacagcaacaggctggatgaccacaattaacggcaaggagctgaaggtggagggccagattacctactacaacagatacaagagacagaacgtagtcaaggacctgtccgtcgagctggatagactgagcgaagaatctgtgaacaacgacatctcctcctggacaaagggcagaagcggagaagctctgagcctcctgaagaaaagattctcccatagacccgtgcaggagaagttcgtgtgcctgaactgcggcttcgagacacacgcagccgagcaagccgccctgaacatcgccagatcctggctgttcctgcggagccaggagtacaagaaataccagacaaacaagacaaccggcaacaccgataagagagccttcgtcgagacctggcagtccttttaccggaagaagcttaaggaggtgtggaaacctgccgtgcggtctggcggatctggcggaggctccacaagcatggacagcgtggccttcgaggacgtggccatcaacttcacctgcgaggagtgggccctgctgggccccagccagaagagcctgtacagggacgtgatgcaggagaccatcaggaacctggactgcatcggcatgacctggcagacccacgacatcgaggaggaccagtacaaggacctgaggaggaacctgaggtgccacatggtggagaggagctgcgagatcaaggacaacagccagtgcaccagccccaagaaaaagagaaaagtctaagctgccttctgcggggcttgccttctggccatgcccttcttctctcccttgcacctgtacctcttggtctttgaataaagcctgagtaggaaggctagcaaaaaaaaaaaaaaaaaaaaaaaaaaaaaaaaaaaaaaaaaaaaaaaaaaaaaaaaaaaaaaaaaaaaaaaaaaaaaaaa

SEQ ID NO: 3170 - RNA, 5419 nt, synthetic construct
  source 1..5419: mol_type = other RNA
aggaaataagagagaaaagaagagtaagaagaaatataagagccaccatggcccctaagaagaagcgtaaagtgagccgggtgaacggcagcggcagcggcggcggcatgaaccacgaccaggagttcgacccccctaaggtgtaccctcccgtccccgccgagaagagaaagcccatccgggtcctgagcctgttcgatggcatcgccaccggtctgctggtgctgaaggacctgggcatccaggtggataggtacattgcctccgaggtgtgcgaggactccatcaccgtgggaatggtgcgtcatcagggcaagatcatgtacgtgggcgacgtgcggagcgtgacacagaagcatatccaggagtggggccctttcgacctggtgatcggcggcagcccttgcaatgacctgagcatcgtgaacccagcccggaagggcctgtacgagggaaccggcagactgttcttcgagttttacagactgctgcacgacgcccggcctaaggaaggcgacgaccggcccttcttttggctgttcgagaatgtggtggccatgggagtcagcgacaagcgggatattagccggttcctggagagcaaccccgtgatgatcgatgccaaggaagtgagcgccgcccaccgggccagatacttctggggcaatctgcctggcatgaacagacccctggccagcaccgtgaacgacaagctggagctgcaggagtgcctggagcacggccggatcgccaagttcagcaaggtgagaaccatcaccacccgaagcaacagcatcaaacaaggcaaggaccagcactttcctgtgttcatgaacgagaaggaggacatcctgtggtgtaccgagatggagagagtgttcgggttcccagtccactacacagatgtcagcaacatgtctagactggccagacagagactgctgggaagaagctggtccgtccctgtgatcagacacctgttcgcccctctgaaggagtacttcgcctgcgtgagcagcggcaacagcaacgccaacagccggggccccagcttctctagcggcctggtgccactgtccctgagagggagccacatgggccccatggagatctacaaaaccgtgagcgcctggaagcggcagcctgtgcgcgtgctgagcctgtttcggaatatcgataaagtcctgaaaagcctgggattcctggagagcggctctggctccggcggtggcaccctgaagtacgtggaggatgtgacaaacgtggtcagacgggatgtggagaagtggggccccttcgatctggtgtacggcagcacccaacccctgggcagctcttgtgaccggtgccctggctggtacatgtttcagttccaccggatcctgcagtacgccctgccgagacaggagtcccagcggccattcttttggattttcatggacaacttgctgctgaccgaggatgaccaggaaactaccactcggttcctgcagaccgaagccgtgaccctgcaggacgtgagaggccgggactaccagaacgccatgcgggtgtggtccaacatccctggactgaaaagcaagcacgcacctctgacccctaaagaagaggagtacctgcaggcccaggtgcggagcagaagcaagctggacgcccctaaggtggatctgctggtgaagaattgcctcctgcccctgagagagtacttcaagtatttcagccagaatagtctgcccctgggcggcccaagcagcggcgcccctcctcccagcggcggcagcccagccggctccccaacctctaccgaggagggcacctctgagtccgccacccccgagagcggccctggcacctccaccgagcccagcgagggcagcgcacccggcagccctgccggcagccccacctccacagaggagggaaccagcaccgagcccagcgaaggcagcgccccaggcaccagcaccgagcctagtgagggcggctctggcggcggcagcgcccaggagattaaacggatcaacaagatcagaagaagacttgtgaaagacagcaacaccaagaaggccggcaagacaggccccatgaaaaccctgctggttagagtgatgacacccgatctgagagagcggctggaaaacctgagaaagaagcctgaaaatatcccccagcccatcagcaatacatctagagccaacctgaataagctgctgaccgattacaccgaaatgaagaaggcgatcctgcatgtgtactgggaagagttccagaaggaccctgtgggcctgatgagccgggtggcccagcctgccagcaagaagatcgatcagaacaagctgaaacctgagatggacgagaagggcaacctgaccaccgccggctttgcctgctctcagtgtggccagcccctgttcgtgtacaagctggagcaggtgtctgagaagggcaaggcttacaccaactacttcggacggtgcaatgtggccgagcacgaaaagctgatcctgctggcccagctgaagcccgagaaggatagcgacgaagccgtgacatatagcctgggaaagtttgggcagagggccctggatttctacagcattcatgtgaccaaggagtccacccaccccgtgaagcccctggcccagatcgccggaaacagatacgcctccggacctgtgggaaaggccctgagcgacgcatgtatgggcacaatcgcctccttcctgtctaagtaccaggacatcatcatcgaacaccagaaggtggtgaagggcaaccagaagagactggagagcctgcgggagctggccggcaaggaaaacctggaataccctagcgtgaccctgccacctcagcctcacaccaaggagggcgttgatgcctacaacgaagtgatcgcccgggtgcgaatgtgggtgaacctgaacctgtggcagaagctgaagctaagcagagatgatgccaagcctctgctgagactgaagggattcccttcctttcctctggtcgagagacaggccaacgaagtggactggtgggacatggtgtgtaacgtgaagaagctgatcaacgagaaaaaggaggatggcaaggtgttttggcagaatctggctggctacaagagacaggaagccctgagaccatacctgagcagcgaggaagatcggaagaagggaaagaaattcgctcggtaccagctgggcgacctgctgctgcacctggaaaagaagcacggcgaggactggggaaaggtgtacgacgaggcctgggagcggattgacaagaaagtggaaggcctgagcaagcacatcaagctggaagaggaacggagaagcgaggacgcccagagcaaggccgccctgaccgactggctgcgggctaaggccagcttcgtgatcgagggcctgaaggaggccgacaaggacgagttctgcagatgcgagctgaagctgcagaagtggtacggggacctgcggggaaagcccttcgccatcgaagccgagaacagcatcctggacatcagcggcttcagcaagcagtacaactgtgccttcatctggcagaaggacggcgtgaagaagctgaacctgtacctgatcatcaactacttcaagggcggcaagctgcggttcaagaagatcaaacctgaagccttcgaagccaacagattctacaccgtgatcaacaaaaagagcggcgagatcgtgcccatggaggtgaacttcaacttcgacgaccccaacctgatcatcctgcctctggcctttggcaagagacagggcagagaattcatctggaacgacctgctgtccctggaaaccggcagcctgaagctggccaacggaagagtgatcgagaagacactgtacaacagaagaacccggcaggatgagcctgccctgttcgtggccctgaccttcgagcggcgggaggtcctggactcctccaatatcaaaccaatgaacctgatcggcgtggcaagaggcgaaaacatccccgccgtgatcgccctgaccgaccccgagggctgcccactgagccggtttaaggatagcctgggaaacccaacccacatcctgagaatcggcgagagctataaggagaagcagcggaccatccaggccaagaaggaggtggagcagcggagagccggcggctacagccggaagtacgccagcaaagccaagaatctggcagacgatatggtgagaaacaccgctagagatctgctgtactacgccgtgacccaggatgccatgctgatcttcgccaacctgagccggggcttcggccggcagggcaagcggaccttcatggccgagagacagtacacacggatggaggactggctgaccgccaagctggcctacgagggcctgagcaagacctacctgtccaagacactggcccagtacacctccaagacatgcagcaactgtgggtttaccatcaccagcgccgactacgacagggtgctggagaagctgaagaagacagcaacaggctggatgaccacaattaacggcaaggagctgaaggtggagggccagattacctactacaacagatacaagagacagaacgtagtcaaggacctgtccgtcgagctggatagactgagcgaagaatctgtgaacaacgacatctcctcctggacaaagggcagaagcggagaagctctgagcctcctgaagaaaagattctcccatagacccgtgcaggagaagttcgtgtgcctgaactgcggcttcgagacacacgcagccgagcaagccgccctgaacatcgccagatcctggctgttcctgcggagccaggagtacaagaaataccagacaaacaagacaaccggcaacaccgataagagagccttcgtcgagacctggcagtccttttaccggaagaagcttaaggaggtgtggaaacctgccgtgcggtctggcggatctggcggaggctccacaagcccccagggcagcgtgaccttcgaggacgtggccgtggacttcagccaggaggagtgggagctgctggaccccgcccagaggaccctgtacagggaggtgatgctggagacctgcaggaacctggtgagcctgggctgcagcctgtgccagcccgtggcccccccccacctggagcagggcgaggccgtgtggatggtggacaggggcatcccccaggccttctgcagcgactgggagaccaggaccagccccaagaaaaagagaaaagtctaagctgccttctgcggggcttgccttctggccatgcccttcttctctcccttgcacctgtacctcttggtctttgaataaagcctgagtaggaaggctagcaaaaaaaaaaaaaaaaaaaaaaaaaaaaaaaaaaaaaaaaaaaaaaaaaaaaaaaaaaaaaaaaaaaaaaaaaaaaaaaa

SEQ ID NO: 3171 - RNA, 5419 nt, synthetic construct
  source 1..5419: mol_type = other RNA
aggaaataagagagaaaagaagagtaagaagaaatataagagccaccatggcccctaagaagaagcgtaaagtgagccgggtgaacggcagcggcagcggcggcggcatgaaccacgaccaggagttcgacccccctaaggtgtaccctcccgtccccgccgagaagagaaagcccatccgggtcctgagcctgttcgatggcatcgccaccggtctgctggtgctgaaggacctgggcatccaggtggataggtacattgcctccgaggtgtgcgaggactccatcaccgtgggaatggtgcgtcatcagggcaagatcatgtacgtgggcgacgtgcggagcgtgacacagaagcatatccaggagtggggccctttcgacctggtgatcggcggcagcccttgcaatgacctgagcatcgtgaacccagcccggaagggcctgtacgagggaaccggcagactgttcttcgagttttacagactgctgcacgacgcccggcctaaggaaggcgacgaccggcccttcttttggctgttcgagaatgtggtggccatgggagtcagcgacaagcgggatattagccggttcctggagagcaaccccgtgatgatcgatgccaaggaagtgagcgccgcccaccgggccagatacttctggggcaatctgcctggcatgaacagacccctggccagcaccgtgaacgacaagctggagctgcaggagtgcctggagcacggccggatcgccaagttcagcaaggtgagaaccatcaccacccgaagcaacagcatcaaacaaggcaaggaccagcactttcctgtgttcatgaacgagaaggaggacatcctgtggtgtaccgagatggagagagtgttcgggttcccagtccactacacagatgtcagcaacatgtctagactggccagacagagactgctgggaagaagctggtccgtccctgtgatcagacacctgttcgcccctctgaaggagtacttcgcctgcgtgagcagcggcaacagcaacgccaacagccggggccccagcttctctagcggcctggtgccactgtccctgagagggagccacatgggccccatggagatctacaaaaccgtgagcgcctggaagcggcagcctgtgcgcgtgctgagcctgtttcggaatatcgataaagtcctgaaaagcctgggattcctggagagcggctctggctccggcggtggcaccctgaagtacgtggaggatgtgacaaacgtggtcagacgggatgtggagaagtggggccccttcgatctggtgtacggcagcacccaacccctgggcagctcttgtgaccggtgccctggctggtacatgtttcagttccaccggatcctgcagtacgccctgccgagacaggagtcccagcggccattcttttggattttcatggacaacttgctgctgaccgaggatgaccaggaaactaccactcggttcctgcagaccgaagccgtgaccctgcaggacgtgagaggccgggactaccagaacgccatgcgggtgtggtccaacatccctggactgaaaagcaagcacgcacctctgacccctaaagaagaggagtacctgcaggcccaggtgcggagcagaagcaagctggacgcccctaaggtggatctgctggtgaagaattgcctcctgcccctgagagagtacttcaagtatttcagccagaatagtctgcccctgggcggcccaagcagcggcgcccctcctcccagcggcggcagcccagccggctccccaacctctaccgaggagggcacctctgagtccgccacccccgagagcggccctggcacctccaccgagcccagcgagggcagcgcacccggcagccctgccggcagccccacctccacagaggagggaaccagcaccgagcccagcgaaggcagcgccccaggcaccagcaccgagcctagtgagggcggctctggcggcggcagcgcccaggagattaaacggatcaacaagatcagaagaagacttgtgaaagacagcaacaccaagaaggccggcaagacaggccccatgaaaaccctgctggttagagtgatgacacccgatctgagagagcggctggaaaacctgagaaagaagcctgaaaatatcccccagcccatcagcaatacatctagagccaacctgaataagctgctgaccgattacaccgaaatgaagaaggcgatcctgcatgtgtactgggaagagttccagaaggaccctgtgggcctgatgagccgggtggcccagcctgccagcaagaagatcgatcagaacaagctgaaacctgagatggacgagaagggcaacctgaccaccgccggctttgcctgctctcagtgtggccagcccctgttcgtgtacaagctggagcaggtgtctgagaagggcaaggcttacaccaactacttcggacggtgcaatgtggccgagcacgaaaagctgatcctgctggcccagctgaagcccgagaaggatagcgacgaagccgtgacatatagcctgggaaagtttgggcagagggccctggatttctacagcattcatgtgaccaaggagtccacccaccccgtgaagcccctggcccagatcgccggaaacagatacgcctccggacctgtgggaaaggccctgagcgacgcatgtatgggcacaatcgcctccttcctgtctaagtaccaggacatcatcatcgaacaccagaaggtggtgaagggcaaccagaagagactggagagcctgcgggagctggccggcaaggaaaacctggaataccctagcgtgaccctgccacctcagcctcacaccaaggagggcgttgatgcctacaacgaagtgatcgcccgggtgcgaatgtgggtgaacctgaacctgtggcagaagctgaagctaagcagagatgatgccaagcctctgctgagactgaagggattcccttcctttcctctggtcgagagacaggccaacgaagtggactggtgggacatggtgtgtaacgtgaagaagctgatcaacgagaaaaaggaggatggcaaggtgttttggcagaatctggctggctacaagagacaggaagccctgagaccatacctgagcagcgaggaagatcggaagaagggaaagaaattcgctcggtaccagctgggcgacctgctgctgcacctggaaaagaagcacggcgaggactggggaaaggtgtacgacgaggcctgggagcggattgacaagaaagtggaaggcctgagcaagcacatcaagctggaagaggaacggagaagcgaggacgcccagagcaaggccgccctgaccgactggctgcgggctaaggccagcttcgtgatcgagggcctgaaggaggccgacaaggacgagttctgcagatgcgagctgaagctgcagaagtggtacggggacctgcggggaaagcccttcgccatcgaagccgagaacagcatcctggacatcagcggcttcagcaagcagtacaactgtgccttcatctggcagaaggacggcgtgaagaagctgaacctgtacctgatcatcaactacttcaagggcggcaagctgcggttcaagaagatcaaacctgaagccttcgaagccaacagattctacaccgtgatcaacaaaaagagcggcgagatcgtgcccatggaggtgaacttcaacttcgacgaccccaacctgatcatcctgcctctggcctttggcaagagacagggcagagaattcatctggaacgacctgctgtccctggaaaccggcagcctgaagctggccaacggaagagtgatcgagaagacactgtacaacagaagaacccggcaggatgagcctgccctgttcgtggccctgaccttcgagcggcgggaggtcctggactcctccaatatcaaaccaatgaacctgatcggcgtggcaagaggcgaaaacatccccgccgtgatcgccctgaccgaccccgagggctgcccactgagccggtttaaggatagcctgggaaacccaacccacatcctgagaatcggcgagagctataaggagaagcagcggaccatccaggccaagaaggaggtggagcagcggagagccggcggctacagccggaagtacgccagcaaagccaagaatctggcagacgatatggtgagaaacaccgctagagatctgctgtactacgccgtgacccaggatgccatgctgatcttcgccaacctgagccggggcttcggccggcagggcaagcggaccttcatggccgagagacagtacacacggatggaggactggctgaccgccaagctggcctacgagggcctgagcaagacctacctgtccaagacactggcccagtacacctccaagacatgcagcaactgtgggtttaccatcaccagcgccgactacgacagggtgctggagaagctgaagaagacagcaacaggctggatgaccacaattaacggcaaggagctgaaggtggagggccagattacctactacaacagatacaagagacagaacgtagtcaaggacctgtccgtcgagctggatagactgagcgaagaatctgtgaacaacgacatctcctcctggacaaagggcagaagcggagaagctctgagcctcctgaagaaaagattctcccatagacccgtgcaggagaagttcgtgtgcctgaactgcggcttcgagacacacgcagccgagcaagccgccctgaacatcgccagatcctggctgttcctgcggagccaggagtacaagaaataccagacaaacaagacaaccggcaacaccgataagagagccttcgtcgagacctggcagtccttttaccggaagaagcttaaggaggtgtggaaacctgccgtgcggtctggcggatctggcggaggctccacaagcatgagcctgggcagcgagctgttcagggacgtggccatcgtgttcagccaggaggagtggcagtggctggcccccgcccagagggacctgtacagggacgtgatgctggagacctacagcaacctggtgagcctgggcctggccgtgagcaagcccgacgtgatcagcttcctggagcagggcaaggagccctggatggtggagagggtggtgagcggcggcctgtgccccggcgccaagggcaccagccccaagaaaaagagaaaagtctaagctgccttctgcggggcttgccttctggccatgcccttcttctctcccttgcacctgtacctcttggtctttgaataaagcctgagtaggaaggctagcaaaaaaaaaaaaaaaaaaaaaaaaaaaaaaaaaaaaaaaaaaaaaaaaaaaaaaaaaaaaaaaaaaaaaaaaaaaaaaaa

SEQ ID NO: 3172 - RNA, 5419 nt, synthetic construct
  source 1..5419: mol_type = other RNA
aggaaataagagagaaaagaagagtaagaagaaatataagagccaccatggcccctaagaagaagcgtaaagtgagccgggtgaacggcagcggcagcggcggcggcatgaaccacgaccaggagttcgacccccctaaggtgtaccctcccgtccccgccgagaagagaaagcccatccgggtcctgagcctgttcgatggcatcgccaccggtctgctggtgctgaaggacctgggcatccaggtggataggtacattgcctccgaggtgtgcgaggactccatcaccgtgggaatggtgcgtcatcagggcaagatcatgtacgtgggcgacgtgcggagcgtgacacagaagcatatccaggagtggggccctttcgacctggtgatcggcggcagcccttgcaatgacctgagcatcgtgaacccagcccggaagggcctgtacgagggaaccggcagactgttcttcgagttttacagactgctgcacgacgcccggcctaaggaaggcgacgaccggcccttcttttggctgttcgagaatgtggtggccatgggagtcagcgacaagcgggatattagccggttcctggagagcaaccccgtgatgatcgatgccaaggaagtgagcgccgcccaccgggccagatacttctggggcaatctgcctggcatgaacagacccctggccagcaccgtgaacgacaagctggagctgcaggagtgcctggagcacggccggatcgccaagttcagcaaggtgagaaccatcaccacccgaagcaacagcatcaaacaaggcaaggaccagcactttcctgtgttcatgaacgagaaggaggacatcctgtggtgtaccgagatggagagagtgttcgggttcccagtccactacacagatgtcagcaacatgtctagactggccagacagagactgctgggaagaagctggtccgtccctgtgatcagacacctgttcgcccctctgaaggagtacttcgcctgcgtgagcagcggcaacagcaacgccaacagccggggccccagcttctctagcggcctggtgccactgtccctgagagggagccacatgggccccatggagatctacaaaaccgtgagcgcctggaagcggcagcctgtgcgcgtgctgagcctgtttcggaatatcgataaagtcctgaaaagcctgggattcctggagagcggctctggctccggcggtggcaccctgaagtacgtggaggatgtgacaaacgtggtcagacgggatgtggagaagtggggccccttcgatctggtgtacggcagcacccaacccctgggcagctcttgtgaccggtgccctggctggtacatgtttcagttccaccggatcctgcagtacgccctgccgagacaggagtcccagcggccattcttttggattttcatggacaacttgctgctgaccgaggatgaccaggaaactaccactcggttcctgcagaccgaagccgtgaccctgcaggacgtgagaggccgggactaccagaacgccatgcgggtgtggtccaacatccctggactgaaaagcaagcacgcacctctgacccctaaagaagaggagtacctgcaggcccaggtgcggagcagaagcaagctggacgcccctaaggtggatctgctggtgaagaattgcctcctgcccctgagagagtacttcaagtatttcagccagaatagtctgcccctgggcggcccaagcagcggcgcccctcctcccagcggcggcagcccagccggctccccaacctctaccgaggagggcacctctgagtccgccacccccgagagcggccctggcacctccaccgagcccagcgagggcagcgcacccggcagccctgccggcagccccacctccacagaggagggaaccagcaccgagcccagcgaaggcagcgccccaggcaccagcaccgagcctagtgagggcggctctggcggcggcagcgcccaggagattaaacggatcaacaagatcagaagaagacttgtgaaagacagcaacaccaagaaggccggcaagacaggccccatgaaaaccctgctggttagagtgatgacacccgatctgagagagcggctggaaaacctgagaaagaagcctgaaaatatcccccagcccatcagcaatacatctagagccaacctgaataagctgctgaccgattacaccgaaatgaagaaggcgatcctgcatgtgtactgggaagagttccagaaggaccctgtgggcctgatgagccgggtggcccagcctgccagcaagaagatcgatcagaacaagctgaaacctgagatggacgagaagggcaacctgaccaccgccggctttgcctgctctcagtgtggccagcccctgttcgtgtacaagctggagcaggtgtctgagaagggcaaggcttacaccaactacttcggacggtgcaatgtggccgagcacgaaaagctgatcctgctggcccagctgaagcccgagaaggatagcgacgaagccgtgacatatagcctgggaaagtttgggcagagggccctggatttctacagcattcatgtgaccaaggagtccacccaccccgtgaagcccctggcccagatcgccggaaacagatacgcctccggacctgtgggaaaggccctgagcgacgcatgtatgggcacaatcgcctccttcctgtctaagtaccaggacatcatcatcgaacaccagaaggtggtgaagggcaaccagaagagactggagagcctgcgggagctggccggcaaggaaaacctggaataccctagcgtgaccctgccacctcagcctcacaccaaggagggcgttgatgcctacaacgaagtgatcgcccgggtgcgaatgtgggtgaacctgaacctgtggcagaagctgaagctaagcagagatgatgccaagcctctgctgagactgaagggattcccttcctttcctctggtcgagagacaggccaacgaagtggactggtgggacatggtgtgtaacgtgaagaagctgatcaacgagaaaaaggaggatggcaaggtgttttggcagaatctggctggctacaagagacaggaagccctgagaccatacctgagcagcgaggaagatcggaagaagggaaagaaattcgctcggtaccagctgggcgacctgctgctgcacctggaaaagaagcacggcgaggactggggaaaggtgtacgacgaggcctgggagcggattgacaagaaagtggaaggcctgagcaagcacatcaagctggaagaggaacggagaagcgaggacgcccagagcaaggccgccctgaccgactggctgcgggctaaggccagcttcgtgatcgagggcctgaaggaggccgacaaggacgagttctgcagatgcgagctgaagctgcagaagtggtacggggacctgcggggaaagcccttcgccatcgaagccgagaacagcatcctggacatcagcggcttcagcaagcagtacaactgtgccttcatctggcagaaggacggcgtgaagaagctgaacctgtacctgatcatcaactacttcaagggcggcaagctgcggttcaagaagatcaaacctgaagccttcgaagccaacagattctacaccgtgatcaacaaaaagagcggcgagatcgtgcccatggaggtgaacttcaacttcgacgaccccaacctgatcatcctgcctctggcctttggcaagagacagggcagagaattcatctggaacgacctgctgtccctggaaaccggcagcctgaagctggccaacggaagagtgatcgagaagacactgtacaacagaagaacccggcaggatgagcctgccctgttcgtggccctgaccttcgagcggcgggaggtcctggactcctccaatatcaaaccaatgaacctgatcggcgtggcaagaggcgaaaacatccccgccgtgatcgccctgaccgaccccgagggctgcccactgagccggtttaaggatagcctgggaaacccaacccacatcctgagaatcggcgagagctataaggagaagcagcggaccatccaggccaagaaggaggtggagcagcggagagccggcggctacagccggaagtacgccagcaaagccaagaatctggcagacgatatggtgagaaacaccgctagagatctgctgtactacgccgtgacccaggatgccatgctgatcttcgccaacctgagccggggcttcggccggcagggcaagcggaccttcatggccgagagacagtacacacggatggaggactggctgaccgccaagctggcctacgagggcctgagcaagacctacctgtccaagacactggcccagtacacctccaagacatgcagcaactgtgggtttaccatcaccagcgccgactacgacagggtgctggagaagctgaagaagacagcaacaggctggatgaccacaattaacggcaaggagctgaaggtggagggccagattacctactacaacagatacaagagacagaacgtagtcaaggacctgtccgtcgagctggatagactgagcgaagaatctgtgaacaacgacatctcctcctggacaaagggcagaagcggagaagctctgagcctcctgaagaaaagattctcccatagacccgtgcaggagaagttcgtgtgcctgaactgcggcttcgagacacacgcagccgagcaagccgccctgaacatcgccagatcctggctgttcctgcggagccaggagtacaagaaataccagacaaacaagacaaccggcaacaccgataagagagccttcgtcgagacctggcagtccttttaccggaagaagcttaaggaggtgtggaaacctgccgtgcggtctggcggatctggcggaggctccacaagcagccaggagcccgtgaccttcgaggacgtggccgtgtacttcacccagaaccagtgggccagcctggaccccacccagagggccctgtacagggaggtgatgctggagaactacgccaacatcaccagcctggccttccccttccccaagcccgacctgatcctgcagctggagaggggcgaggccaggtggggcctggacccctggatcgccatcgagggcgaggccctgggcggcgtgcacaccagccccaagaaaaagagaaaagtctaagctgccttctgcggggcttgccttctggccatgcccttcttctctcccttgcacctgtacctcttggtctttgaataaagcctgagtaggaaggctagcaaaaaaaaaaaaaaaaaaaaaaaaaaaaaaaaaaaaaaaaaaaaaaaaaaaaaaaaaaaaaaaaaaaaaaaaaaaaaaaa

SEQ ID NO: 3173 - RNA, 5419 nt, synthetic construct
  source 1..5419: mol_type = other RNA
aggaaataagagagaaaagaagagtaagaagaaatataagagccaccatggcccctaagaagaagcgtaaagtgagccgggtgaacggcagcggcagcggcggcggcatgaaccacgaccaggagttcgacccccctaaggtgtaccctcccgtccccgccgagaagagaaagcccatccgggtcctgagcctgttcgatggcatcgccaccggtctgctggtgctgaaggacctgggcatccaggtggataggtacattgcctccgaggtgtgcgaggactccatcaccgtgggaatggtgcgtcatcagggcaagatcatgtacgtgggcgacgtgcggagcgtgacacagaagcatatccaggagtggggccctttcgacctggtgatcggcggcagcccttgcaatgacctgagcatcgtgaacccagcccggaagggcctgtacgagggaaccggcagactgttcttcgagttttacagactgctgcacgacgcccggcctaaggaaggcgacgaccggcccttcttttggctgttcgagaatgtggtggccatgggagtcagcgacaagcgggatattagccggttcctggagagcaaccccgtgatgatcgatgccaaggaagtgagcgccgcccaccgggccagatacttctggggcaatctgcctggcatgaacagacccctggccagcaccgtgaacgacaagctggagctgcaggagtgcctggagcacggccggatcgccaagttcagcaaggtgagaaccatcaccacccgaagcaacagcatcaaacaaggcaaggaccagcactttcctgtgttcatgaacgagaaggaggacatcctgtggtgtaccgagatggagagagtgttcgggttcccagtccactacacagatgtcagcaacatgtctagactggccagacagagactgctgggaagaagctggtccgtccctgtgatcagacacctgttcgcccctctgaaggagtacttcgcctgcgtgagcagcggcaacagcaacgccaacagccggggccccagcttctctagcggcctggtgccactgtccctgagagggagccacatgggccccatggagatctacaaaaccgtgagcgcctggaagcggcagcctgtgcgcgtgctgagcctgtttcggaatatcgataaagtcctgaaaagcctgggattcctggagagcggctctggctccggcggtggcaccctgaagtacgtggaggatgtgacaaacgtggtcagacgggatgtggagaagtggggccccttcgatctggtgtacggcagcacccaacccctgggcagctcttgtgaccggtgccctggctggtacatgtttcagttccaccggatcctgcagtacgccctgccgagacaggagtcccagcggccattcttttggattttcatggacaacttgctgctgaccgaggatgaccaggaaactaccactcggttcctgcagaccgaagccgtgaccctgcaggacgtgagaggccgggactaccagaacgccatgcgggtgtggtccaacatccctggactgaaaagcaagcacgcacctctgacccctaaagaagaggagtacctgcaggcccaggtgcggagcagaagcaagctggacgcccctaaggtggatctgctggtgaagaattgcctcctgcccctgagagagtacttcaagtatttcagccagaatagtctgcccctgggcggcccaagcagcggcgcccctcctcccagcggcggcagcccagccggctccccaacctctaccgaggagggcacctctgagtccgccacccccgagagcggccctggcacctccaccgagcccagcgagggcagcgcacccggcagccctgccggcagccccacctccacagaggagggaaccagcaccgagcccagcgaaggcagcgccccaggcaccagcaccgagcctagtgagggcggctctggcggcggcagcgcccaggagattaaacggatcaacaagatcagaagaagacttgtgaaagacagcaacaccaagaaggccggcaagacaggccccatgaaaaccctgctggttagagtgatgacacccgatctgagagagcggctggaaaacctgagaaagaagcctgaaaatatcccccagcccatcagcaatacatctagagccaacctgaataagctgctgaccgattacaccgaaatgaagaaggcgatcctgcatgtgtactgggaagagttccagaaggaccctgtgggcctgatgagccgggtggcccagcctgccagcaagaagatcgatcagaacaagctgaaacctgagatggacgagaagggcaacctgaccaccgccggctttgcctgctctcagtgtggccagcccctgttcgtgtacaagctggagcaggtgtctgagaagggcaaggcttacaccaactacttcggacggtgcaatgtggccgagcacgaaaagctgatcctgctggcccagctgaagcccgagaaggatagcgacgaagccgtgacatatagcctgggaaagtttgggcagagggccctggatttctacagcattcatgtgaccaaggagtccacccaccccgtgaagcccctggcccagatcgccggaaacagatacgcctccggacctgtgggaaaggccctgagcgacgcatgtatgggcacaatcgcctccttcctgtctaagtaccaggacatcatcatcgaacaccagaaggtggtgaagggcaaccagaagagactggagagcctgcgggagctggccggcaaggaaaacctggaataccctagcgtgaccctgccacctcagcctcacaccaaggagggcgttgatgcctacaacgaagtgatcgcccgggtgcgaatgtgggtgaacctgaacctgtggcagaagctgaagctaagcagagatgatgccaagcctctgctgagactgaagggattcccttcctttcctctggtcgagagacaggccaacgaagtggactggtgggacatggtgtgtaacgtgaagaagctgatcaacgagaaaaaggaggatggcaaggtgttttggcagaatctggctggctacaagagacaggaagccctgagaccatacctgagcagcgaggaagatcggaagaagggaaagaaattcgctcggtaccagctgggcgacctgctgctgcacctggaaaagaagcacggcgaggactggggaaaggtgtacgacgaggcctgggagcggattgacaagaaagtggaaggcctgagcaagcacatcaagctggaagaggaacggagaagcgaggacgcccagagcaaggccgccctgaccgactggctgcgggctaaggccagcttcgtgatcgagggcctgaaggaggccgacaaggacgagttctgcagatgcgagctgaagctgcagaagtggtacggggacctgcggggaaagcccttcgccatcgaagccgagaacagcatcctggacatcagcggcttcagcaagcagtacaactgtgccttcatctggcagaaggacggcgtgaagaagctgaacctgtacctgatcatcaactacttcaagggcggcaagctgcggttcaagaagatcaaacctgaagccttcgaagccaacagattctacaccgtgatcaacaaaaagagcggcgagatcgtgcccatggaggtgaacttcaacttcgacgaccccaacctgatcatcctgcctctggcctttggcaagagacagggcagagaattcatctggaacgacctgctgtccctggaaaccggcagcctgaagctggccaacggaagagtgatcgagaagacactgtacaacagaagaacccggcaggatgagcctgccctgttcgtggccctgaccttcgagcggcgggaggtcctggactcctccaatatcaaaccaatgaacctgatcggcgtggcaagaggcgaaaacatccccgccgtgatcgccctgaccgaccccgagggctgcccactgagccggtttaaggatagcctgggaaacccaacccacatcctgagaatcggcgagagctataaggagaagcagcggaccatccaggccaagaaggaggtggagcagcggagagccggcggctacagccggaagtacgccagcaaagccaagaatctggcagacgatatggtgagaaacaccgctagagatctgctgtactacgccgtgacccaggatgccatgctgatcttcgccaacctgagccggggcttcggccggcagggcaagcggaccttcatggccgagagacagtacacacggatggaggactggctgaccgccaagctggcctacgagggcctgagcaagacctacctgtccaagacactggcccagtacacctccaagacatgcagcaactgtgggtttaccatcaccagcgccgactacgacagggtgctggagaagctgaagaagacagcaacaggctggatgaccacaattaacggcaaggagctgaaggtggagggccagattacctactacaacagatacaagagacagaacgtagtcaaggacctgtccgtcgagctggatagactgagcgaagaatctgtgaacaacgacatctcctcctggacaaagggcagaagcggagaagctctgagcctcctgaagaaaagattctcccatagacccgtgcaggagaagttcgtgtgcctgaactgcggcttcgagacacacgcagccgagcaagccgccctgaacatcgccagatcctggctgttcctgcggagccaggagtacaagaaataccagacaaacaagacaaccggcaacaccgataagagagccttcgtcgagacctggcagtccttttaccggaagaagcttaaggaggtgtggaaacctgccgtgcggtctggcggatctggcggaggctccacaagcgtgaagttcgccgacgtggccgtgtacttcagccccgaggagtggggctgcctgaggcccgcccagagggccctgtacagggacgtgatgagggagaactacggccacctgggcgccctgggctgcgccggccccaagcccgccctgatcagctggctggagaggaacaccgaggactgggagcccgccgccctggacccccaggactgccccaggggcctgatggtgcagaggaagtggcccaccagccccaagaaaaagagaaaagtctaagctgccttctgcggggcttgccttctggccatgcccttcttctctcccttgcacctgtacctcttggtctttgaataaagcctgagtaggaaggctagcaaaaaaaaaaaaaaaaaaaaaaaaaaaaaaaaaaaaaaaaaaaaaaaaaaaaaaaaaaaaaaaaaaaaaaaaaaaaaaaa

SEQ ID NO: 3174 - RNA, 5419 nt, synthetic construct
  source 1..5419: mol_type = other RNA
aggaaataagagagaaaagaagagtaagaagaaatataagagccaccatggcccctaagaagaagcgtaaagtgagccgggtgaacggcagcggcagcggcggcggcatgaaccacgaccaggagttcgacccccctaaggtgtaccctcccgtccccgccgagaagagaaagcccatccgggtcctgagcctgttcgatggcatcgccaccggtctgctggtgctgaaggacctgggcatccaggtggataggtacattgcctccgaggtgtgcgaggactccatcaccgtgggaatggtgcgtcatcagggcaagatcatgtacgtgggcgacgtgcggagcgtgacacagaagcatatccaggagtggggccctttcgacctggtgatcggcggcagcccttgcaatgacctgagcatcgtgaacccagcccggaagggcctgtacgagggaaccggcagactgttcttcgagttttacagactgctgcacgacgcccggcctaaggaaggcgacgaccggcccttcttttggctgttcgagaatgtggtggccatgggagtcagcgacaagcgggatattagccggttcctggagagcaaccccgtgatgatcgatgccaaggaagtgagcgccgcccaccgggccagatacttctggggcaatctgcctggcatgaacagacccctggccagcaccgtgaacgacaagctggagctgcaggagtgcctggagcacggccggatcgccaagttcagcaaggtgagaaccatcaccacccgaagcaacagcatcaaacaaggcaaggaccagcactttcctgtgttcatgaacgagaaggaggacatcctgtggtgtaccgagatggagagagtgttcgggttcccagtccactacacagatgtcagcaacatgtctagactggccagacagagactgctgggaagaagctggtccgtccctgtgatcagacacctgttcgcccctctgaaggagtacttcgcctgcgtgagcagcggcaacagcaacgccaacagccggggccccagcttctctagcggcctggtgccactgtccctgagagggagccacatgggccccatggagatctacaaaaccgtgagcgcctggaagcggcagcctgtgcgcgtgctgagcctgtttcggaatatcgataaagtcctgaaaagcctgggattcctggagagcggctctggctccggcggtggcaccctgaagtacgtggaggatgtgacaaacgtggtcagacgggatgtggagaagtggggccccttcgatctggtgtacggcagcacccaacccctgggcagctcttgtgaccggtgccctggctggtacatgtttcagttccaccggatcctgcagtacgccctgccgagacaggagtcccagcggccattcttttggattttcatggacaacttgctgctgaccgaggatgaccaggaaactaccactcggttcctgcagaccgaagccgtgaccctgcaggacgtgagaggccgggactaccagaacgccatgcgggtgtggtccaacatccctggactgaaaagcaagcacgcacctctgacccctaaagaagaggagtacctgcaggcccaggtgcggagcagaagcaagctggacgcccctaaggtggatctgctggtgaagaattgcctcctgcccctgagagagtacttcaagtatttcagccagaatagtctgcccctgggcggcccaagcagcggcgcccctcctcccagcggcggcagcccagccggctccccaacctctaccgaggagggcacctctgagtccgccacccccgagagcggccctggcacctccaccgagcccagcgagggcagcgcacccggcagccctgccggcagccccacctccacagaggagggaaccagcaccgagcccagcgaaggcagcgccccaggcaccagcaccgagcctagtgagggcggctctggcggcggcagcgcccaggagattaaacggatcaacaagatcagaagaagacttgtgaaagacagcaacaccaagaaggccggcaagacaggccccatgaaaaccctgctggttagagtgatgacacccgatctgagagagcggctggaaaacctgagaaagaagcctgaaaatatcccccagcccatcagcaatacatctagagccaacctgaataagctgctgaccgattacaccgaaatgaagaaggcgatcctgcatgtgtactgggaagagttccagaaggaccctgtgggcctgatgagccgggtggcccagcctgccagcaagaagatcgatcagaacaagctgaaacctgagatggacgagaagggcaacctgaccaccgccggctttgcctgctctcagtgtggccagcccctgttcgtgtacaagctggagcaggtgtctgagaagggcaaggcttacaccaactacttcggacggtgcaatgtggccgagcacgaaaagctgatcctgctggcccagctgaagcccgagaaggatagcgacgaagccgtgacatatagcctgggaaagtttgggcagagggccctggatttctacagcattcatgtgaccaaggagtccacccaccccgtgaagcccctggcccagatcgccggaaacagatacgcctccggacctgtgggaaaggccctgagcgacgcatgtatgggcacaatcgcctccttcctgtctaagtaccaggacatcatcatcgaacaccagaaggtggtgaagggcaaccagaagagactggagagcctgcgggagctggccggcaaggaaaacctggaataccctagcgtgaccctgccacctcagcctcacaccaaggagggcgttgatgcctacaacgaagtgatcgcccgggtgcgaatgtgggtgaacctgaacctgtggcagaagctgaagctaagcagagatgatgccaagcctctgctgagactgaagggattcccttcctttcctctggtcgagagacaggccaacgaagtggactggtgggacatggtgtgtaacgtgaagaagctgatcaacgagaaaaaggaggatggcaaggtgttttggcagaatctggctggctacaagagacaggaagccctgagaccatacctgagcagcgaggaagatcggaagaagggaaagaaattcgctcggtaccagctgggcgacctgctgctgcacctggaaaagaagcacggcgaggactggggaaaggtgtacgacgaggcctgggagcggattgacaagaaagtggaaggcctgagcaagcacatcaagctggaagaggaacggagaagcgaggacgcccagagcaaggccgccctgaccgactggctgcgggctaaggccagcttcgtgatcgagggcctgaaggaggccgacaaggacgagttctgcagatgcgagctgaagctgcagaagtggtacggggacctgcggggaaagcccttcgccatcgaagccgagaacagcatcctggacatcagcggcttcagcaagcagtacaactgtgccttcatctggcagaaggacggcgtgaagaagctgaacctgtacctgatcatcaactacttcaagggcggcaagctgcggttcaagaagatcaaacctgaagccttcgaagccaacagattctacaccgtgatcaacaaaaagagcggcgagatcgtgcccatggaggtgaacttcaacttcgacgaccccaacctgatcatcctgcctctggcctttggcaagagacagggcagagaattcatctggaacgacctgctgtccctggaaaccggcagcctgaagctggccaacggaagagtgatcgagaagacactgtacaacagaagaacccggcaggatgagcctgccctgttcgtggccctgaccttcgagcggcgggaggtcctggactcctccaatatcaaaccaatgaacctgatcggcgtggcaagaggcgaaaacatccccgccgtgatcgccctgaccgaccccgagggctgcccactgagccggtttaaggatagcctgggaaacccaacccacatcctgagaatcggcgagagctataaggagaagcagcggaccatccaggccaagaaggaggtggagcagcggagagccggcggctacagccggaagtacgccagcaaagccaagaatctggcagacgatatggtgagaaacaccgctagagatctgctgtactacgccgtgacccaggatgccatgctgatcttcgccaacctgagccggggcttcggccggcagggcaagcggaccttcatggccgagagacagtacacacggatggaggactggctgaccgccaagctggcctacgagggcctgagcaagacctacctgtccaagacactggcccagtacacctccaagacatgcagcaactgtgggtttaccatcaccagcgccgactacgacagggtgctggagaagctgaagaagacagcaacaggctggatgaccacaattaacggcaaggagctgaaggtggagggccagattacctactacaacagatacaagagacagaacgtagtcaaggacctgtccgtcgagctggatagactgagcgaagaatctgtgaacaacgacatctcctcctggacaaagggcagaagcggagaagctctgagcctcctgaagaaaagattctcccatagacccgtgcaggagaagttcgtgtgcctgaactgcggcttcgagacacacgcagccgagcaagccgccctgaacatcgccagatcctggctgttcctgcggagccaggagtacaagaaataccagacaaacaagacaaccggcaacaccgataagagagccttcgtcgagacctggcagtccttttaccggaagaagcttaaggaggtgtggaaacctgccgtgcggtctggcggatctggcggaggctccacaagcgaccccgcccaggtgcccgtggccgccgacctgctgaccgaccacgaggagcagggctacgtgaccttcgaggacgtggccgtgtacttcagccaggaggagtggaggctgctggacgacgcccagaggctgctgtacaggaacgtgatgctggagaacttcaccctgctggccagcctgggcctggccagcagcaagacccacgagatcacccagctggagagctgggaggagcccttcatgaccagccccaagaaaaagagaaaagtctaagctgccttctgcggggcttgccttctggccatgcccttcttctctcccttgcacctgtacctcttggtctttgaataaagcctgagtaggaaggctagcaaaaaaaaaaaaaaaaaaaaaaaaaaaaaaaaaaaaaaaaaaaaaaaaaaaaaaaaaaaaaaaaaaaaaaaaaaaaaaaa

SEQ ID NO: 3175 - RNA, 5419 nt, synthetic construct
  source 1..5419: mol_type = other RNA
aggaaataagagagaaaagaagagtaagaagaaatataagagccaccatggcccctaagaagaagcgtaaagtgagccgggtgaacggcagcggcagcggcggcggcatgaaccacgaccaggagttcgacccccctaaggtgtaccctcccgtccccgccgagaagagaaagcccatccgggtcctgagcctgttcgatggcatcgccaccggtctgctggtgctgaaggacctgggcatccaggtggataggtacattgcctccgaggtgtgcgaggactccatcaccgtgggaatggtgcgtcatcagggcaagatcatgtacgtgggcgacgtgcggagcgtgacacagaagcatatccaggagtggggccctttcgacctggtgatcggcggcagcccttgcaatgacctgagcatcgtgaacccagcccggaagggcctgtacgagggaaccggcagactgttcttcgagttttacagactgctgcacgacgcccggcctaaggaaggcgacgaccggcccttcttttggctgttcgagaatgtggtggccatgggagtcagcgacaagcgggatattagccggttcctggagagcaaccccgtgatgatcgatgccaaggaagtgagcgccgcccaccgggccagatacttctggggcaatctgcctggcatgaacagacccctggccagcaccgtgaacgacaagctggagctgcaggagtgcctggagcacggccggatcgccaagttcagcaaggtgagaaccatcaccacccgaagcaacagcatcaaacaaggcaaggaccagcactttcctgtgttcatgaacgagaaggaggacatcctgtggtgtaccgagatggagagagtgttcgggttcccagtccactacacagatgtcagcaacatgtctagactggccagacagagactgctgggaagaagctggtccgtccctgtgatcagacacctgttcgcccctctgaaggagtacttcgcctgcgtgagcagcggcaacagcaacgccaacagccggggccccagcttctctagcggcctggtgccactgtccctgagagggagccacatgggccccatggagatctacaaaaccgtgagcgcctggaagcggcagcctgtgcgcgtgctgagcctgtttcggaatatcgataaagtcctgaaaagcctgggattcctggagagcggctctggctccggcggtggcaccctgaagtacgtggaggatgtgacaaacgtggtcagacgggatgtggagaagtggggccccttcgatctggtgtacggcagcacccaacccctgggcagctcttgtgaccggtgccctggctggtacatgtttcagttccaccggatcctgcagtacgccctgccgagacaggagtcccagcggccattcttttggattttcatggacaacttgctgctgaccgaggatgaccaggaaactaccactcggttcctgcagaccgaagccgtgaccctgcaggacgtgagaggccgggactaccagaacgccatgcgggtgtggtccaacatccctggactgaaaagcaagcacgcacctctgacccctaaagaagaggagtacctgcaggcccaggtgcggagcagaagcaagctggacgcccctaaggtggatctgctggtgaagaattgcctcctgcccctgagagagtacttcaagtatttcagccagaatagtctgcccctgggcggcccaagcagcggcgcccctcctcccagcggcggcagcccagccggctccccaacctctaccgaggagggcacctctgagtccgccacccccgagagcggccctggcacctccaccgagcccagcgagggcagcgcacccggcagccctgccggcagccccacctccacagaggagggaaccagcaccgagcccagcgaaggcagcgccccaggcaccagcaccgagcctagtgagggcggctctggcggcggcagcgcccaggagattaaacggatcaacaagatcagaagaagacttgtgaaagacagcaacaccaagaaggccggcaagacaggccccatgaaaaccctgctggttagagtgatgacacccgatctgagagagcggctggaaaacctgagaaagaagcctgaaaatatcccccagcccatcagcaatacatctagagccaacctgaataagctgctgaccgattacaccgaaatgaagaaggcgatcctgcatgtgtactgggaagagttccagaaggaccctgtgggcctgatgagccgggtggcccagcctgccagcaagaagatcgatcagaacaagctgaaacctgagatggacgagaagggcaacctgaccaccgccggctttgcctgctctcagtgtggccagcccctgttcgtgtacaagctggagcaggtgtctgagaagggcaaggcttacaccaactacttcggacggtgcaatgtggccgagcacgaaaagctgatcctgctggcccagctgaagcccgagaaggatagcgacgaagccgtgacatatagcctgggaaagtttgggcagagggccctggatttctacagcattcatgtgaccaaggagtccacccaccccgtgaagcccctggcccagatcgccggaaacagatacgcctccggacctgtgggaaaggccctgagcgacgcatgtatgggcacaatcgcctccttcctgtctaagtaccaggacatcatcatcgaacaccagaaggtggtgaagggcaaccagaagagactggagagcctgcgggagctggccggcaaggaaaacctggaataccctagcgtgaccctgccacctcagcctcacaccaaggagggcgttgatgcctacaacgaagtgatcgcccgggtgcgaatgtgggtgaacctgaacctgtggcagaagctgaagctaagcagagatgatgccaagcctctgctgagactgaagggattcccttcctttcctctggtcgagagacaggccaacgaagtggactggtgggacatggtgtgtaacgtgaagaagctgatcaacgagaaaaaggaggatggcaaggtgttttggcagaatctggctggctacaagagacaggaagccctgagaccatacctgagcagcgaggaagatcggaagaagggaaagaaattcgctcggtaccagctgggcgacctgctgctgcacctggaaaagaagcacggcgaggactggggaaaggtgtacgacgaggcctgggagcggattgacaagaaagtggaaggcctgagcaagcacatcaagctggaagaggaacggagaagcgaggacgcccagagcaaggccgccctgaccgactggctgcgggctaaggccagcttcgtgatcgagggcctgaaggaggccgacaaggacgagttctgcagatgcgagctgaagctgcagaagtggtacggggacctgcggggaaagcccttcgccatcgaagccgagaacagcatcctggacatcagcggcttcagcaagcagtacaactgtgccttcatctggcagaaggacggcgtgaagaagctgaacctgtacctgatcatcaactacttcaagggcggcaagctgcggttcaagaagatcaaacctgaagccttcgaagccaacagattctacaccgtgatcaacaaaaagagcggcgagatcgtgcccatggaggtgaacttcaacttcgacgaccccaacctgatcatcctgcctctggcctttggcaagagacagggcagagaattcatctggaacgacctgctgtccctggaaaccggcagcctgaagctggccaacggaagagtgatcgagaagacactgtacaacagaagaacccggcaggatgagcctgccctgttcgtggccctgaccttcgagcggcgggaggtcctggactcctccaatatcaaaccaatgaacctgatcggcgtggcaagaggcgaaaacatccccgccgtgatcgccctgaccgaccccgagggctgcccactgagccggtttaaggatagcctgggaaacccaacccacatcctgagaatcggcgagagctataaggagaagcagcggaccatccaggccaagaaggaggtggagcagcggagagccggcggctacagccggaagtacgccagcaaagccaagaatctggcagacgatatggtgagaaacaccgctagagatctgctgtactacgccgtgacccaggatgccatgctgatcttcgccaacctgagccggggcttcggccggcagggcaagcggaccttcatggccgagagacagtacacacggatggaggactggctgaccgccaagctggcctacgagggcctgagcaagacctacctgtccaagacactggcccagtacacctccaagacatgcagcaactgtgggtttaccatcaccagcgccgactacgacagggtgctggagaagctgaagaagacagcaacaggctggatgaccacaattaacggcaaggagctgaaggtggagggccagattacctactacaacagatacaagagacagaacgtagtcaaggacctgtccgtcgagctggatagactgagcgaagaatctgtgaacaacgacatctcctcctggacaaagggcagaagcggagaagctctgagcctcctgaagaaaagattctcccatagacccgtgcaggagaagttcgtgtgcctgaactgcggcttcgagacacacgcagccgagcaagccgccctgaacatcgccagatcctggctgttcctgcggagccaggagtacaagaaataccagacaaacaagacaaccggcaacaccgataagagagccttcgtcgagacctggcagtccttttaccggaagaagcttaaggaggtgtggaaacctgccgtgcggtctggcggatctggcggaggctccacaagccacagggtgggcctgatcaggagctacaacagcaagaccatgacctgcttccaggagctggtgaccttcagggacgtggccatcgacttcagcaggcaggagtgggagtacctggaccccaaccagagggacctgtacagggacgtgatgctggagaactacaggaacctggtgagcctgggcggccacagcatcagcaagcccgtggtggtggacctgctggagaggggcaaggagccctggaccagccccaagaaaaagagaaaagtctaagctgccttctgcggggcttgccttctggccatgcccttcttctctcccttgcacctgtacctcttggtctttgaataaagcctgagtaggaaggctagcaaaaaaaaaaaaaaaaaaaaaaaaaaaaaaaaaaaaaaaaaaaaaaaaaaaaaaaaaaaaaaaaaaaaaaaaaaaaaaaa

SEQ ID NO: 3176 - RNA, 5419 nt, synthetic construct
  source 1..5419: mol_type = other RNA
aggaaataagagagaaaagaagagtaagaagaaatataagagccaccatggcccctaagaagaagcgtaaagtgagccgggtgaacggcagcggcagcggcggcggcatgaaccacgaccaggagttcgacccccctaaggtgtaccctcccgtccccgccgagaagagaaagcccatccgggtcctgagcctgttcgatggcatcgccaccggtctgctggtgctgaaggacctgggcatccaggtggataggtacattgcctccgaggtgtgcgaggactccatcaccgtgggaatggtgcgtcatcagggcaagatcatgtacgtgggcgacgtgcggagcgtgacacagaagcatatccaggagtggggccctttcgacctggtgatcggcggcagcccttgcaatgacctgagcatcgtgaacccagcccggaagggcctgtacgagggaaccggcagactgttcttcgagttttacagactgctgcacgacgcccggcctaaggaaggcgacgaccggcccttcttttggctgttcgagaatgtggtggccatgggagtcagcgacaagcgggatattagccggttcctggagagcaaccccgtgatgatcgatgccaaggaagtgagcgccgcccaccgggccagatacttctggggcaatctgcctggcatgaacagacccctggccagcaccgtgaacgacaagctggagctgcaggagtgcctggagcacggccggatcgccaagttcagcaaggtgagaaccatcaccacccgaagcaacagcatcaaacaaggcaaggaccagcactttcctgtgttcatgaacgagaaggaggacatcctgtggtgtaccgagatggagagagtgttcgggttcccagtccactacacagatgtcagcaacatgtctagactggccagacagagactgctgggaagaagctggtccgtccctgtgatcagacacctgttcgcccctctgaaggagtacttcgcctgcgtgagcagcggcaacagcaacgccaacagccggggccccagcttctctagcggcctggtgccactgtccctgagagggagccacatgggccccatggagatctacaaaaccgtgagcgcctggaagcggcagcctgtgcgcgtgctgagcctgtttcggaatatcgataaagtcctgaaaagcctgggattcctggagagcggctctggctccggcggtggcaccctgaagtacgtggaggatgtgacaaacgtggtcagacgggatgtggagaagtggggccccttcgatctggtgtacggcagcacccaacccctgggcagctcttgtgaccggtgccctggctggtacatgtttcagttccaccggatcctgcagtacgccctgccgagacaggagtcccagcggccattcttttggattttcatggacaacttgctgctgaccgaggatgaccaggaaactaccactcggttcctgcagaccgaagccgtgaccctgcaggacgtgagaggccgggactaccagaacgccatgcgggtgtggtccaacatccctggactgaaaagcaagcacgcacctctgacccctaaagaagaggagtacctgcaggcccaggtgcggagcagaagcaagctggacgcccctaaggtggatctgctggtgaagaattgcctcctgcccctgagagagtacttcaagtatttcagccagaatagtctgcccctgggcggcccaagcagcggcgcccctcctcccagcggcggcagcccagccggctccccaacctctaccgaggagggcacctctgagtccgccacccccgagagcggccctggcacctccaccgagcccagcgagggcagcgcacccggcagccctgccggcagccccacctccacagaggagggaaccagcaccgagcccagcgaaggcagcgccccaggcaccagcaccgagcctagtgagggcggctctggcggcggcagcgcccaggagattaaacggatcaacaagatcagaagaagacttgtgaaagacagcaacaccaagaaggccggcaagacaggccccatgaaaaccctgctggttagagtgatgacacccgatctgagagagcggctggaaaacctgagaaagaagcctgaaaatatcccccagcccatcagcaatacatctagagccaacctgaataagctgctgaccgattacaccgaaatgaagaaggcgatcctgcatgtgtactgggaagagttccagaaggaccctgtgggcctgatgagccgggtggcccagcctgccagcaagaagatcgatcagaacaagctgaaacctgagatggacgagaagggcaacctgaccaccgccggctttgcctgctctcagtgtggccagcccctgttcgtgtacaagctggagcaggtgtctgagaagggcaaggcttacaccaactacttcggacggtgcaatgtggccgagcacgaaaagctgatcctgctggcccagctgaagcccgagaaggatagcgacgaagccgtgacatatagcctgggaaagtttgggcagagggccctggatttctacagcattcatgtgaccaaggagtccacccaccccgtgaagcccctggcccagatcgccggaaacagatacgcctccggacctgtgggaaaggccctgagcgacgcatgtatgggcacaatcgcctccttcctgtctaagtaccaggacatcatcatcgaacaccagaaggtggtgaagggcaaccagaagagactggagagcctgcgggagctggccggcaaggaaaacctggaataccctagcgtgaccctgccacctcagcctcacaccaaggagggcgttgatgcctacaacgaagtgatcgcccgggtgcgaatgtgggtgaacctgaacctgtggcagaagctgaagctaagcagagatgatgccaagcctctgctgagactgaagggattcccttcctttcctctggtcgagagacaggccaacgaagtggactggtgggacatggtgtgtaacgtgaagaagctgatcaacgagaaaaaggaggatggcaaggtgttttggcagaatctggctggctacaagagacaggaagccctgagaccatacctgagcagcgaggaagatcggaagaagggaaagaaattcgctcggtaccagctgggcgacctgctgctgcacctggaaaagaagcacggcgaggactggggaaaggtgtacgacgaggcctgggagcggattgacaagaaagtggaaggcctgagcaagcacatcaagctggaagaggaacggagaagcgaggacgcccagagcaaggccgccctgaccgactggctgcgggctaaggccagcttcgtgatcgagggcctgaaggaggccgacaaggacgagttctgcagatgcgagctgaagctgcagaagtggtacggggacctgcggggaaagcccttcgccatcgaagccgagaacagcatcctggacatcagcggcttcagcaagcagtacaactgtgccttcatctggcagaaggacggcgtgaagaagctgaacctgtacctgatcatcaactacttcaagggcggcaagctgcggttcaagaagatcaaacctgaagccttcgaagccaacagattctacaccgtgatcaacaaaaagagcggcgagatcgtgcccatggaggtgaacttcaacttcgacgaccccaacctgatcatcctgcctctggcctttggcaagagacagggcagagaattcatctggaacgacctgctgtccctggaaaccggcagcctgaagctggccaacggaagagtgatcgagaagacactgtacaacagaagaacccggcaggatgagcctgccctgttcgtggccctgaccttcgagcggcgggaggtcctggactcctccaatatcaaaccaatgaacctgatcggcgtggcaagaggcgaaaacatccccgccgtgatcgccctgaccgaccccgagggctgcccactgagccggtttaaggatagcctgggaaacccaacccacatcctgagaatcggcgagagctataaggagaagcagcggaccatccaggccaagaaggaggtggagcagcggagagccggcggctacagccggaagtacgccagcaaagccaagaatctggcagacgatatggtgagaaacaccgctagagatctgctgtactacgccgtgacccaggatgccatgctgatcttcgccaacctgagccggggcttcggccggcagggcaagcggaccttcatggccgagagacagtacacacggatggaggactggctgaccgccaagctggcctacgagggcctgagcaagacctacctgtccaagacactggcccagtacacctccaagacatgcagcaactgtgggtttaccatcaccagcgccgactacgacagggtgctggagaagctgaagaagacagcaacaggctggatgaccacaattaacggcaaggagctgaaggtggagggccagattacctactacaacagatacaagagacagaacgtagtcaaggacctgtccgtcgagctggatagactgagcgaagaatctgtgaacaacgacatctcctcctggacaaagggcagaagcggagaagctctgagcctcctgaagaaaagattctcccatagacccgtgcaggagaagttcgtgtgcctgaactgcggcttcgagacacacgcagccgagcaagccgccctgaacatcgccagatcctggctgttcctgcggagccaggagtacaagaaataccagacaaacaagacaaccggcaacaccgataagagagccttcgtcgagacctggcagtccttttaccggaagaagcttaaggaggtgtggaaacctgccgtgcggtctggcggatctggcggaggctccacaagcgtgcaggccagcctgagcttcgaggacgtggccgtgaggttcacctgggaggagtggcagctgctggaccccagccagaaggacctgtacaggaacgtgatgctggagaactactgcaacctggtgagcgtgggctaccagacccccaagcccgacagcctgttccagctggagcagggcgagcccccctggagggtggagggcgccggccagagccagacctgccccgaggagatctgggagaccagccccaagaaaaagagaaaagtctaagctgccttctgcggggcttgccttctggccatgcccttcttctctcccttgcacctgtacctcttggtctttgaataaagcctgagtaggaaggctagcaaaaaaaaaaaaaaaaaaaaaaaaaaaaaaaaaaaaaaaaaaaaaaaaaaaaaaaaaaaaaaaaaaaaaaaaaaaaaaaa

SEQ ID NO: 3177 - RNA, 5419 nt, synthetic construct
  source 1..5419: mol_type = other RNA
aggaaataagagagaaaagaagagtaagaagaaatataagagccaccatggcccctaagaagaagcgtaaagtgagccgggtgaacggcagcggcagcggcggcggcatgaaccacgaccaggagttcgacccccctaaggtgtaccctcccgtccccgccgagaagagaaagcccatccgggtcctgagcctgttcgatggcatcgccaccggtctgctggtgctgaaggacctgggcatccaggtggataggtacattgcctccgaggtgtgcgaggactccatcaccgtgggaatggtgcgtcatcagggcaagatcatgtacgtgggcgacgtgcggagcgtgacacagaagcatatccaggagtggggccctttcgacctggtgatcggcggcagcccttgcaatgacctgagcatcgtgaacccagcccggaagggcctgtacgagggaaccggcagactgttcttcgagttttacagactgctgcacgacgcccggcctaaggaaggcgacgaccggcccttcttttggctgttcgagaatgtggtggccatgggagtcagcgacaagcgggatattagccggttcctggagagcaaccccgtgatgatcgatgccaaggaagtgagcgccgcccaccgggccagatacttctggggcaatctgcctggcatgaacagacccctggccagcaccgtgaacgacaagctggagctgcaggagtgcctggagcacggccggatcgccaagttcagcaaggtgagaaccatcaccacccgaagcaacagcatcaaacaaggcaaggaccagcactttcctgtgttcatgaacgagaaggaggacatcctgtggtgtaccgagatggagagagtgttcgggttcccagtccactacacagatgtcagcaacatgtctagactggccagacagagactgctgggaagaagctggtccgtccctgtgatcagacacctgttcgcccctctgaaggagtacttcgcctgcgtgagcagcggcaacagcaacgccaacagccggggccccagcttctctagcggcctggtgccactgtccctgagagggagccacatgggccccatggagatctacaaaaccgtgagcgcctggaagcggcagcctgtgcgcgtgctgagcctgtttcggaatatcgataaagtcctgaaaagcctgggattcctggagagcggctctggctccggcggtggcaccctgaagtacgtggaggatgtgacaaacgtggtcagacgggatgtggagaagtggggccccttcgatctggtgtacggcagcacccaacccctgggcagctcttgtgaccggtgccctggctggtacatgtttcagttccaccggatcctgcagtacgccctgccgagacaggagtcccagcggccattcttttggattttcatggacaacttgctgctgaccgaggatgaccaggaaactaccactcggttcctgcagaccgaagccgtgaccctgcaggacgtgagaggccgggactaccagaacgccatgcgggtgtggtccaacatccctggactgaaaagcaagcacgcacctctgacccctaaagaagaggagtacctgcaggcccaggtgcggagcagaagcaagctggacgcccctaaggtggatctgctggtgaagaattgcctcctgcccctgagagagtacttcaagtatttcagccagaatagtctgcccctgggcggcccaagcagcggcgcccctcctcccagcggcggcagcccagccggctccccaacctctaccgaggagggcacctctgagtccgccacccccgagagcggccctggcacctccaccgagcccagcgagggcagcgcacccggcagccctgccggcagccccacctccacagaggagggaaccagcaccgagcccagcgaaggcagcgccccaggcaccagcaccgagcctagtgagggcggctctggcggcggcagcgcccaggagattaaacggatcaacaagatcagaagaagacttgtgaaagacagcaacaccaagaaggccggcaagacaggccccatgaaaaccctgctggttagagtgatgacacccgatctgagagagcggctggaaaacctgagaaagaagcctgaaaatatcccccagcccatcagcaatacatctagagccaacctgaataagctgctgaccgattacaccgaaatgaagaaggcgatcctgcatgtgtactgggaagagttccagaaggaccctgtgggcctgatgagccgggtggcccagcctgccagcaagaagatcgatcagaacaagctgaaacctgagatggacgagaagggcaacctgaccaccgccggctttgcctgctctcagtgtggccagcccctgttcgtgtacaagctggagcaggtgtctgagaagggcaaggcttacaccaactacttcggacggtgcaatgtggccgagcacgaaaagctgatcctgctggcccagctgaagcccgagaaggatagcgacgaagccgtgacatatagcctgggaaagtttgggcagagggccctggatttctacagcattcatgtgaccaaggagtccacccaccccgtgaagcccctggcccagatcgccggaaacagatacgcctccggacctgtgggaaaggccctgagcgacgcatgtatgggcacaatcgcctccttcctgtctaagtaccaggacatcatcatcgaacaccagaaggtggtgaagggcaaccagaagagactggagagcctgcgggagctggccggcaaggaaaacctggaataccctagcgtgaccctgccacctcagcctcacaccaaggagggcgttgatgcctacaacgaagtgatcgcccgggtgcgaatgtgggtgaacctgaacctgtggcagaagctgaagctaagcagagatgatgccaagcctctgctgagactgaagggattcccttcctttcctctggtcgagagacaggccaacgaagtggactggtgggacatggtgtgtaacgtgaagaagctgatcaacgagaaaaaggaggatggcaaggtgttttggcagaatctggctggctacaagagacaggaagccctgagaccatacctgagcagcgaggaagatcggaagaagggaaagaaattcgctcggtaccagctgggcgacctgctgctgcacctggaaaagaagcacggcgaggactggggaaaggtgtacgacgaggcctgggagcggattgacaagaaagtggaaggcctgagcaagcacatcaagctggaagaggaacggagaagcgaggacgcccagagcaaggccgccctgaccgactggctgcgggctaaggccagcttcgtgatcgagggcctgaaggaggccgacaaggacgagttctgcagatgcgagctgaagctgcagaagtggtacggggacctgcggggaaagcccttcgccatcgaagccgagaacagcatcctggacatcagcggcttcagcaagcagtacaactgtgccttcatctggcagaaggacggcgtgaagaagctgaacctgtacctgatcatcaactacttcaagggcggcaagctgcggttcaagaagatcaaacctgaagccttcgaagccaacagattctacaccgtgatcaacaaaaagagcggcgagatcgtgcccatggaggtgaacttcaacttcgacgaccccaacctgatcatcctgcctctggcctttggcaagagacagggcagagaattcatctggaacgacctgctgtccctggaaaccggcagcctgaagctggccaacggaagagtgatcgagaagacactgtacaacagaagaacccggcaggatgagcctgccctgttcgtggccctgaccttcgagcggcgggaggtcctggactcctccaatatcaaaccaatgaacctgatcggcgtggcaagaggcgaaaacatccccgccgtgatcgccctgaccgaccccgagggctgcccactgagccggtttaaggatagcctgggaaacccaacccacatcctgagaatcggcgagagctataaggagaagcagcggaccatccaggccaagaaggaggtggagcagcggagagccggcggctacagccggaagtacgccagcaaagccaagaatctggcagacgatatggtgagaaacaccgctagagatctgctgtactacgccgtgacccaggatgccatgctgatcttcgccaacctgagccggggcttcggccggcagggcaagcggaccttcatggccgagagacagtacacacggatggaggactggctgaccgccaagctggcctacgagggcctgagcaagacctacctgtccaagacactggcccagtacacctccaagacatgcagcaactgtgggtttaccatcaccagcgccgactacgacagggtgctggagaagctgaagaagacagcaacaggctggatgaccacaattaacggcaaggagctgaaggtggagggccagattacctactacaacagatacaagagacagaacgtagtcaaggacctgtccgtcgagctggatagactgagcgaagaatctgtgaacaacgacatctcctcctggacaaagggcagaagcggagaagctctgagcctcctgaagaaaagattctcccatagacccgtgcaggagaagttcgtgtgcctgaactgcggcttcgagacacacgcagccgagcaagccgccctgaacatcgccagatcctggctgttcctgcggagccaggagtacaagaaataccagacaaacaagacaaccggcaacaccgataagagagccttcgtcgagacctggcagtccttttaccggaagaagcttaaggaggtgtggaaacctgccgtgcggtctggcggatctggcggaggctccacaagcctgctgcacggctgctgcagcctggagacccacagcatcagggacaagaacgccgtgacctacggcgacgtgcacgtgaacttcacccaggaggagtgggccctgctggaccccagccagaagaagctgtacaaggacgtgatgctggagacctacaggaacctgaacgccatcggcttcaactgggacgacaagaacaccgaggagcactgccccagcaccaggaggtggaggaggtaccccaccagccccaagaaaaagagaaaagtctaagctgccttctgcggggcttgccttctggccatgcccttcttctctcccttgcacctgtacctcttggtctttgaataaagcctgagtaggaaggctagcaaaaaaaaaaaaaaaaaaaaaaaaaaaaaaaaaaaaaaaaaaaaaaaaaaaaaaaaaaaaaaaaaaaaaaaaaaaaaaaa

SEQ ID NO: 3178 - RNA, 5419 nt, synthetic construct
  source 1..5419: mol_type = other RNA
aggaaataagagagaaaagaagagtaagaagaaatataagagccaccatggcccctaagaagaagcgtaaagtgagccgggtgaacggcagcggcagcggcggcggcatgaaccacgaccaggagttcgacccccctaaggtgtaccctcccgtccccgccgagaagagaaagcccatccgggtcctgagcctgttcgatggcatcgccaccggtctgctggtgctgaaggacctgggcatccaggtggataggtacattgcctccgaggtgtgcgaggactccatcaccgtgggaatggtgcgtcatcagggcaagatcatgtacgtgggcgacgtgcggagcgtgacacagaagcatatccaggagtggggccctttcgacctggtgatcggcggcagcccttgcaatgacctgagcatcgtgaacccagcccggaagggcctgtacgagggaaccggcagactgttcttcgagttttacagactgctgcacgacgcccggcctaaggaaggcgacgaccggcccttcttttggctgttcgagaatgtggtggccatgggagtcagcgacaagcgggatattagccggttcctggagagcaaccccgtgatgatcgatgccaaggaagtgagcgccgcccaccgggccagatacttctggggcaatctgcctggcatgaacagacccctggccagcaccgtgaacgacaagctggagctgcaggagtgcctggagcacggccggatcgccaagttcagcaaggtgagaaccatcaccacccgaagcaacagcatcaaacaaggcaaggaccagcactttcctgtgttcatgaacgagaaggaggacatcctgtggtgtaccgagatggagagagtgttcgggttcccagtccactacacagatgtcagcaacatgtctagactggccagacagagactgctgggaagaagctggtccgtccctgtgatcagacacctgttcgcccctctgaaggagtacttcgcctgcgtgagcagcggcaacagcaacgccaacagccggggccccagcttctctagcggcctggtgccactgtccctgagagggagccacatgggccccatggagatctacaaaaccgtgagcgcctggaagcggcagcctgtgcgcgtgctgagcctgtttcggaatatcgataaagtcctgaaaagcctgggattcctggagagcggctctggctccggcggtggcaccctgaagtacgtggaggatgtgacaaacgtggtcagacgggatgtggagaagtggggccccttcgatctggtgtacggcagcacccaacccctgggcagctcttgtgaccggtgccctggctggtacatgtttcagttccaccggatcctgcagtacgccctgccgagacaggagtcccagcggccattcttttggattttcatggacaacttgctgctgaccgaggatgaccaggaaactaccactcggttcctgcagaccgaagccgtgaccctgcaggacgtgagaggccgggactaccagaacgccatgcgggtgtggtccaacatccctggactgaaaagcaagcacgcacctctgacccctaaagaagaggagtacctgcaggcccaggtgcggagcagaagcaagctggacgcccctaaggtggatctgctggtgaagaattgcctcctgcccctgagagagtacttcaagtatttcagccagaatagtctgcccctgggcggcccaagcagcggcgcccctcctcccagcggcggcagcccagccggctccccaacctctaccgaggagggcacctctgagtccgccacccccgagagcggccctggcacctccaccgagcccagcgagggcagcgcacccggcagccctgccggcagccccacctccacagaggagggaaccagcaccgagcccagcgaaggcagcgccccaggcaccagcaccgagcctagtgagggcggctctggcggcggcagcgcccaggagattaaacggatcaacaagatcagaagaagacttgtgaaagacagcaacaccaagaaggccggcaagacaggccccatgaaaaccctgctggttagagtgatgacacccgatctgagagagcggctggaaaacctgagaaagaagcctgaaaatatcccccagcccatcagcaatacatctagagccaacctgaataagctgctgaccgattacaccgaaatgaagaaggcgatcctgcatgtgtactgggaagagttccagaaggaccctgtgggcctgatgagccgggtggcccagcctgccagcaagaagatcgatcagaacaagctgaaacctgagatggacgagaagggcaacctgaccaccgccggctttgcctgctctcagtgtggccagcccctgttcgtgtacaagctggagcaggtgtctgagaagggcaaggcttacaccaactacttcggacggtgcaatgtggccgagcacgaaaagctgatcctgctggcccagctgaagcccgagaaggatagcgacgaagccgtgacatatagcctgggaaagtttgggcagagggccctggatttctacagcattcatgtgaccaaggagtccacccaccccgtgaagcccctggcccagatcgccggaaacagatacgcctccggacctgtgggaaaggccctgagcgacgcatgtatgggcacaatcgcctccttcctgtctaagtaccaggacatcatcatcgaacaccagaaggtggtgaagggcaaccagaagagactggagagcctgcgggagctggccggcaaggaaaacctggaataccctagcgtgaccctgccacctcagcctcacaccaaggagggcgttgatgcctacaacgaagtgatcgcccgggtgcgaatgtgggtgaacctgaacctgtggcagaagctgaagctaagcagagatgatgccaagcctctgctgagactgaagggattcccttcctttcctctggtcgagagacaggccaacgaagtggactggtgggacatggtgtgtaacgtgaagaagctgatcaacgagaaaaaggaggatggcaaggtgttttggcagaatctggctggctacaagagacaggaagccctgagaccatacctgagcagcgaggaagatcggaagaagggaaagaaattcgctcggtaccagctgggcgacctgctgctgcacctggaaaagaagcacggcgaggactggggaaaggtgtacgacgaggcctgggagcggattgacaagaaagtggaaggcctgagcaagcacatcaagctggaagaggaacggagaagcgaggacgcccagagcaaggccgccctgaccgactggctgcgggctaaggccagcttcgtgatcgagggcctgaaggaggccgacaaggacgagttctgcagatgcgagctgaagctgcagaagtggtacggggacctgcggggaaagcccttcgccatcgaagccgagaacagcatcctggacatcagcggcttcagcaagcagtacaactgtgccttcatctggcagaaggacggcgtgaagaagctgaacctgtacctgatcatcaactacttcaagggcggcaagctgcggttcaagaagatcaaacctgaagccttcgaagccaacagattctacaccgtgatcaacaaaaagagcggcgagatcgtgcccatggaggtgaacttcaacttcgacgaccccaacctgatcatcctgcctctggcctttggcaagagacagggcagagaattcatctggaacgacctgctgtccctggaaaccggcagcctgaagctggccaacggaagagtgatcgagaagacactgtacaacagaagaacccggcaggatgagcctgccctgttcgtggccctgaccttcgagcggcgggaggtcctggactcctccaatatcaaaccaatgaacctgatcggcgtggcaagaggcgaaaacatccccgccgtgatcgccctgaccgaccccgagggctgcccactgagccggtttaaggatagcctgggaaacccaacccacatcctgagaatcggcgagagctataaggagaagcagcggaccatccaggccaagaaggaggtggagcagcggagagccggcggctacagccggaagtacgccagcaaagccaagaatctggcagacgatatggtgagaaacaccgctagagatctgctgtactacgccgtgacccaggatgccatgctgatcttcgccaacctgagccggggcttcggccggcagggcaagcggaccttcatggccgagagacagtacacacggatggaggactggctgaccgccaagctggcctacgagggcctgagcaagacctacctgtccaagacactggcccagtacacctccaagacatgcagcaactgtgggtttaccatcaccagcgccgactacgacagggtgctggagaagctgaagaagacagcaacaggctggatgaccacaattaacggcaaggagctgaaggtggagggccagattacctactacaacagatacaagagacagaacgtagtcaaggacctgtccgtcgagctggatagactgagcgaagaatctgtgaacaacgacatctcctcctggacaaagggcagaagcggagaagctctgagcctcctgaagaaaagattctcccatagacccgtgcaggagaagttcgtgtgcctgaactgcggcttcgagacacacgcagccgagcaagccgccctgaacatcgccagatcctggctgttcctgcggagccaggagtacaagaaataccagacaaacaagacaaccggcaacaccgataagagagccttcgtcgagacctggcagtccttttaccggaagaagcttaaggaggtgtggaaacctgccgtgcggtctggcggatctggcggaggctccacaagcatgggcctgctgaccttcagggacgtggccatcgagttcagcctggaggagtggcagtgcctggacaccgcccagaagaacctgtacaggaacgtgatgctggagaactacaggaacctggccttcctgggcatcgccgtgagcaagcccgacctgatcatctgcctggagaaggagaaggagccctggaacatgaagaggcacgagatggtggacgagccccccgacatctgcccccacttcaccagccccaagaaaaagagaaaagtctaagctgccttctgcggggcttgccttctggccatgcccttcttctctcccttgcacctgtacctcttggtctttgaataaagcctgagtaggaaggctagcaaaaaaaaaaaaaaaaaaaaaaaaaaaaaaaaaaaaaaaaaaaaaaaaaaaaaaaaaaaaaaaaaaaaaaaaaaaaaaaa

SEQ ID NO: 3179 - RNA, 5428 nt, synthetic construct
  source 1..5428: mol_type = other RNA
aggaaataagagagaaaagaagagtaagaagaaatataagagccaccatggcccctaagaagaagcgtaaagtgagccgggtgaacggcagcggcagcggcggcggcatgaaccacgaccaggagttcgacccccctaaggtgtaccctcccgtccccgccgagaagagaaagcccatccgggtcctgagcctgttcgatggcatcgccaccggtctgctggtgctgaaggacctgggcatccaggtggataggtacattgcctccgaggtgtgcgaggactccatcaccgtgggaatggtgcgtcatcagggcaagatcatgtacgtgggcgacgtgcggagcgtgacacagaagcatatccaggagtggggccctttcgacctggtgatcggcggcagcccttgcaatgacctgagcatcgtgaacccagcccggaagggcctgtacgagggaaccggcagactgttcttcgagttttacagactgctgcacgacgcccggcctaaggaaggcgacgaccggcccttcttttggctgttcgagaatgtggtggccatgggagtcagcgacaagcgggatattagccggttcctggagagcaaccccgtgatgatcgatgccaaggaagtgagcgccgcccaccgggccagatacttctggggcaatctgcctggcatgaacagacccctggccagcaccgtgaacgacaagctggagctgcaggagtgcctggagcacggccggatcgccaagttcagcaaggtgagaaccatcaccacccgaagcaacagcatcaaacaaggcaaggaccagcactttcctgtgttcatgaacgagaaggaggacatcctgtggtgtaccgagatggagagagtgttcgggttcccagtccactacacagatgtcagcaacatgtctagactggccagacagagactgctgggaagaagctggtccgtccctgtgatcagacacctgttcgcccctctgaaggagtacttcgcctgcgtgagcagcggcaacagcaacgccaacagccggggccccagcttctctagcggcctggtgccactgtccctgagagggagccacatgggccccatggagatctacaaaaccgtgagcgcctggaagcggcagcctgtgcgcgtgctgagcctgtttcggaatatcgataaagtcctgaaaagcctgggattcctggagagcggctctggctccggcggtggcaccctgaagtacgtggaggatgtgacaaacgtggtcagacgggatgtggagaagtggggccccttcgatctggtgtacggcagcacccaacccctgggcagctcttgtgaccggtgccctggctggtacatgtttcagttccaccggatcctgcagtacgccctgccgagacaggagtcccagcggccattcttttggattttcatggacaacttgctgctgaccgaggatgaccaggaaactaccactcggttcctgcagaccgaagccgtgaccctgcaggacgtgagaggccgggactaccagaacgccatgcgggtgtggtccaacatccctggactgaaaagcaagcacgcacctctgacccctaaagaagaggagtacctgcaggcccaggtgcggagcagaagcaagctggacgcccctaaggtggatctgctggtgaagaattgcctcctgcccctgagagagtacttcaagtatttcagccagaatagtctgcccctgggcggcccaagcagcggcgcccctcctcccagcggcggcagcccagccggctccccaacctctaccgaggagggcacctctgagtccgccacccccgagagcggccctggcacctccaccgagcccagcgagggcagcgcacccggcagccctgccggcagccccacctccacagaggagggaaccagcaccgagcccagcgaaggcagcgccccaggcaccagcaccgagcctagtgagggcggctctggcggcggcagcgcccaggagattaaacggatcaacaagatcagaagaagacttgtgaaagacagcaacaccaagaaggccggcaagacaggccccatgaaaaccctgctggttagagtgatgacacccgatctgagagagcggctggaaaacctgagaaagaagcctgaaaatatcccccagcccatcagcaatacatctagagccaacctgaataagctgctgaccgattacaccgaaatgaagaaggcgatcctgcatgtgtactgggaagagttccagaaggaccctgtgggcctgatgagccgggtggcccagcctgccagcaagaagatcgatcagaacaagctgaaacctgagatggacgagaagggcaacctgaccaccgccggctttgcctgctctcagtgtggccagcccctgttcgtgtacaagctggagcaggtgtctgagaagggcaaggcttacaccaactacttcggacggtgcaatgtggccgagcacgaaaagctgatcctgctggcccagctgaagcccgagaaggatagcgacgaagccgtgacatatagcctgggaaagtttgggcagagggccctggatttctacagcattcatgtgaccaaggagtccacccaccccgtgaagcccctggcccagatcgccggaaacagatacgcctccggacctgtgggaaaggccctgagcgacgcatgtatgggcacaatcgcctccttcctgtctaagtaccaggacatcatcatcgaacaccagaaggtggtgaagggcaaccagaagagactggagagcctgcgggagctggccggcaaggaaaacctggaataccctagcgtgaccctgccacctcagcctcacaccaaggagggcgttgatgcctacaacgaagtgatcgcccgggtgcgaatgtgggtgaacctgaacctgtggcagaagctgaagctaagcagagatgatgccaagcctctgctgagactgaagggattcccttcctttcctctggtcgagagacaggccaacgaagtggactggtgggacatggtgtgtaacgtgaagaagctgatcaacgagaaaaaggaggatggcaaggtgttttggcagaatctggctggctacaagagacaggaagccctgagaccatacctgagcagcgaggaagatcggaagaagggaaagaaattcgctcggtaccagctgggcgacctgctgctgcacctggaaaagaagcacggcgaggactggggaaaggtgtacgacgaggcctgggagcggattgacaagaaagtggaaggcctgagcaagcacatcaagctggaagaggaacggagaagcgaggacgcccagagcaaggccgccctgaccgactggctgcgggctaaggccagcttcgtgatcgagggcctgaaggaggccgacaaggacgagttctgcagatgcgagctgaagctgcagaagtggtacggggacctgcggggaaagcccttcgccatcgaagccgagaacagcatcctggacatcagcggcttcagcaagcagtacaactgtgccttcatctggcagaaggacggcgtgaagaagctgaacctgtacctgatcatcaactacttcaagggcggcaagctgcggttcaagaagatcaaacctgaagccttcgaagccaacagattctacaccgtgatcaacaaaaagagcggcgagatcgtgcccatggaggtgaacttcaacttcgacgaccccaacctgatcatcctgcctctggcctttggcaagagacagggcagagaattcatctggaacgacctgctgtccctggaaaccggcagcctgaagctggccaacggaagagtgatcgagaagacactgtacaacagaagaacccggcaggatgagcctgccctgttcgtggccctgaccttcgagcggcgggaggtcctggactcctccaatatcaaaccaatgaacctgatcggcgtggcaagaggcgaaaacatccccgccgtgatcgccctgaccgaccccgagggctgcccactgagccggtttaaggatagcctgggaaacccaacccacatcctgagaatcggcgagagctataaggagaagcagcggaccatccaggccaagaaggaggtggagcagcggagagccggcggctacagccggaagtacgccagcaaagccaagaatctggcagacgatatggtgagaaacaccgctagagatctgctgtactacgccgtgacccaggatgccatgctgatcttcgccaacctgagccggggcttcggccggcagggcaagcggaccttcatggccgagagacagtacacacggatggaggactggctgaccgccaagctggcctacgagggcctgagcaagacctacctgtccaagacactggcccagtacacctccaagacatgcagcaactgtgggtttaccatcaccagcgccgactacgacagggtgctggagaagctgaagaagacagcaacaggctggatgaccacaattaacggcaaggagctgaaggtggagggccagattacctactacaacagatacaagagacagaacgtagtcaaggacctgtccgtcgagctggatagactgagcgaagaatctgtgaacaacgacatctcctcctggacaaagggcagaagcggagaagctctgagcctcctgaagaaaagattctcccatagacccgtgcaggagaagttcgtgtgcctgaactgcggcttcgagacacacgcagccgagcaagccgccctgaacatcgccagatcctggctgttcctgcggagccaggagtacaagaaataccagacaaacaagacaaccggcaacaccgataagagagccttcgtcgagacctggcagtccttttaccggaagaagcttaaggaggtgtggaaacctgccgtgcggtctggcggatctggcggaggctccacaagcgtgacctacgaggacgtgcacgtgaacttcagccacgaggagtgggccctgctggacagcagccagaagagcctgtacagggacgtgatgctggagacctgcaggaacctgatggccatcggctacaggctggaggaccacaacatcgaggagcactgccagagcagcaggaggcccggcaggtacaacatctgcaactgcggctacaagccctgcgagaacgaggaccacggcaagaagcagtgcaccttcaccagccccaagaaaaagagaaaagtctaagctgccttctgcggggcttgccttctggccatgcccttcttctctcccttgcacctgtacctcttggtctttgaataaagcctgagtaggaaggctagcaaaaaaaaaaaaaaaaaaaaaaaaaaaaaaaaaaaaaaaaaaaaaaaaaaaaaaaaaaaaaaaaaaaaaaaaaaaaaaaa

SEQ ID NO: 3180 - RNA, 5428 nt, synthetic construct
  source 1..5428: mol_type = other RNA
aggaaataagagagaaaagaagagtaagaagaaatataagagccaccatggcccctaagaagaagcgtaaagtgagccgggtgaacggcagcggcagcggcggcggcatgaaccacgaccaggagttcgacccccctaaggtgtaccctcccgtccccgccgagaagagaaagcccatccgggtcctgagcctgttcgatggcatcgccaccggtctgctggtgctgaaggacctgggcatccaggtggataggtacattgcctccgaggtgtgcgaggactccatcaccgtgggaatggtgcgtcatcagggcaagatcatgtacgtgggcgacgtgcggagcgtgacacagaagcatatccaggagtggggccctttcgacctggtgatcggcggcagcccttgcaatgacctgagcatcgtgaacccagcccggaagggcctgtacgagggaaccggcagactgttcttcgagttttacagactgctgcacgacgcccggcctaaggaaggcgacgaccggcccttcttttggctgttcgagaatgtggtggccatgggagtcagcgacaagcgggatattagccggttcctggagagcaaccccgtgatgatcgatgccaaggaagtgagcgccgcccaccgggccagatacttctggggcaatctgcctggcatgaacagacccctggccagcaccgtgaacgacaagctggagctgcaggagtgcctggagcacggccggatcgccaagttcagcaaggtgagaaccatcaccacccgaagcaacagcatcaaacaaggcaaggaccagcactttcctgtgttcatgaacgagaaggaggacatcctgtggtgtaccgagatggagagagtgttcgggttcccagtccactacacagatgtcagcaacatgtctagactggccagacagagactgctgggaagaagctggtccgtccctgtgatcagacacctgttcgcccctctgaaggagtacttcgcctgcgtgagcagcggcaacagcaacgccaacagccggggccccagcttctctagcggcctggtgccactgtccctgagagggagccacatgggccccatggagatctacaaaaccgtgagcgcctggaagcggcagcctgtgcgcgtgctgagcctgtttcggaatatcgataaagtcctgaaaagcctgggattcctggagagcggctctggctccggcggtggcaccctgaagtacgtggaggatgtgacaaacgtggtcagacgggatgtggagaagtggggccccttcgatctggtgtacggcagcacccaacccctgggcagctcttgtgaccggtgccctggctggtacatgtttcagttccaccggatcctgcagtacgccctgccgagacaggagtcccagcggccattcttttggattttcatggacaacttgctgctgaccgaggatgaccaggaaactaccactcggttcctgcagaccgaagccgtgaccctgcaggacgtgagaggccgggactaccagaacgccatgcgggtgtggtccaacatccctggactgaaaagcaagcacgcacctctgacccctaaagaagaggagtacctgcaggcccaggtgcggagcagaagcaagctggacgcccctaaggtggatctgctggtgaagaattgcctcctgcccctgagagagtacttcaagtatttcagccagaatagtctgcccctgggcggcccaagcagcggcgcccctcctcccagcggcggcagcccagccggctccccaacctctaccgaggagggcacctctgagtccgccacccccgagagcggccctggcacctccaccgagcccagcgagggcagcgcacccggcagccctgccggcagccccacctccacagaggagggaaccagcaccgagcccagcgaaggcagcgccccaggcaccagcaccgagcctagtgagggcggctctggcggcggcagcgcccaggagattaaacggatcaacaagatcagaagaagacttgtgaaagacagcaacaccaagaaggccggcaagacaggccccatgaaaaccctgctggttagagtgatgacacccgatctgagagagcggctggaaaacctgagaaagaagcctgaaaatatcccccagcccatcagcaatacatctagagccaacctgaataagctgctgaccgattacaccgaaatgaagaaggcgatcctgcatgtgtactgggaagagttccagaaggaccctgtgggcctgatgagccgggtggcccagcctgccagcaagaagatcgatcagaacaagctgaaacctgagatggacgagaagggcaacctgaccaccgccggctttgcctgctctcagtgtggccagcccctgttcgtgtacaagctggagcaggtgtctgagaagggcaaggcttacaccaactacttcggacggtgcaatgtggccgagcacgaaaagctgatcctgctggcccagctgaagcccgagaaggatagcgacgaagccgtgacatatagcctgggaaagtttgggcagagggccctggatttctacagcattcatgtgaccaaggagtccacccaccccgtgaagcccctggcccagatcgccggaaacagatacgcctccggacctgtgggaaaggccctgagcgacgcatgtatgggcacaatcgcctccttcctgtctaagtaccaggacatcatcatcgaacaccagaaggtggtgaagggcaaccagaagagactggagagcctgcgggagctggccggcaaggaaaacctggaataccctagcgtgaccctgccacctcagcctcacaccaaggagggcgttgatgcctacaacgaagtgatcgcccgggtgcgaatgtgggtgaacctgaacctgtggcagaagctgaagctaagcagagatgatgccaagcctctgctgagactgaagggattcccttcctttcctctggtcgagagacaggccaacgaagtggactggtgggacatggtgtgtaacgtgaagaagctgatcaacgagaaaaaggaggatggcaaggtgttttggcagaatctggctggctacaagagacaggaagccctgagaccatacctgagcagcgaggaagatcggaagaagggaaagaaattcgctcggtaccagctgggcgacctgctgctgcacctggaaaagaagcacggcgaggactggggaaaggtgtacgacgaggcctgggagcggattgacaagaaagtggaaggcctgagcaagcacatcaagctggaagaggaacggagaagcgaggacgcccagagcaaggccgccctgaccgactggctgcgggctaaggccagcttcgtgatcgagggcctgaaggaggccgacaaggacgagttctgcagatgcgagctgaagctgcagaagtggtacggggacctgcggggaaagcccttcgccatcgaagccgagaacagcatcctggacatcagcggcttcagcaagcagtacaactgtgccttcatctggcagaaggacggcgtgaagaagctgaacctgtacctgatcatcaactacttcaagggcggcaagctgcggttcaagaagatcaaacctgaagccttcgaagccaacagattctacaccgtgatcaacaaaaagagcggcgagatcgtgcccatggaggtgaacttcaacttcgacgaccccaacctgatcatcctgcctctggcctttggcaagagacagggcagagaattcatctggaacgacctgctgtccctggaaaccggcagcctgaagctggccaacggaagagtgatcgagaagacactgtacaacagaagaacccggcaggatgagcctgccctgttcgtggccctgaccttcgagcggcgggaggtcctggactcctccaatatcaaaccaatgaacctgatcggcgtggcaagaggcgaaaacatccccgccgtgatcgccctgaccgaccccgagggctgcccactgagccggtttaaggatagcctgggaaacccaacccacatcctgagaatcggcgagagctataaggagaagcagcggaccatccaggccaagaaggaggtggagcagcggagagccggcggctacagccggaagtacgccagcaaagccaagaatctggcagacgatatggtgagaaacaccgctagagatctgctgtactacgccgtgacccaggatgccatgctgatcttcgccaacctgagccggggcttcggccggcagggcaagcggaccttcatggccgagagacagtacacacggatggaggactggctgaccgccaagctggcctacgagggcctgagcaagacctacctgtccaagacactggcccagtacacctccaagacatgcagcaactgtgggtttaccatcaccagcgccgactacgacagggtgctggagaagctgaagaagacagcaacaggctggatgaccacaattaacggcaaggagctgaaggtggagggccagattacctactacaacagatacaagagacagaacgtagtcaaggacctgtccgtcgagctggatagactgagcgaagaatctgtgaacaacgacatctcctcctggacaaagggcagaagcggagaagctctgagcctcctgaagaaaagattctcccatagacccgtgcaggagaagttcgtgtgcctgaactgcggcttcgagacacacgcagccgagcaagccgccctgaacatcgccagatcctggctgttcctgcggagccaggagtacaagaaataccagacaaacaagacaaccggcaacaccgataagagagccttcgtcgagacctggcagtccttttaccggaagaagcttaaggaggtgtggaaacctgccgtgcggtctggcggatctggcggaggctccacaagcctgacctacgacgacgtgtacgtgaacttcacccaggaggagtgggccctgctgaaccccagccagaagagcctgtacaaggacgtgatgctggagacctacaggaacctgatcgccgtgggctacaactgggaggaccacaacatcgaggagcactgccagagcagcaggaggcacggcaggaacgagaggatcctgaccggcgagaacccctacgagggcatccagtgcggcgaggccttcgtgcaccacaccagccccaagaaaaagagaaaagtctaagctgccttctgcggggcttgccttctggccatgcccttcttctctcccttgcacctgtacctcttggtctttgaataaagcctgagtaggaaggctagcaaaaaaaaaaaaaaaaaaaaaaaaaaaaaaaaaaaaaaaaaaaaaaaaaaaaaaaaaaaaaaaaaaaaaaaaaaaaaaaa

SEQ ID NO: 3181 - RNA, 5419 nt, synthetic construct
  source 1..5419: mol_type = other RNA
aggaaataagagagaaaagaagagtaagaagaaatataagagccaccatggcccctaagaagaagcgtaaagtgagccgggtgaacggcagcggcagcggcggcggcatgaaccacgaccaggagttcgacccccctaaggtgtaccctcccgtccccgccgagaagagaaagcccatccgggtcctgagcctgttcgatggcatcgccaccggtctgctggtgctgaaggacctgggcatccaggtggataggtacattgcctccgaggtgtgcgaggactccatcaccgtgggaatggtgcgtcatcagggcaagatcatgtacgtgggcgacgtgcggagcgtgacacagaagcatatccaggagtggggccctttcgacctggtgatcggcggcagcccttgcaatgacctgagcatcgtgaacccagcccggaagggcctgtacgagggaaccggcagactgttcttcgagttttacagactgctgcacgacgcccggcctaaggaaggcgacgaccggcccttcttttggctgttcgagaatgtggtggccatgggagtcagcgacaagcgggatattagccggttcctggagagcaaccccgtgatgatcgatgccaaggaagtgagcgccgcccaccgggccagatacttctggggcaatctgcctggcatgaacagacccctggccagcaccgtgaacgacaagctggagctgcaggagtgcctggagcacggccggatcgccaagttcagcaaggtgagaaccatcaccacccgaagcaacagcatcaaacaaggcaaggaccagcactttcctgtgttcatgaacgagaaggaggacatcctgtggtgtaccgagatggagagagtgttcgggttcccagtccactacacagatgtcagcaacatgtctagactggccagacagagactgctgggaagaagctggtccgtccctgtgatcagacacctgttcgcccctctgaaggagtacttcgcctgcgtgagcagcggcaacagcaacgccaacagccggggccccagcttctctagcggcctggtgccactgtccctgagagggagccacatgggccccatggagatctacaaaaccgtgagcgcctggaagcggcagcctgtgcgcgtgctgagcctgtttcggaatatcgataaagtcctgaaaagcctgggattcctggagagcggctctggctccggcggtggcaccctgaagtacgtggaggatgtgacaaacgtggtcagacgggatgtggagaagtggggccccttcgatctggtgtacggcagcacccaacccctgggcagctcttgtgaccggtgccctggctggtacatgtttcagttccaccggatcctgcagtacgccctgccgagacaggagtcccagcggccattcttttggattttcatggacaacttgctgctgaccgaggatgaccaggaaactaccactcggttcctgcagaccgaagccgtgaccctgcaggacgtgagaggccgggactaccagaacgccatgcgggtgtggtccaacatccctggactgaaaagcaagcacgcacctctgacccctaaagaagaggagtacctgcaggcccaggtgcggagcagaagcaagctggacgcccctaaggtggatctgctggtgaagaattgcctcctgcccctgagagagtacttcaagtatttcagccagaatagtctgcccctgggcggcccaagcagcggcgcccctcctcccagcggcggcagcccagccggctccccaacctctaccgaggagggcacctctgagtccgccacccccgagagcggccctggcacctccaccgagcccagcgagggcagcgcacccggcagccctgccggcagccccacctccacagaggagggaaccagcaccgagcccagcgaaggcagcgccccaggcaccagcaccgagcctagtgagggcggctctggcggcggcagcgcccaggagattaaacggatcaacaagatcagaagaagacttgtgaaagacagcaacaccaagaaggccggcaagacaggccccatgaaaaccctgctggttagagtgatgacacccgatctgagagagcggctggaaaacctgagaaagaagcctgaaaatatcccccagcccatcagcaatacatctagagccaacctgaataagctgctgaccgattacaccgaaatgaagaaggcgatcctgcatgtgtactgggaagagttccagaaggaccctgtgggcctgatgagccgggtggcccagcctgccagcaagaagatcgatcagaacaagctgaaacctgagatggacgagaagggcaacctgaccaccgccggctttgcctgctctcagtgtggccagcccctgttcgtgtacaagctggagcaggtgtctgagaagggcaaggcttacaccaactacttcggacggtgcaatgtggccgagcacgaaaagctgatcctgctggcccagctgaagcccgagaaggatagcgacgaagccgtgacatatagcctgggaaagtttgggcagagggccctggatttctacagcattcatgtgaccaaggagtccacccaccccgtgaagcccctggcccagatcgccggaaacagatacgcctccggacctgtgggaaaggccctgagcgacgcatgtatgggcacaatcgcctccttcctgtctaagtaccaggacatcatcatcgaacaccagaaggtggtgaagggcaaccagaagagactggagagcctgcgggagctggccggcaaggaaaacctggaataccctagcgtgaccctgccacctcagcctcacaccaaggagggcgttgatgcctacaacgaagtgatcgcccgggtgcgaatgtgggtgaacctgaacctgtggcagaagctgaagctaagcagagatgatgccaagcctctgctgagactgaagggattcccttcctttcctctggtcgagagacaggccaacgaagtggactggtgggacatggtgtgtaacgtgaagaagctgatcaacgagaaaaaggaggatggcaaggtgttttggcagaatctggctggctacaagagacaggaagccctgagaccatacctgagcagcgaggaagatcggaagaagggaaagaaattcgctcggtaccagctgggcgacctgctgctgcacctggaaaagaagcacggcgaggactggggaaaggtgtacgacgaggcctgggagcggattgacaagaaagtggaaggcctgagcaagcacatcaagctggaagaggaacggagaagcgaggacgcccagagcaaggccgccctgaccgactggctgcgggctaaggccagcttcgtgatcgagggcctgaaggaggccgacaaggacgagttctgcagatgcgagctgaagctgcagaagtggtacggggacctgcggggaaagcccttcgccatcgaagccgagaacagcatcctggacatcagcggcttcagcaagcagtacaactgtgccttcatctggcagaaggacggcgtgaagaagctgaacctgtacctgatcatcaactacttcaagggcggcaagctgcggttcaagaagatcaaacctgaagccttcgaagccaacagattctacaccgtgatcaacaaaaagagcggcgagatcgtgcccatggaggtgaacttcaacttcgacgaccccaacctgatcatcctgcctctggcctttggcaagagacagggcagagaattcatctggaacgacctgctgtccctggaaaccggcagcctgaagctggccaacggaagagtgatcgagaagacactgtacaacagaagaacccggcaggatgagcctgccctgttcgtggccctgaccttcgagcggcgggaggtcctggactcctccaatatcaaaccaatgaacctgatcggcgtggcaagaggcgaaaacatccccgccgtgatcgccctgaccgaccccgagggctgcccactgagccggtttaaggatagcctgggaaacccaacccacatcctgagaatcggcgagagctataaggagaagcagcggaccatccaggccaagaaggaggtggagcagcggagagccggcggctacagccggaagtacgccagcaaagccaagaatctggcagacgatatggtgagaaacaccgctagagatctgctgtactacgccgtgacccaggatgccatgctgatcttcgccaacctgagccggggcttcggccggcagggcaagcggaccttcatggccgagagacagtacacacggatggaggactggctgaccgccaagctggcctacgagggcctgagcaagacctacctgtccaagacactggcccagtacacctccaagacatgcagcaactgtgggtttaccatcaccagcgccgactacgacagggtgctggagaagctgaagaagacagcaacaggctggatgaccacaattaacggcaaggagctgaaggtggagggccagattacctactacaacagatacaagagacagaacgtagtcaaggacctgtccgtcgagctggatagactgagcgaagaatctgtgaacaacgacatctcctcctggacaaagggcagaagcggagaagctctgagcctcctgaagaaaagattctcccatagacccgtgcaggagaagttcgtgtgcctgaactgcggcttcgagacacacgcagccgagcaagccgccctgaacatcgccagatcctggctgttcctgcggagccaggagtacaagaaataccagacaaacaagacaaccggcaacaccgataagagagccttcgtcgagacctggcagtccttttaccggaagaagcttaaggaggtgtggaaacctgccgtgcggtctggcggatctggcggaggctccacaagcctggagggcctggtgaccttcgaggaggtggccgtgtacttcaccgagagcgagtggagcctgctggaccccgcccagagggccctgtacagggacgtgatggaggagaactacgagaacgtgaccagcctgggcttccccgtgagcaagcccgacgtgatcagctggctggagaggggcgaggacccctgggtgcccgacctgcaggaccccgagaagagggagaccctgagggaggcctgcaccagccccaagaaaaagagaaaagtctaagctgccttctgcggggcttgccttctggccatgcccttcttctctcccttgcacctgtacctcttggtctttgaataaagcctgagtaggaaggctagcaaaaaaaaaaaaaaaaaaaaaaaaaaaaaaaaaaaaaaaaaaaaaaaaaaaaaaaaaaaaaaaaaaaaaaaaaaaaaaaa

SEQ ID NO: 3182 - RNA, 5419 nt, synthetic construct
  source 1..5419: mol_type = other RNA
aggaaataagagagaaaagaagagtaagaagaaatataagagccaccatggcccctaagaagaagcgtaaagtgagccgggtgaacggcagcggcagcggcggcggcatgaaccacgaccaggagttcgacccccctaaggtgtaccctcccgtccccgccgagaagagaaagcccatccgggtcctgagcctgttcgatggcatcgccaccggtctgctggtgctgaaggacctgggcatccaggtggataggtacattgcctccgaggtgtgcgaggactccatcaccgtgggaatggtgcgtcatcagggcaagatcatgtacgtgggcgacgtgcggagcgtgacacagaagcatatccaggagtggggccctttcgacctggtgatcggcggcagcccttgcaatgacctgagcatcgtgaacccagcccggaagggcctgtacgagggaaccggcagactgttcttcgagttttacagactgctgcacgacgcccggcctaaggaaggcgacgaccggcccttcttttggctgttcgagaatgtggtggccatgggagtcagcgacaagcgggatattagccggttcctggagagcaaccccgtgatgatcgatgccaaggaagtgagcgccgcccaccgggccagatacttctggggcaatctgcctggcatgaacagacccctggccagcaccgtgaacgacaagctggagctgcaggagtgcctggagcacggccggatcgccaagttcagcaaggtgagaaccatcaccacccgaagcaacagcatcaaacaaggcaaggaccagcactttcctgtgttcatgaacgagaaggaggacatcctgtggtgtaccgagatggagagagtgttcgggttcccagtccactacacagatgtcagcaacatgtctagactggccagacagagactgctgggaagaagctggtccgtccctgtgatcagacacctgttcgcccctctgaaggagtacttcgcctgcgtgagcagcggcaacagcaacgccaacagccggggccccagcttctctagcggcctggtgccactgtccctgagagggagccacatgggccccatggagatctacaaaaccgtgagcgcctggaagcggcagcctgtgcgcgtgctgagcctgtttcggaatatcgataaagtcctgaaaagcctgggattcctggagagcggctctggctccggcggtggcaccctgaagtacgtggaggatgtgacaaacgtggtcagacgggatgtggagaagtggggccccttcgatctggtgtacggcagcacccaacccctgggcagctcttgtgaccggtgccctggctggtacatgtttcagttccaccggatcctgcagtacgccctgccgagacaggagtcccagcggccattcttttggattttcatggacaacttgctgctgaccgaggatgaccaggaaactaccactcggttcctgcagaccgaagccgtgaccctgcaggacgtgagaggccgggactaccagaacgccatgcgggtgtggtccaacatccctggactgaaaagcaagcacgcacctctgacccctaaagaagaggagtacctgcaggcccaggtgcggagcagaagcaagctggacgcccctaaggtggatctgctggtgaagaattgcctcctgcccctgagagagtacttcaagtatttcagccagaatagtctgcccctgggcggcccaagcagcggcgcccctcctcccagcggcggcagcccagccggctccccaacctctaccgaggagggcacctctgagtccgccacccccgagagcggccctggcacctccaccgagcccagcgagggcagcgcacccggcagccctgccggcagccccacctccacagaggagggaaccagcaccgagcccagcgaaggcagcgccccaggcaccagcaccgagcctagtgagggcggctctggcggcggcagcgcccaggagattaaacggatcaacaagatcagaagaagacttgtgaaagacagcaacaccaagaaggccggcaagacaggccccatgaaaaccctgctggttagagtgatgacacccgatctgagagagcggctggaaaacctgagaaagaagcctgaaaatatcccccagcccatcagcaatacatctagagccaacctgaataagctgctgaccgattacaccgaaatgaagaaggcgatcctgcatgtgtactgggaagagttccagaaggaccctgtgggcctgatgagccgggtggcccagcctgccagcaagaagatcgatcagaacaagctgaaacctgagatggacgagaagggcaacctgaccaccgccggctttgcctgctctcagtgtggccagcccctgttcgtgtacaagctggagcaggtgtctgagaagggcaaggcttacaccaactacttcggacggtgcaatgtggccgagcacgaaaagctgatcctgctggcccagctgaagcccgagaaggatagcgacgaagccgtgacatatagcctgggaaagtttgggcagagggccctggatttctacagcattcatgtgaccaaggagtccacccaccccgtgaagcccctggcccagatcgccggaaacagatacgcctccggacctgtgggaaaggccctgagcgacgcatgtatgggcacaatcgcctccttcctgtctaagtaccaggacatcatcatcgaacaccagaaggtggtgaagggcaaccagaagagactggagagcctgcgggagctggccggcaaggaaaacctggaataccctagcgtgaccctgccacctcagcctcacaccaaggagggcgttgatgcctacaacgaagtgatcgcccgggtgcgaatgtgggtgaacctgaacctgtggcagaagctgaagctaagcagagatgatgccaagcctctgctgagactgaagggattcccttcctttcctctggtcgagagacaggccaacgaagtggactggtgggacatggtgtgtaacgtgaagaagctgatcaacgagaaaaaggaggatggcaaggtgttttggcagaatctggctggctacaagagacaggaagccctgagaccatacctgagcagcgaggaagatcggaagaagggaaagaaattcgctcggtaccagctgggcgacctgctgctgcacctggaaaagaagcacggcgaggactggggaaaggtgtacgacgaggcctgggagcggattgacaagaaagtggaaggcctgagcaagcacatcaagctggaagaggaacggagaagcgaggacgcccagagcaaggccgccctgaccgactggctgcgggctaaggccagcttcgtgatcgagggcctgaaggaggccgacaaggacgagttctgcagatgcgagctgaagctgcagaagtggtacggggacctgcggggaaagcccttcgccatcgaagccgagaacagcatcctggacatcagcggcttcagcaagcagtacaactgtgccttcatctggcagaaggacggcgtgaagaagctgaacctgtacctgatcatcaactacttcaagggcggcaagctgcggttcaagaagatcaaacctgaagccttcgaagccaacagattctacaccgtgatcaacaaaaagagcggcgagatcgtgcccatggaggtgaacttcaacttcgacgaccccaacctgatcatcctgcctctggcctttggcaagagacagggcagagaattcatctggaacgacctgctgtccctggaaaccggcagcctgaagctggccaacggaagagtgatcgagaagacactgtacaacagaagaacccggcaggatgagcctgccctgttcgtggccctgaccttcgagcggcgggaggtcctggactcctccaatatcaaaccaatgaacctgatcggcgtggcaagaggcgaaaacatccccgccgtgatcgccctgaccgaccccgagggctgcccactgagccggtttaaggatagcctgggaaacccaacccacatcctgagaatcggcgagagctataaggagaagcagcggaccatccaggccaagaaggaggtggagcagcggagagccggcggctacagccggaagtacgccagcaaagccaagaatctggcagacgatatggtgagaaacaccgctagagatctgctgtactacgccgtgacccaggatgccatgctgatcttcgccaacctgagccggggcttcggccggcagggcaagcggaccttcatggccgagagacagtacacacggatggaggactggctgaccgccaagctggcctacgagggcctgagcaagacctacctgtccaagacactggcccagtacacctccaagacatgcagcaactgtgggtttaccatcaccagcgccgactacgacagggtgctggagaagctgaagaagacagcaacaggctggatgaccacaattaacggcaaggagctgaaggtggagggccagattacctactacaacagatacaagagacagaacgtagtcaaggacctgtccgtcgagctggatagactgagcgaagaatctgtgaacaacgacatctcctcctggacaaagggcagaagcggagaagctctgagcctcctgaagaaaagattctcccatagacccgtgcaggagaagttcgtgtgcctgaactgcggcttcgagacacacgcagccgagcaagccgccctgaacatcgccagatcctggctgttcctgcggagccaggagtacaagaaataccagacaaacaagacaaccggcaacaccgataagagagccttcgtcgagacctggcagtccttttaccggaagaagcttaaggaggtgtggaaacctgccgtgcggtctggcggatctggcggaggctccacaagcatccaggagagcgtgaccttcaaggacgtgagcgtggacttcacctgggaggagtggaggcacctggaccccgcccagagggacctgtacaggaacgtgatgctggagaactacgagaacctggtgagcgtgggcatcagcgtgagcaccgtggacatgatcagcctgctggagaagagggacggcccctggatgcccgagggcgaggtgagcggcgccatctgccccgacagcctgaacgagaccagccccaagaaaaagagaaaagtctaagctgccttctgcggggcttgccttctggccatgcccttcttctctcccttgcacctgtacctcttggtctttgaataaagcctgagtaggaaggctagcaaaaaaaaaaaaaaaaaaaaaaaaaaaaaaaaaaaaaaaaaaaaaaaaaaaaaaaaaaaaaaaaaaaaaaaaaaaaaaaa

SEQ ID NO: 3183 - RNA, 5419 nt, synthetic construct
  source 1..5419: mol_type = other RNA
aggaaataagagagaaaagaagagtaagaagaaatataagagccaccatggcccctaagaagaagcgtaaagtgagccgggtgaacggcagcggcagcggcggcggcatgaaccacgaccaggagttcgacccccctaaggtgtaccctcccgtccccgccgagaagagaaagcccatccgggtcctgagcctgttcgatggcatcgccaccggtctgctggtgctgaaggacctgggcatccaggtggataggtacattgcctccgaggtgtgcgaggactccatcaccgtgggaatggtgcgtcatcagggcaagatcatgtacgtgggcgacgtgcggagcgtgacacagaagcatatccaggagtggggccctttcgacctggtgatcggcggcagcccttgcaatgacctgagcatcgtgaacccagcccggaagggcctgtacgagggaaccggcagactgttcttcgagttttacagactgctgcacgacgcccggcctaaggaaggcgacgaccggcccttcttttggctgttcgagaatgtggtggccatgggagtcagcgacaagcgggatattagccggttcctggagagcaaccccgtgatgatcgatgccaaggaagtgagcgccgcccaccgggccagatacttctggggcaatctgcctggcatgaacagacccctggccagcaccgtgaacgacaagctggagctgcaggagtgcctggagcacggccggatcgccaagttcagcaaggtgagaaccatcaccacccgaagcaacagcatcaaacaaggcaaggaccagcactttcctgtgttcatgaacgagaaggaggacatcctgtggtgtaccgagatggagagagtgttcgggttcccagtccactacacagatgtcagcaacatgtctagactggccagacagagactgctgggaagaagctggtccgtccctgtgatcagacacctgttcgcccctctgaaggagtacttcgcctgcgtgagcagcggcaacagcaacgccaacagccggggccccagcttctctagcggcctggtgccactgtccctgagagggagccacatgggccccatggagatctacaaaaccgtgagcgcctggaagcggcagcctgtgcgcgtgctgagcctgtttcggaatatcgataaagtcctgaaaagcctgggattcctggagagcggctctggctccggcggtggcaccctgaagtacgtggaggatgtgacaaacgtggtcagacgggatgtggagaagtggggccccttcgatctggtgtacggcagcacccaacccctgggcagctcttgtgaccggtgccctggctggtacatgtttcagttccaccggatcctgcagtacgccctgccgagacaggagtcccagcggccattcttttggattttcatggacaacttgctgctgaccgaggatgaccaggaaactaccactcggttcctgcagaccgaagccgtgaccctgcaggacgtgagaggccgggactaccagaacgccatgcgggtgtggtccaacatccctggactgaaaagcaagcacgcacctctgacccctaaagaagaggagtacctgcaggcccaggtgcggagcagaagcaagctggacgcccctaaggtggatctgctggtgaagaattgcctcctgcccctgagagagtacttcaagtatttcagccagaatagtctgcccctgggcggcccaagcagcggcgcccctcctcccagcggcggcagcccagccggctccccaacctctaccgaggagggcacctctgagtccgccacccccgagagcggccctggcacctccaccgagcccagcgagggcagcgcacccggcagccctgccggcagccccacctccacagaggagggaaccagcaccgagcccagcgaaggcagcgccccaggcaccagcaccgagcctagtgagggcggctctggcggcggcagcgcccaggagattaaacggatcaacaagatcagaagaagacttgtgaaagacagcaacaccaagaaggccggcaagacaggccccatgaaaaccctgctggttagagtgatgacacccgatctgagagagcggctggaaaacctgagaaagaagcctgaaaatatcccccagcccatcagcaatacatctagagccaacctgaataagctgctgaccgattacaccgaaatgaagaaggcgatcctgcatgtgtactgggaagagttccagaaggaccctgtgggcctgatgagccgggtggcccagcctgccagcaagaagatcgatcagaacaagctgaaacctgagatggacgagaagggcaacctgaccaccgccggctttgcctgctctcagtgtggccagcccctgttcgtgtacaagctggagcaggtgtctgagaagggcaaggcttacaccaactacttcggacggtgcaatgtggccgagcacgaaaagctgatcctgctggcccagctgaagcccgagaaggatagcgacgaagccgtgacatatagcctgggaaagtttgggcagagggccctggatttctacagcattcatgtgaccaaggagtccacccaccccgtgaagcccctggcccagatcgccggaaacagatacgcctccggacctgtgggaaaggccctgagcgacgcatgtatgggcacaatcgcctccttcctgtctaagtaccaggacatcatcatcgaacaccagaaggtggtgaagggcaaccagaagagactggagagcctgcgggagctggccggcaaggaaaacctggaataccctagcgtgaccctgccacctcagcctcacaccaaggagggcgttgatgcctacaacgaagtgatcgcccgggtgcgaatgtgggtgaacctgaacctgtggcagaagctgaagctaagcagagatgatgccaagcctctgctgagactgaagggattcccttcctttcctctggtcgagagacaggccaacgaagtggactggtgggacatggtgtgtaacgtgaagaagctgatcaacgagaaaaaggaggatggcaaggtgttttggcagaatctggctggctacaagagacaggaagccctgagaccatacctgagcagcgaggaagatcggaagaagggaaagaaattcgctcggtaccagctgggcgacctgctgctgcacctggaaaagaagcacggcgaggactggggaaaggtgtacgacgaggcctgggagcggattgacaagaaagtggaaggcctgagcaagcacatcaagctggaagaggaacggagaagcgaggacgcccagagcaaggccgccctgaccgactggctgcgggctaaggccagcttcgtgatcgagggcctgaaggaggccgacaaggacgagttctgcagatgcgagctgaagctgcagaagtggtacggggacctgcggggaaagcccttcgccatcgaagccgagaacagcatcctggacatcagcggcttcagcaagcagtacaactgtgccttcatctggcagaaggacggcgtgaagaagctgaacctgtacctgatcatcaactacttcaagggcggcaagctgcggttcaagaagatcaaacctgaagccttcgaagccaacagattctacaccgtgatcaacaaaaagagcggcgagatcgtgcccatggaggtgaacttcaacttcgacgaccccaacctgatcatcctgcctctggcctttggcaagagacagggcagagaattcatctggaacgacctgctgtccctggaaaccggcagcctgaagctggccaacggaagagtgatcgagaagacactgtacaacagaagaacccggcaggatgagcctgccctgttcgtggccctgaccttcgagcggcgggaggtcctggactcctccaatatcaaaccaatgaacctgatcggcgtggcaagaggcgaaaacatccccgccgtgatcgccctgaccgaccccgagggctgcccactgagccggtttaaggatagcctgggaaacccaacccacatcctgagaatcggcgagagctataaggagaagcagcggaccatccaggccaagaaggaggtggagcagcggagagccggcggctacagccggaagtacgccagcaaagccaagaatctggcagacgatatggtgagaaacaccgctagagatctgctgtactacgccgtgacccaggatgccatgctgatcttcgccaacctgagccggggcttcggccggcagggcaagcggaccttcatggccgagagacagtacacacggatggaggactggctgaccgccaagctggcctacgagggcctgagcaagacctacctgtccaagacactggcccagtacacctccaagacatgcagcaactgtgggtttaccatcaccagcgccgactacgacagggtgctggagaagctgaagaagacagcaacaggctggatgaccacaattaacggcaaggagctgaaggtggagggccagattacctactacaacagatacaagagacagaacgtagtcaaggacctgtccgtcgagctggatagactgagcgaagaatctgtgaacaacgacatctcctcctggacaaagggcagaagcggagaagctctgagcctcctgaagaaaagattctcccatagacccgtgcaggagaagttcgtgtgcctgaactgcggcttcgagacacacgcagccgagcaagccgccctgaacatcgccagatcctggctgttcctgcggagccaggagtacaagaaataccagacaaacaagacaaccggcaacaccgataagagagccttcgtcgagacctggcagtccttttaccggaagaagcttaaggaggtgtggaaacctgccgtgcggtctggcggatctggcggaggctccacaagcaagacccaggtgagcctggagttcaacgacgtggccgtggagttcgcctgggaggagtggcagctgctggaccccgcccagaaggacctgtacagggaggtgatgctggagaacttccacaacctggtgagcgtgggctgccaggtgggcaagcccgacgtgctgttcaggctggagagggagcccccctggagcctggaggacgagatccacagccagaacttcagcgagatccaggaggtgaccagccccaagaaaaagagaaaagtctaagctgccttctgcggggcttgccttctggccatgcccttcttctctcccttgcacctgtacctcttggtctttgaataaagcctgagtaggaaggctagcaaaaaaaaaaaaaaaaaaaaaaaaaaaaaaaaaaaaaaaaaaaaaaaaaaaaaaaaaaaaaaaaaaaaaaaaaaaaaaaa

SEQ ID NO: 3184 - RNA, 5419 nt, synthetic construct
  source 1..5419: mol_type = other RNA
aggaaataagagagaaaagaagagtaagaagaaatataagagccaccatggcccctaagaagaagcgtaaagtgagccgggtgaacggcagcggcagcggcggcggcatgaaccacgaccaggagttcgacccccctaaggtgtaccctcccgtccccgccgagaagagaaagcccatccgggtcctgagcctgttcgatggcatcgccaccggtctgctggtgctgaaggacctgggcatccaggtggataggtacattgcctccgaggtgtgcgaggactccatcaccgtgggaatggtgcgtcatcagggcaagatcatgtacgtgggcgacgtgcggagcgtgacacagaagcatatccaggagtggggccctttcgacctggtgatcggcggcagcccttgcaatgacctgagcatcgtgaacccagcccggaagggcctgtacgagggaaccggcagactgttcttcgagttttacagactgctgcacgacgcccggcctaaggaaggcgacgaccggcccttcttttggctgttcgagaatgtggtggccatgggagtcagcgacaagcgggatattagccggttcctggagagcaaccccgtgatgatcgatgccaaggaagtgagcgccgcccaccgggccagatacttctggggcaatctgcctggcatgaacagacccctggccagcaccgtgaacgacaagctggagctgcaggagtgcctggagcacggccggatcgccaagttcagcaaggtgagaaccatcaccacccgaagcaacagcatcaaacaaggcaaggaccagcactttcctgtgttcatgaacgagaaggaggacatcctgtggtgtaccgagatggagagagtgttcgggttcccagtccactacacagatgtcagcaacatgtctagactggccagacagagactgctgggaagaagctggtccgtccctgtgatcagacacctgttcgcccctctgaaggagtacttcgcctgcgtgagcagcggcaacagcaacgccaacagccggggccccagcttctctagcggcctggtgccactgtccctgagagggagccacatgggccccatggagatctacaaaaccgtgagcgcctggaagcggcagcctgtgcgcgtgctgagcctgtttcggaatatcgataaagtcctgaaaagcctgggattcctggagagcggctctggctccggcggtggcaccctgaagtacgtggaggatgtgacaaacgtggtcagacgggatgtggagaagtggggccccttcgatctggtgtacggcagcacccaacccctgggcagctcttgtgaccggtgccctggctggtacatgtttcagttccaccggatcctgcagtacgccctgccgagacaggagtcccagcggccattcttttggattttcatggacaacttgctgctgaccgaggatgaccaggaaactaccactcggttcctgcagaccgaagccgtgaccctgcaggacgtgagaggccgggactaccagaacgccatgcgggtgtggtccaacatccctggactgaaaagcaagcacgcacctctgacccctaaagaagaggagtacctgcaggcccaggtgcggagcagaagcaagctggacgcccctaaggtggatctgctggtgaagaattgcctcctgcccctgagagagtacttcaagtatttcagccagaatagtctgcccctgggcggcccaagcagcggcgcccctcctcccagcggcggcagcccagccggctccccaacctctaccgaggagggcacctctgagtccgccacccccgagagcggccctggcacctccaccgagcccagcgagggcagcgcacccggcagccctgccggcagccccacctccacagaggagggaaccagcaccgagcccagcgaaggcagcgccccaggcaccagcaccgagcctagtgagggcggctctggcggcggcagcgcccaggagattaaacggatcaacaagatcagaagaagacttgtgaaagacagcaacaccaagaaggccggcaagacaggccccatgaaaaccctgctggttagagtgatgacacccgatctgagagagcggctggaaaacctgagaaagaagcctgaaaatatcccccagcccatcagcaatacatctagagccaacctgaataagctgctgaccgattacaccgaaatgaagaaggcgatcctgcatgtgtactgggaagagttccagaaggaccctgtgggcctgatgagccgggtggcccagcctgccagcaagaagatcgatcagaacaagctgaaacctgagatggacgagaagggcaacctgaccaccgccggctttgcctgctctcagtgtggccagcccctgttcgtgtacaagctggagcaggtgtctgagaagggcaaggcttacaccaactacttcggacggtgcaatgtggccgagcacgaaaagctgatcctgctggcccagctgaagcccgagaaggatagcgacgaagccgtgacatatagcctgggaaagtttgggcagagggccctggatttctacagcattcatgtgaccaaggagtccacccaccccgtgaagcccctggcccagatcgccggaaacagatacgcctccggacctgtgggaaaggccctgagcgacgcatgtatgggcacaatcgcctccttcctgtctaagtaccaggacatcatcatcgaacaccagaaggtggtgaagggcaaccagaagagactggagagcctgcgggagctggccggcaaggaaaacctggaataccctagcgtgaccctgccacctcagcctcacaccaaggagggcgttgatgcctacaacgaagtgatcgcccgggtgcgaatgtgggtgaacctgaacctgtggcagaagctgaagctaagcagagatgatgccaagcctctgctgagactgaagggattcccttcctttcctctggtcgagagacaggccaacgaagtggactggtgggacatggtgtgtaacgtgaagaagctgatcaacgagaaaaaggaggatggcaaggtgttttggcagaatctggctggctacaagagacaggaagccctgagaccatacctgagcagcgaggaagatcggaagaagggaaagaaattcgctcggtaccagctgggcgacctgctgctgcacctggaaaagaagcacggcgaggactggggaaaggtgtacgacgaggcctgggagcggattgacaagaaagtggaaggcctgagcaagcacatcaagctggaagaggaacggagaagcgaggacgcccagagcaaggccgccctgaccgactggctgcgggctaaggccagcttcgtgatcgagggcctgaaggaggccgacaaggacgagttctgcagatgcgagctgaagctgcagaagtggtacggggacctgcggggaaagcccttcgccatcgaagccgagaacagcatcctggacatcagcggcttcagcaagcagtacaactgtgccttcatctggcagaaggacggcgtgaagaagctgaacctgtacctgatcatcaactacttcaagggcggcaagctgcggttcaagaagatcaaacctgaagccttcgaagccaacagattctacaccgtgatcaacaaaaagagcggcgagatcgtgcccatggaggtgaacttcaacttcgacgaccccaacctgatcatcctgcctctggcctttggcaagagacagggcagagaattcatctggaacgacctgctgtccctggaaaccggcagcctgaagctggccaacggaagagtgatcgagaagacactgtacaacagaagaacccggcaggatgagcctgccctgttcgtggccctgaccttcgagcggcgggaggtcctggactcctccaatatcaaaccaatgaacctgatcggcgtggcaagaggcgaaaacatccccgccgtgatcgccctgaccgaccccgagggctgcccactgagccggtttaaggatagcctgggaaacccaacccacatcctgagaatcggcgagagctataaggagaagcagcggaccatccaggccaagaaggaggtggagcagcggagagccggcggctacagccggaagtacgccagcaaagccaagaatctggcagacgatatggtgagaaacaccgctagagatctgctgtactacgccgtgacccaggatgccatgctgatcttcgccaacctgagccggggcttcggccggcagggcaagcggaccttcatggccgagagacagtacacacggatggaggactggctgaccgccaagctggcctacgagggcctgagcaagacctacctgtccaagacactggcccagtacacctccaagacatgcagcaactgtgggtttaccatcaccagcgccgactacgacagggtgctggagaagctgaagaagacagcaacaggctggatgaccacaattaacggcaaggagctgaaggtggagggccagattacctactacaacagatacaagagacagaacgtagtcaaggacctgtccgtcgagctggatagactgagcgaagaatctgtgaacaacgacatctcctcctggacaaagggcagaagcggagaagctctgagcctcctgaagaaaagattctcccatagacccgtgcaggagaagttcgtgtgcctgaactgcggcttcgagacacacgcagccgagcaagccgccctgaacatcgccagatcctggctgttcctgcggagccaggagtacaagaaataccagacaaacaagacaaccggcaacaccgataagagagccttcgtcgagacctggcagtccttttaccggaagaagcttaaggaggtgtggaaacctgccgtgcggtctggcggatctggcggaggctccacaagctgcgagggcagcgtgagcttcgaggacgtgaccatggacttcagcagggaggagtggcagcagctggaccccgcccagaggtgcctgtaccaggacgtgatgctggagatctacagccacctgctgttcgtgggctacaacatccccaaccccgagatcatcagcaggatggagaagggcgaggagccctggatgagggaggtgcagctgccccaccagaggcacagggagagggccttcggcaccagccccaagaaaaagagaaaagtctaagctgccttctgcggggcttgccttctggccatgcccttcttctctcccttgcacctgtacctcttggtctttgaataaagcctgagtaggaaggctagcaaaaaaaaaaaaaaaaaaaaaaaaaaaaaaaaaaaaaaaaaaaaaaaaaaaaaaaaaaaaaaaaaaaaaaaaaaaaaaaa

SEQ ID NO: 3185 - RNA, 5419 nt, synthetic construct
  source 1..5419: mol_type = other RNA
aggaaataagagagaaaagaagagtaagaagaaatataagagccaccatggcccctaagaagaagcgtaaagtgagccgggtgaacggcagcggcagcggcggcggcatgaaccacgaccaggagttcgacccccctaaggtgtaccctcccgtccccgccgagaagagaaagcccatccgggtcctgagcctgttcgatggcatcgccaccggtctgctggtgctgaaggacctgggcatccaggtggataggtacattgcctccgaggtgtgcgaggactccatcaccgtgggaatggtgcgtcatcagggcaagatcatgtacgtgggcgacgtgcggagcgtgacacagaagcatatccaggagtggggccctttcgacctggtgatcggcggcagcccttgcaatgacctgagcatcgtgaacccagcccggaagggcctgtacgagggaaccggcagactgttcttcgagttttacagactgctgcacgacgcccggcctaaggaaggcgacgaccggcccttcttttggctgttcgagaatgtggtggccatgggagtcagcgacaagcgggatattagccggttcctggagagcaaccccgtgatgatcgatgccaaggaagtgagcgccgcccaccgggccagatacttctggggcaatctgcctggcatgaacagacccctggccagcaccgtgaacgacaagctggagctgcaggagtgcctggagcacggccggatcgccaagttcagcaaggtgagaaccatcaccacccgaagcaacagcatcaaacaaggcaaggaccagcactttcctgtgttcatgaacgagaaggaggacatcctgtggtgtaccgagatggagagagtgttcgggttcccagtccactacacagatgtcagcaacatgtctagactggccagacagagactgctgggaagaagctggtccgtccctgtgatcagacacctgttcgcccctctgaaggagtacttcgcctgcgtgagcagcggcaacagcaacgccaacagccggggccccagcttctctagcggcctggtgccactgtccctgagagggagccacatgggccccatggagatctacaaaaccgtgagcgcctggaagcggcagcctgtgcgcgtgctgagcctgtttcggaatatcgataaagtcctgaaaagcctgggattcctggagagcggctctggctccggcggtggcaccctgaagtacgtggaggatgtgacaaacgtggtcagacgggatgtggagaagtggggccccttcgatctggtgtacggcagcacccaacccctgggcagctcttgtgaccggtgccctggctggtacatgtttcagttccaccggatcctgcagtacgccctgccgagacaggagtcccagcggccattcttttggattttcatggacaacttgctgctgaccgaggatgaccaggaaactaccactcggttcctgcagaccgaagccgtgaccctgcaggacgtgagaggccgggactaccagaacgccatgcgggtgtggtccaacatccctggactgaaaagcaagcacgcacctctgacccctaaagaagaggagtacctgcaggcccaggtgcggagcagaagcaagctggacgcccctaaggtggatctgctggtgaagaattgcctcctgcccctgagagagtacttcaagtatttcagccagaatagtctgcccctgggcggcccaagcagcggcgcccctcctcccagcggcggcagcccagccggctccccaacctctaccgaggagggcacctctgagtccgccacccccgagagcggccctggcacctccaccgagcccagcgagggcagcgcacccggcagccctgccggcagccccacctccacagaggagggaaccagcaccgagcccagcgaaggcagcgccccaggcaccagcaccgagcctagtgagggcggctctggcggcggcagcgcccaggagattaaacggatcaacaagatcagaagaagacttgtgaaagacagcaacaccaagaaggccggcaagacaggccccatgaaaaccctgctggttagagtgatgacacccgatctgagagagcggctggaaaacctgagaaagaagcctgaaaatatcccccagcccatcagcaatacatctagagccaacctgaataagctgctgaccgattacaccgaaatgaagaaggcgatcctgcatgtgtactgggaagagttccagaaggaccctgtgggcctgatgagccgggtggcccagcctgccagcaagaagatcgatcagaacaagctgaaacctgagatggacgagaagggcaacctgaccaccgccggctttgcctgctctcagtgtggccagcccctgttcgtgtacaagctggagcaggtgtctgagaagggcaaggcttacaccaactacttcggacggtgcaatgtggccgagcacgaaaagctgatcctgctggcccagctgaagcccgagaaggatagcgacgaagccgtgacatatagcctgggaaagtttgggcagagggccctggatttctacagcattcatgtgaccaaggagtccacccaccccgtgaagcccctggcccagatcgccggaaacagatacgcctccggacctgtgggaaaggccctgagcgacgcatgtatgggcacaatcgcctccttcctgtctaagtaccaggacatcatcatcgaacaccagaaggtggtgaagggcaaccagaagagactggagagcctgcgggagctggccggcaaggaaaacctggaataccctagcgtgaccctgccacctcagcctcacaccaaggagggcgttgatgcctacaacgaagtgatcgcccgggtgcgaatgtgggtgaacctgaacctgtggcagaagctgaagctaagcagagatgatgccaagcctctgctgagactgaagggattcccttcctttcctctggtcgagagacaggccaacgaagtggactggtgggacatggtgtgtaacgtgaagaagctgatcaacgagaaaaaggaggatggcaaggtgttttggcagaatctggctggctacaagagacaggaagccctgagaccatacctgagcagcgaggaagatcggaagaagggaaagaaattcgctcggtaccagctgggcgacctgctgctgcacctggaaaagaagcacggcgaggactggggaaaggtgtacgacgaggcctgggagcggattgacaagaaagtggaaggcctgagcaagcacatcaagctggaagaggaacggagaagcgaggacgcccagagcaaggccgccctgaccgactggctgcgggctaaggccagcttcgtgatcgagggcctgaaggaggccgacaaggacgagttctgcagatgcgagctgaagctgcagaagtggtacggggacctgcggggaaagcccttcgccatcgaagccgagaacagcatcctggacatcagcggcttcagcaagcagtacaactgtgccttcatctggcagaaggacggcgtgaagaagctgaacctgtacctgatcatcaactacttcaagggcggcaagctgcggttcaagaagatcaaacctgaagccttcgaagccaacagattctacaccgtgatcaacaaaaagagcggcgagatcgtgcccatggaggtgaacttcaacttcgacgaccccaacctgatcatcctgcctctggcctttggcaagagacagggcagagaattcatctggaacgacctgctgtccctggaaaccggcagcctgaagctggccaacggaagagtgatcgagaagacactgtacaacagaagaacccggcaggatgagcctgccctgttcgtggccctgaccttcgagcggcgggaggtcctggactcctccaatatcaaaccaatgaacctgatcggcgtggcaagaggcgaaaacatccccgccgtgatcgccctgaccgaccccgagggctgcccactgagccggtttaaggatagcctgggaaacccaacccacatcctgagaatcggcgagagctataaggagaagcagcggaccatccaggccaagaaggaggtggagcagcggagagccggcggctacagccggaagtacgccagcaaagccaagaatctggcagacgatatggtgagaaacaccgctagagatctgctgtactacgccgtgacccaggatgccatgctgatcttcgccaacctgagccggggcttcggccggcagggcaagcggaccttcatggccgagagacagtacacacggatggaggactggctgaccgccaagctggcctacgagggcctgagcaagacctacctgtccaagacactggcccagtacacctccaagacatgcagcaactgtgggtttaccatcaccagcgccgactacgacagggtgctggagaagctgaagaagacagcaacaggctggatgaccacaattaacggcaaggagctgaaggtggagggccagattacctactacaacagatacaagagacagaacgtagtcaaggacctgtccgtcgagctggatagactgagcgaagaatctgtgaacaacgacatctcctcctggacaaagggcagaagcggagaagctctgagcctcctgaagaaaagattctcccatagacccgtgcaggagaagttcgtgtgcctgaactgcggcttcgagacacacgcagccgagcaagccgccctgaacatcgccagatcctggctgttcctgcggagccaggagtacaagaaataccagacaaacaagacaaccggcaacaccgataagagagccttcgtcgagacctggcagtccttttaccggaagaagcttaaggaggtgtggaaacctgccgtgcggtctggcggatctggcggaggctccacaagcctgcaggagagcgtgaccttcagcgacgtggccgtggacttcaccctggaggagtggggctgcctgtgccccccccagaaggagatgtacagggaggtgatgctggagaactacggcaacctggtgtgcctgggcctggccatgagcaagcccgacgtgatcagcaggctggagaggggcgaggcccccaggagccccggcggcgacctgggcagcgccgactggggcaccgagagcggcgccaccagccccaagaaaaagagaaaagtctaagctgccttctgcggggcttgccttctggccatgcccttcttctctcccttgcacctgtacctcttggtctttgaataaagcctgagtaggaaggctagcaaaaaaaaaaaaaaaaaaaaaaaaaaaaaaaaaaaaaaaaaaaaaaaaaaaaaaaaaaaaaaaaaaaaaaaaaaaaaaaa

SEQ ID NO: 3186 - RNA, 5419 nt, synthetic construct
  source 1..5419: mol_type = other RNA
aggaaataagagagaaaagaagagtaagaagaaatataagagccaccatggcccctaagaagaagcgtaaagtgagccgggtgaacggcagcggcagcggcggcggcatgaaccacgaccaggagttcgacccccctaaggtgtaccctcccgtccccgccgagaagagaaagcccatccgggtcctgagcctgttcgatggcatcgccaccggtctgctggtgctgaaggacctgggcatccaggtggataggtacattgcctccgaggtgtgcgaggactccatcaccgtgggaatggtgcgtcatcagggcaagatcatgtacgtgggcgacgtgcggagcgtgacacagaagcatatccaggagtggggccctttcgacctggtgatcggcggcagcccttgcaatgacctgagcatcgtgaacccagcccggaagggcctgtacgagggaaccggcagactgttcttcgagttttacagactgctgcacgacgcccggcctaaggaaggcgacgaccggcccttcttttggctgttcgagaatgtggtggccatgggagtcagcgacaagcgggatattagccggttcctggagagcaaccccgtgatgatcgatgccaaggaagtgagcgccgcccaccgggccagatacttctggggcaatctgcctggcatgaacagacccctggccagcaccgtgaacgacaagctggagctgcaggagtgcctggagcacggccggatcgccaagttcagcaaggtgagaaccatcaccacccgaagcaacagcatcaaacaaggcaaggaccagcactttcctgtgttcatgaacgagaaggaggacatcctgtggtgtaccgagatggagagagtgttcgggttcccagtccactacacagatgtcagcaacatgtctagactggccagacagagactgctgggaagaagctggtccgtccctgtgatcagacacctgttcgcccctctgaaggagtacttcgcctgcgtgagcagcggcaacagcaacgccaacagccggggccccagcttctctagcggcctggtgccactgtccctgagagggagccacatgggccccatggagatctacaaaaccgtgagcgcctggaagcggcagcctgtgcgcgtgctgagcctgtttcggaatatcgataaagtcctgaaaagcctgggattcctggagagcggctctggctccggcggtggcaccctgaagtacgtggaggatgtgacaaacgtggtcagacgggatgtggagaagtggggccccttcgatctggtgtacggcagcacccaacccctgggcagctcttgtgaccggtgccctggctggtacatgtttcagttccaccggatcctgcagtacgccctgccgagacaggagtcccagcggccattcttttggattttcatggacaacttgctgctgaccgaggatgaccaggaaactaccactcggttcctgcagaccgaagccgtgaccctgcaggacgtgagaggccgggactaccagaacgccatgcgggtgtggtccaacatccctggactgaaaagcaagcacgcacctctgacccctaaagaagaggagtacctgcaggcccaggtgcggagcagaagcaagctggacgcccctaaggtggatctgctggtgaagaattgcctcctgcccctgagagagtacttcaagtatttcagccagaatagtctgcccctgggcggcccaagcagcggcgcccctcctcccagcggcggcagcccagccggctccccaacctctaccgaggagggcacctctgagtccgccacccccgagagcggccctggcacctccaccgagcccagcgagggcagcgcacccggcagccctgccggcagccccacctccacagaggagggaaccagcaccgagcccagcgaaggcagcgccccaggcaccagcaccgagcctagtgagggcggctctggcggcggcagcgcccaggagattaaacggatcaacaagatcagaagaagacttgtgaaagacagcaacaccaagaaggccggcaagacaggccccatgaaaaccctgctggttagagtgatgacacccgatctgagagagcggctggaaaacctgagaaagaagcctgaaaatatcccccagcccatcagcaatacatctagagccaacctgaataagctgctgaccgattacaccgaaatgaagaaggcgatcctgcatgtgtactgggaagagttccagaaggaccctgtgggcctgatgagccgggtggcccagcctgccagcaagaagatcgatcagaacaagctgaaacctgagatggacgagaagggcaacctgaccaccgccggctttgcctgctctcagtgtggccagcccctgttcgtgtacaagctggagcaggtgtctgagaagggcaaggcttacaccaactacttcggacggtgcaatgtggccgagcacgaaaagctgatcctgctggcccagctgaagcccgagaaggatagcgacgaagccgtgacatatagcctgggaaagtttgggcagagggccctggatttctacagcattcatgtgaccaaggagtccacccaccccgtgaagcccctggcccagatcgccggaaacagatacgcctccggacctgtgggaaaggccctgagcgacgcatgtatgggcacaatcgcctccttcctgtctaagtaccaggacatcatcatcgaacaccagaaggtggtgaagggcaaccagaagagactggagagcctgcgggagctggccggcaaggaaaacctggaataccctagcgtgaccctgccacctcagcctcacaccaaggagggcgttgatgcctacaacgaagtgatcgcccgggtgcgaatgtgggtgaacctgaacctgtggcagaagctgaagctaagcagagatgatgccaagcctctgctgagactgaagggattcccttcctttcctctggtcgagagacaggccaacgaagtggactggtgggacatggtgtgtaacgtgaagaagctgatcaacgagaaaaaggaggatggcaaggtgttttggcagaatctggctggctacaagagacaggaagccctgagaccatacctgagcagcgaggaagatcggaagaagggaaagaaattcgctcggtaccagctgggcgacctgctgctgcacctggaaaagaagcacggcgaggactggggaaaggtgtacgacgaggcctgggagcggattgacaagaaagtggaaggcctgagcaagcacatcaagctggaagaggaacggagaagcgaggacgcccagagcaaggccgccctgaccgactggctgcgggctaaggccagcttcgtgatcgagggcctgaaggaggccgacaaggacgagttctgcagatgcgagctgaagctgcagaagtggtacggggacctgcggggaaagcccttcgccatcgaagccgagaacagcatcctggacatcagcggcttcagcaagcagtacaactgtgccttcatctggcagaaggacggcgtgaagaagctgaacctgtacctgatcatcaactacttcaagggcggcaagctgcggttcaagaagatcaaacctgaagccttcgaagccaacagattctacaccgtgatcaacaaaaagagcggcgagatcgtgcccatggaggtgaacttcaacttcgacgaccccaacctgatcatcctgcctctggcctttggcaagagacagggcagagaattcatctggaacgacctgctgtccctggaaaccggcagcctgaagctggccaacggaagagtgatcgagaagacactgtacaacagaagaacccggcaggatgagcctgccctgttcgtggccctgaccttcgagcggcgggaggtcctggactcctccaatatcaaaccaatgaacctgatcggcgtggcaagaggcgaaaacatccccgccgtgatcgccctgaccgaccccgagggctgcccactgagccggtttaaggatagcctgggaaacccaacccacatcctgagaatcggcgagagctataaggagaagcagcggaccatccaggccaagaaggaggtggagcagcggagagccggcggctacagccggaagtacgccagcaaagccaagaatctggcagacgatatggtgagaaacaccgctagagatctgctgtactacgccgtgacccaggatgccatgctgatcttcgccaacctgagccggggcttcggccggcagggcaagcggaccttcatggccgagagacagtacacacggatggaggactggctgaccgccaagctggcctacgagggcctgagcaagacctacctgtccaagacactggcccagtacacctccaagacatgcagcaactgtgggtttaccatcaccagcgccgactacgacagggtgctggagaagctgaagaagacagcaacaggctggatgaccacaattaacggcaaggagctgaaggtggagggccagattacctactacaacagatacaagagacagaacgtagtcaaggacctgtccgtcgagctggatagactgagcgaagaatctgtgaacaacgacatctcctcctggacaaagggcagaagcggagaagctctgagcctcctgaagaaaagattctcccatagacccgtgcaggagaagttcgtgtgcctgaactgcggcttcgagacacacgcagccgagcaagccgccctgaacatcgccagatcctggctgttcctgcggagccaggagtacaagaaataccagacaaacaagacaaccggcaacaccgataagagagccttcgtcgagacctggcagtccttttaccggaagaagcttaaggaggtgtggaaacctgccgtgcggtctggcggatctggcggaggctccacaagcagctgggccagcgtggtgttcgaggacgtggccgtgaacttcacccccgaggagtgggccctgctgaacaggggccagaggaagctgtacagggacgtgatgctggagacctgcaggaacctgagcgccgtggagaagaggaagttccacagcagcggcgacctgaccaggatgcaggagggcctgctgaggagccccctggtggagagcgtgtgcgagaggatcgagggcgacccctgcggcaccagccccaagaaaaagagaaaagtctaagctgccttctgcggggcttgccttctggccatgcccttcttctctcccttgcacctgtacctcttggtctttgaataaagcctgagtaggaaggctagcaaaaaaaaaaaaaaaaaaaaaaaaaaaaaaaaaaaaaaaaaaaaaaaaaaaaaaaaaaaaaaaaaaaaaaaaaaaaaaaa

SEQ ID NO: 3187 - RNA, 5419 nt, synthetic construct
  source 1..5419: mol_type = other RNA
aggaaataagagagaaaagaagagtaagaagaaatataagagccaccatggcccctaagaagaagcgtaaagtgagccgggtgaacggcagcggcagcggcggcggcatgaaccacgaccaggagttcgacccccctaaggtgtaccctcccgtccccgccgagaagagaaagcccatccgggtcctgagcctgttcgatggcatcgccaccggtctgctggtgctgaaggacctgggcatccaggtggataggtacattgcctccgaggtgtgcgaggactccatcaccgtgggaatggtgcgtcatcagggcaagatcatgtacgtgggcgacgtgcggagcgtgacacagaagcatatccaggagtggggccctttcgacctggtgatcggcggcagcccttgcaatgacctgagcatcgtgaacccagcccggaagggcctgtacgagggaaccggcagactgttcttcgagttttacagactgctgcacgacgcccggcctaaggaaggcgacgaccggcccttcttttggctgttcgagaatgtggtggccatgggagtcagcgacaagcgggatattagccggttcctggagagcaaccccgtgatgatcgatgccaaggaagtgagcgccgcccaccgggccagatacttctggggcaatctgcctggcatgaacagacccctggccagcaccgtgaacgacaagctggagctgcaggagtgcctggagcacggccggatcgccaagttcagcaaggtgagaaccatcaccacccgaagcaacagcatcaaacaaggcaaggaccagcactttcctgtgttcatgaacgagaaggaggacatcctgtggtgtaccgagatggagagagtgttcgggttcccagtccactacacagatgtcagcaacatgtctagactggccagacagagactgctgggaagaagctggtccgtccctgtgatcagacacctgttcgcccctctgaaggagtacttcgcctgcgtgagcagcggcaacagcaacgccaacagccggggccccagcttctctagcggcctggtgccactgtccctgagagggagccacatgggccccatggagatctacaaaaccgtgagcgcctggaagcggcagcctgtgcgcgtgctgagcctgtttcggaatatcgataaagtcctgaaaagcctgggattcctggagagcggctctggctccggcggtggcaccctgaagtacgtggaggatgtgacaaacgtggtcagacgggatgtggagaagtggggccccttcgatctggtgtacggcagcacccaacccctgggcagctcttgtgaccggtgccctggctggtacatgtttcagttccaccggatcctgcagtacgccctgccgagacaggagtcccagcggccattcttttggattttcatggacaacttgctgctgaccgaggatgaccaggaaactaccactcggttcctgcagaccgaagccgtgaccctgcaggacgtgagaggccgggactaccagaacgccatgcgggtgtggtccaacatccctggactgaaaagcaagcacgcacctctgacccctaaagaagaggagtacctgcaggcccaggtgcggagcagaagcaagctggacgcccctaaggtggatctgctggtgaagaattgcctcctgcccctgagagagtacttcaagtatttcagccagaatagtctgcccctgggcggcccaagcagcggcgcccctcctcccagcggcggcagcccagccggctccccaacctctaccgaggagggcacctctgagtccgccacccccgagagcggccctggcacctccaccgagcccagcgagggcagcgcacccggcagccctgccggcagccccacctccacagaggagggaaccagcaccgagcccagcgaaggcagcgccccaggcaccagcaccgagcctagtgagggcggctctggcggcggcagcgcccaggagattaaacggatcaacaagatcagaagaagacttgtgaaagacagcaacaccaagaaggccggcaagacaggccccatgaaaaccctgctggttagagtgatgacacccgatctgagagagcggctggaaaacctgagaaagaagcctgaaaatatcccccagcccatcagcaatacatctagagccaacctgaataagctgctgaccgattacaccgaaatgaagaaggcgatcctgcatgtgtactgggaagagttccagaaggaccctgtgggcctgatgagccgggtggcccagcctgccagcaagaagatcgatcagaacaagctgaaacctgagatggacgagaagggcaacctgaccaccgccggctttgcctgctctcagtgtggccagcccctgttcgtgtacaagctggagcaggtgtctgagaagggcaaggcttacaccaactacttcggacggtgcaatgtggccgagcacgaaaagctgatcctgctggcccagctgaagcccgagaaggatagcgacgaagccgtgacatatagcctgggaaagtttgggcagagggccctggatttctacagcattcatgtgaccaaggagtccacccaccccgtgaagcccctggcccagatcgccggaaacagatacgcctccggacctgtgggaaaggccctgagcgacgcatgtatgggcacaatcgcctccttcctgtctaagtaccaggacatcatcatcgaacaccagaaggtggtgaagggcaaccagaagagactggagagcctgcgggagctggccggcaaggaaaacctggaataccctagcgtgaccctgccacctcagcctcacaccaaggagggcgttgatgcctacaacgaagtgatcgcccgggtgcgaatgtgggtgaacctgaacctgtggcagaagctgaagctaagcagagatgatgccaagcctctgctgagactgaagggattcccttcctttcctctggtcgagagacaggccaacgaagtggactggtgggacatggtgtgtaacgtgaagaagctgatcaacgagaaaaaggaggatggcaaggtgttttggcagaatctggctggctacaagagacaggaagccctgagaccatacctgagcagcgaggaagatcggaagaagggaaagaaattcgctcggtaccagctgggcgacctgctgctgcacctggaaaagaagcacggcgaggactggggaaaggtgtacgacgaggcctgggagcggattgacaagaaagtggaaggcctgagcaagcacatcaagctggaagaggaacggagaagcgaggacgcccagagcaaggccgccctgaccgactggctgcgggctaaggccagcttcgtgatcgagggcctgaaggaggccgacaaggacgagttctgcagatgcgagctgaagctgcagaagtggtacggggacctgcggggaaagcccttcgccatcgaagccgagaacagcatcctggacatcagcggcttcagcaagcagtacaactgtgccttcatctggcagaaggacggcgtgaagaagctgaacctgtacctgatcatcaactacttcaagggcggcaagctgcggttcaagaagatcaaacctgaagccttcgaagccaacagattctacaccgtgatcaacaaaaagagcggcgagatcgtgcccatggaggtgaacttcaacttcgacgaccccaacctgatcatcctgcctctggcctttggcaagagacagggcagagaattcatctggaacgacctgctgtccctggaaaccggcagcctgaagctggccaacggaagagtgatcgagaagacactgtacaacagaagaacccggcaggatgagcctgccctgttcgtggccctgaccttcgagcggcgggaggtcctggactcctccaatatcaaaccaatgaacctgatcggcgtggcaagaggcgaaaacatccccgccgtgatcgccctgaccgaccccgagggctgcccactgagccggtttaaggatagcctgggaaacccaacccacatcctgagaatcggcgagagctataaggagaagcagcggaccatccaggccaagaaggaggtggagcagcggagagccggcggctacagccggaagtacgccagcaaagccaagaatctggcagacgatatggtgagaaacaccgctagagatctgctgtactacgccgtgacccaggatgccatgctgatcttcgccaacctgagccggggcttcggccggcagggcaagcggaccttcatggccgagagacagtacacacggatggaggactggctgaccgccaagctggcctacgagggcctgagcaagacctacctgtccaagacactggcccagtacacctccaagacatgcagcaactgtgggtttaccatcaccagcgccgactacgacagggtgctggagaagctgaagaagacagcaacaggctggatgaccacaattaacggcaaggagctgaaggtggagggccagattacctactacaacagatacaagagacagaacgtagtcaaggacctgtccgtcgagctggatagactgagcgaagaatctgtgaacaacgacatctcctcctggacaaagggcagaagcggagaagctctgagcctcctgaagaaaagattctcccatagacccgtgcaggagaagttcgtgtgcctgaactgcggcttcgagacacacgcagccgagcaagccgccctgaacatcgccagatcctggctgttcctgcggagccaggagtacaagaaataccagacaaacaagacaaccggcaacaccgataagagagccttcgtcgagacctggcagtccttttaccggaagaagcttaaggaggtgtggaaacctgccgtgcggtctggcggatctggcggaggctccacaagcgcccaggagagcctgaccctggaggacgtggccgtggacttcagcagggaggagtggaggctgctggcccccgcccagaaggacctgtacagggacgtgatgctggagaactacaggaacctggtgagcgtgggccaccaggccagcaagcccgacgtgctggccaggctggagaggggcgaggagccctgggccatcgaggaggaggtgaggagcggcaccagccccgagaccggcaaggtgaccagccccaagaaaaagagaaaagtctaagctgccttctgcggggcttgccttctggccatgcccttcttctctcccttgcacctgtacctcttggtctttgaataaagcctgagtaggaaggctagcaaaaaaaaaaaaaaaaaaaaaaaaaaaaaaaaaaaaaaaaaaaaaaaaaaaaaaaaaaaaaaaaaaaaaaaaaaaaaaaa

SEQ ID NO: 3188 - RNA, 5419 nt, synthetic construct
  source 1..5419: mol_type = other RNA
aggaaataagagagaaaagaagagtaagaagaaatataagagccaccatggcccctaagaagaagcgtaaagtgagccgggtgaacggcagcggcagcggcggcggcatgaaccacgaccaggagttcgacccccctaaggtgtaccctcccgtccccgccgagaagagaaagcccatccgggtcctgagcctgttcgatggcatcgccaccggtctgctggtgctgaaggacctgggcatccaggtggataggtacattgcctccgaggtgtgcgaggactccatcaccgtgggaatggtgcgtcatcagggcaagatcatgtacgtgggcgacgtgcggagcgtgacacagaagcatatccaggagtggggccctttcgacctggtgatcggcggcagcccttgcaatgacctgagcatcgtgaacccagcccggaagggcctgtacgagggaaccggcagactgttcttcgagttttacagactgctgcacgacgcccggcctaaggaaggcgacgaccggcccttcttttggctgttcgagaatgtggtggccatgggagtcagcgacaagcgggatattagccggttcctggagagcaaccccgtgatgatcgatgccaaggaagtgagcgccgcccaccgggccagatacttctggggcaatctgcctggcatgaacagacccctggccagcaccgtgaacgacaagctggagctgcaggagtgcctggagcacggccggatcgccaagttcagcaaggtgagaaccatcaccacccgaagcaacagcatcaaacaaggcaaggaccagcactttcctgtgttcatgaacgagaaggaggacatcctgtggtgtaccgagatggagagagtgttcgggttcccagtccactacacagatgtcagcaacatgtctagactggccagacagagactgctgggaagaagctggtccgtccctgtgatcagacacctgttcgcccctctgaaggagtacttcgcctgcgtgagcagcggcaacagcaacgccaacagccggggccccagcttctctagcggcctggtgccactgtccctgagagggagccacatgggccccatggagatctacaaaaccgtgagcgcctggaagcggcagcctgtgcgcgtgctgagcctgtttcggaatatcgataaagtcctgaaaagcctgggattcctggagagcggctctggctccggcggtggcaccctgaagtacgtggaggatgtgacaaacgtggtcagacgggatgtggagaagtggggccccttcgatctggtgtacggcagcacccaacccctgggcagctcttgtgaccggtgccctggctggtacatgtttcagttccaccggatcctgcagtacgccctgccgagacaggagtcccagcggccattcttttggattttcatggacaacttgctgctgaccgaggatgaccaggaaactaccactcggttcctgcagaccgaagccgtgaccctgcaggacgtgagaggccgggactaccagaacgccatgcgggtgtggtccaacatccctggactgaaaagcaagcacgcacctctgacccctaaagaagaggagtacctgcaggcccaggtgcggagcagaagcaagctggacgcccctaaggtggatctgctggtgaagaattgcctcctgcccctgagagagtacttcaagtatttcagccagaatagtctgcccctgggcggcccaagcagcggcgcccctcctcccagcggcggcagcccagccggctccccaacctctaccgaggagggcacctctgagtccgccacccccgagagcggccctggcacctccaccgagcccagcgagggcagcgcacccggcagccctgccggcagccccacctccacagaggagggaaccagcaccgagcccagcgaaggcagcgccccaggcaccagcaccgagcctagtgagggcggctctggcggcggcagcgcccaggagattaaacggatcaacaagatcagaagaagacttgtgaaagacagcaacaccaagaaggccggcaagacaggccccatgaaaaccctgctggttagagtgatgacacccgatctgagagagcggctggaaaacctgagaaagaagcctgaaaatatcccccagcccatcagcaatacatctagagccaacctgaataagctgctgaccgattacaccgaaatgaagaaggcgatcctgcatgtgtactgggaagagttccagaaggaccctgtgggcctgatgagccgggtggcccagcctgccagcaagaagatcgatcagaacaagctgaaacctgagatggacgagaagggcaacctgaccaccgccggctttgcctgctctcagtgtggccagcccctgttcgtgtacaagctggagcaggtgtctgagaagggcaaggcttacaccaactacttcggacggtgcaatgtggccgagcacgaaaagctgatcctgctggcccagctgaagcccgagaaggatagcgacgaagccgtgacatatagcctgggaaagtttgggcagagggccctggatttctacagcattcatgtgaccaaggagtccacccaccccgtgaagcccctggcccagatcgccggaaacagatacgcctccggacctgtgggaaaggccctgagcgacgcatgtatgggcacaatcgcctccttcctgtctaagtaccaggacatcatcatcgaacaccagaaggtggtgaagggcaaccagaagagactggagagcctgcgggagctggccggcaaggaaaacctggaataccctagcgtgaccctgccacctcagcctcacaccaaggagggcgttgatgcctacaacgaagtgatcgcccgggtgcgaatgtgggtgaacctgaacctgtggcagaagctgaagctaagcagagatgatgccaagcctctgctgagactgaagggattcccttcctttcctctggtcgagagacaggccaacgaagtggactggtgggacatggtgtgtaacgtgaagaagctgatcaacgagaaaaaggaggatggcaaggtgttttggcagaatctggctggctacaagagacaggaagccctgagaccatacctgagcagcgaggaagatcggaagaagggaaagaaattcgctcggtaccagctgggcgacctgctgctgcacctggaaaagaagcacggcgaggactggggaaaggtgtacgacgaggcctgggagcggattgacaagaaagtggaaggcctgagcaagcacatcaagctggaagaggaacggagaagcgaggacgcccagagcaaggccgccctgaccgactggctgcgggctaaggccagcttcgtgatcgagggcctgaaggaggccgacaaggacgagttctgcagatgcgagctgaagctgcagaagtggtacggggacctgcggggaaagcccttcgccatcgaagccgagaacagcatcctggacatcagcggcttcagcaagcagtacaactgtgccttcatctggcagaaggacggcgtgaagaagctgaacctgtacctgatcatcaactacttcaagggcggcaagctgcggttcaagaagatcaaacctgaagccttcgaagccaacagattctacaccgtgatcaacaaaaagagcggcgagatcgtgcccatggaggtgaacttcaacttcgacgaccccaacctgatcatcctgcctctggcctttggcaagagacagggcagagaattcatctggaacgacctgctgtccctggaaaccggcagcctgaagctggccaacggaagagtgatcgagaagacactgtacaacagaagaacccggcaggatgagcctgccctgttcgtggccctgaccttcgagcggcgggaggtcctggactcctccaatatcaaaccaatgaacctgatcggcgtggcaagaggcgaaaacatccccgccgtgatcgccctgaccgaccccgagggctgcccactgagccggtttaaggatagcctgggaaacccaacccacatcctgagaatcggcgagagctataaggagaagcagcggaccatccaggccaagaaggaggtggagcagcggagagccggcggctacagccggaagtacgccagcaaagccaagaatctggcagacgatatggtgagaaacaccgctagagatctgctgtactacgccgtgacccaggatgccatgctgatcttcgccaacctgagccggggcttcggccggcagggcaagcggaccttcatggccgagagacagtacacacggatggaggactggctgaccgccaagctggcctacgagggcctgagcaagacctacctgtccaagacactggcccagtacacctccaagacatgcagcaactgtgggtttaccatcaccagcgccgactacgacagggtgctggagaagctgaagaagacagcaacaggctggatgaccacaattaacggcaaggagctgaaggtggagggccagattacctactacaacagatacaagagacagaacgtagtcaaggacctgtccgtcgagctggatagactgagcgaagaatctgtgaacaacgacatctcctcctggacaaagggcagaagcggagaagctctgagcctcctgaagaaaagattctcccatagacccgtgcaggagaagttcgtgtgcctgaactgcggcttcgagacacacgcagccgagcaagccgccctgaacatcgccagatcctggctgttcctgcggagccaggagtacaagaaataccagacaaacaagacaaccggcaacaccgataagagagccttcgtcgagacctggcagtccttttaccggaagaagcttaaggaggtgtggaaacctgccgtgcggtctggcggatctggcggaggctccacaagccaggagagcgtgaccttcaaggacgtggccgtggacttcacccaggaggagtggcaccacatggaccccacccagaggatcctgtacagggacgtgatgctggagacctacagccacctggtgagcctgggctaccaggtgagcaagcccgaggtgatcttcaagctggagcagggcgaggagccctggatcagcgaggaggagatccagaggcccttctgccccgactgggagatcaggcccaccagccccaagaaaaagagaaaagtctaagctgccttctgcggggcttgccttctggccatgcccttcttctctcccttgcacctgtacctcttggtctttgaataaagcctgagtaggaaggctagcaaaaaaaaaaaaaaaaaaaaaaaaaaaaaaaaaaaaaaaaaaaaaaaaaaaaaaaaaaaaaaaaaaaaaaaaaaaaaaaa

SEQ ID NO: 3189 - RNA, 5419 nt, synthetic construct
  source 1..5419: mol_type = other RNA
aggaaataagagagaaaagaagagtaagaagaaatataagagccaccatggcccctaagaagaagcgtaaagtgagccgggtgaacggcagcggcagcggcggcggcatgaaccacgaccaggagttcgacccccctaaggtgtaccctcccgtccccgccgagaagagaaagcccatccgggtcctgagcctgttcgatggcatcgccaccggtctgctggtgctgaaggacctgggcatccaggtggataggtacattgcctccgaggtgtgcgaggactccatcaccgtgggaatggtgcgtcatcagggcaagatcatgtacgtgggcgacgtgcggagcgtgacacagaagcatatccaggagtggggccctttcgacctggtgatcggcggcagcccttgcaatgacctgagcatcgtgaacccagcccggaagggcctgtacgagggaaccggcagactgttcttcgagttttacagactgctgcacgacgcccggcctaaggaaggcgacgaccggcccttcttttggctgttcgagaatgtggtggccatgggagtcagcgacaagcgggatattagccggttcctggagagcaaccccgtgatgatcgatgccaaggaagtgagcgccgcccaccgggccagatacttctggggcaatctgcctggcatgaacagacccctggccagcaccgtgaacgacaagctggagctgcaggagtgcctggagcacggccggatcgccaagttcagcaaggtgagaaccatcaccacccgaagcaacagcatcaaacaaggcaaggaccagcactttcctgtgttcatgaacgagaaggaggacatcctgtggtgtaccgagatggagagagtgttcgggttcccagtccactacacagatgtcagcaacatgtctagactggccagacagagactgctgggaagaagctggtccgtccctgtgatcagacacctgttcgcccctctgaaggagtacttcgcctgcgtgagcagcggcaacagcaacgccaacagccggggccccagcttctctagcggcctggtgccactgtccctgagagggagccacatgggccccatggagatctacaaaaccgtgagcgcctggaagcggcagcctgtgcgcgtgctgagcctgtttcggaatatcgataaagtcctgaaaagcctgggattcctggagagcggctctggctccggcggtggcaccctgaagtacgtggaggatgtgacaaacgtggtcagacgggatgtggagaagtggggccccttcgatctggtgtacggcagcacccaacccctgggcagctcttgtgaccggtgccctggctggtacatgtttcagttccaccggatcctgcagtacgccctgccgagacaggagtcccagcggccattcttttggattttcatggacaacttgctgctgaccgaggatgaccaggaaactaccactcggttcctgcagaccgaagccgtgaccctgcaggacgtgagaggccgggactaccagaacgccatgcgggtgtggtccaacatccctggactgaaaagcaagcacgcacctctgacccctaaagaagaggagtacctgcaggcccaggtgcggagcagaagcaagctggacgcccctaaggtggatctgctggtgaagaattgcctcctgcccctgagagagtacttcaagtatttcagccagaatagtctgcccctgggcggcccaagcagcggcgcccctcctcccagcggcggcagcccagccggctccccaacctctaccgaggagggcacctctgagtccgccacccccgagagcggccctggcacctccaccgagcccagcgagggcagcgcacccggcagccctgccggcagccccacctccacagaggagggaaccagcaccgagcccagcgaaggcagcgccccaggcaccagcaccgagcctagtgagggcggctctggcggcggcagcgcccaggagattaaacggatcaacaagatcagaagaagacttgtgaaagacagcaacaccaagaaggccggcaagacaggccccatgaaaaccctgctggttagagtgatgacacccgatctgagagagcggctggaaaacctgagaaagaagcctgaaaatatcccccagcccatcagcaatacatctagagccaacctgaataagctgctgaccgattacaccgaaatgaagaaggcgatcctgcatgtgtactgggaagagttccagaaggaccctgtgggcctgatgagccgggtggcccagcctgccagcaagaagatcgatcagaacaagctgaaacctgagatggacgagaagggcaacctgaccaccgccggctttgcctgctctcagtgtggccagcccctgttcgtgtacaagctggagcaggtgtctgagaagggcaaggcttacaccaactacttcggacggtgcaatgtggccgagcacgaaaagctgatcctgctggcccagctgaagcccgagaaggatagcgacgaagccgtgacatatagcctgggaaagtttgggcagagggccctggatttctacagcattcatgtgaccaaggagtccacccaccccgtgaagcccctggcccagatcgccggaaacagatacgcctccggacctgtgggaaaggccctgagcgacgcatgtatgggcacaatcgcctccttcctgtctaagtaccaggacatcatcatcgaacaccagaaggtggtgaagggcaaccagaagagactggagagcctgcgggagctggccggcaaggaaaacctggaataccctagcgtgaccctgccacctcagcctcacaccaaggagggcgttgatgcctacaacgaagtgatcgcccgggtgcgaatgtgggtgaacctgaacctgtggcagaagctgaagctaagcagagatgatgccaagcctctgctgagactgaagggattcccttcctttcctctggtcgagagacaggccaacgaagtggactggtgggacatggtgtgtaacgtgaagaagctgatcaacgagaaaaaggaggatggcaaggtgttttggcagaatctggctggctacaagagacaggaagccctgagaccatacctgagcagcgaggaagatcggaagaagggaaagaaattcgctcggtaccagctgggcgacctgctgctgcacctggaaaagaagcacggcgaggactggggaaaggtgtacgacgaggcctgggagcggattgacaagaaagtggaaggcctgagcaagcacatcaagctggaagaggaacggagaagcgaggacgcccagagcaaggccgccctgaccgactggctgcgggctaaggccagcttcgtgatcgagggcctgaaggaggccgacaaggacgagttctgcagatgcgagctgaagctgcagaagtggtacggggacctgcggggaaagcccttcgccatcgaagccgagaacagcatcctggacatcagcggcttcagcaagcagtacaactgtgccttcatctggcagaaggacggcgtgaagaagctgaacctgtacctgatcatcaactacttcaagggcggcaagctgcggttcaagaagatcaaacctgaagccttcgaagccaacagattctacaccgtgatcaacaaaaagagcggcgagatcgtgcccatggaggtgaacttcaacttcgacgaccccaacctgatcatcctgcctctggcctttggcaagagacagggcagagaattcatctggaacgacctgctgtccctggaaaccggcagcctgaagctggccaacggaagagtgatcgagaagacactgtacaacagaagaacccggcaggatgagcctgccctgttcgtggccctgaccttcgagcggcgggaggtcctggactcctccaatatcaaaccaatgaacctgatcggcgtggcaagaggcgaaaacatccccgccgtgatcgccctgaccgaccccgagggctgcccactgagccggtttaaggatagcctgggaaacccaacccacatcctgagaatcggcgagagctataaggagaagcagcggaccatccaggccaagaaggaggtggagcagcggagagccggcggctacagccggaagtacgccagcaaagccaagaatctggcagacgatatggtgagaaacaccgctagagatctgctgtactacgccgtgacccaggatgccatgctgatcttcgccaacctgagccggggcttcggccggcagggcaagcggaccttcatggccgagagacagtacacacggatggaggactggctgaccgccaagctggcctacgagggcctgagcaagacctacctgtccaagacactggcccagtacacctccaagacatgcagcaactgtgggtttaccatcaccagcgccgactacgacagggtgctggagaagctgaagaagacagcaacaggctggatgaccacaattaacggcaaggagctgaaggtggagggccagattacctactacaacagatacaagagacagaacgtagtcaaggacctgtccgtcgagctggatagactgagcgaagaatctgtgaacaacgacatctcctcctggacaaagggcagaagcggagaagctctgagcctcctgaagaaaagattctcccatagacccgtgcaggagaagttcgtgtgcctgaactgcggcttcgagacacacgcagccgagcaagccgccctgaacatcgccagatcctggctgttcctgcggagccaggagtacaagaaataccagacaaacaagacaaccggcaacaccgataagagagccttcgtcgagacctggcagtccttttaccggaagaagcttaaggaggtgtggaaacctgccgtgcggtctggcggatctggcggaggctccacaagcgccagggacctggtgatgttcagggacgtggccgtggacttcagccaggaggagtgggagtgcctgaacagctaccagaggaacctgtacagggacgtgatcctggagaactacagcaacctggtgagcctgggctgcagcatcagcaagcccgacgtgatcaccctgctggagcagggcaaggagccctggctggtggtgagggacgagaagaggaggtggagcctgggccccaccttcaagaccagccccaagaaaaagagaaaagtctaagctgccttctgcggggcttgccttctggccatgcccttcttctctcccttgcacctgtacctcttggtctttgaataaagcctgagtaggaaggctagcaaaaaaaaaaaaaaaaaaaaaaaaaaaaaaaaaaaaaaaaaaaaaaaaaaaaaaaaaaaaaaaaaaaaaaaaaaaaaaaa

SEQ ID NO: 3190 - RNA, 5419 nt, synthetic construct
  source 1..5419: mol_type = other RNA
aggaaataagagagaaaagaagagtaagaagaaatataagagccaccatggcccctaagaagaagcgtaaagtgagccgggtgaacggcagcggcagcggcggcggcatgaaccacgaccaggagttcgacccccctaaggtgtaccctcccgtccccgccgagaagagaaagcccatccgggtcctgagcctgttcgatggcatcgccaccggtctgctggtgctgaaggacctgggcatccaggtggataggtacattgcctccgaggtgtgcgaggactccatcaccgtgggaatggtgcgtcatcagggcaagatcatgtacgtgggcgacgtgcggagcgtgacacagaagcatatccaggagtggggccctttcgacctggtgatcggcggcagcccttgcaatgacctgagcatcgtgaacccagcccggaagggcctgtacgagggaaccggcagactgttcttcgagttttacagactgctgcacgacgcccggcctaaggaaggcgacgaccggcccttcttttggctgttcgagaatgtggtggccatgggagtcagcgacaagcgggatattagccggttcctggagagcaaccccgtgatgatcgatgccaaggaagtgagcgccgcccaccgggccagatacttctggggcaatctgcctggcatgaacagacccctggccagcaccgtgaacgacaagctggagctgcaggagtgcctggagcacggccggatcgccaagttcagcaaggtgagaaccatcaccacccgaagcaacagcatcaaacaaggcaaggaccagcactttcctgtgttcatgaacgagaaggaggacatcctgtggtgtaccgagatggagagagtgttcgggttcccagtccactacacagatgtcagcaacatgtctagactggccagacagagactgctgggaagaagctggtccgtccctgtgatcagacacctgttcgcccctctgaaggagtacttcgcctgcgtgagcagcggcaacagcaacgccaacagccggggccccagcttctctagcggcctggtgccactgtccctgagagggagccacatgggccccatggagatctacaaaaccgtgagcgcctggaagcggcagcctgtgcgcgtgctgagcctgtttcggaatatcgataaagtcctgaaaagcctgggattcctggagagcggctctggctccggcggtggcaccctgaagtacgtggaggatgtgacaaacgtggtcagacgggatgtggagaagtggggccccttcgatctggtgtacggcagcacccaacccctgggcagctcttgtgaccggtgccctggctggtacatgtttcagttccaccggatcctgcagtacgccctgccgagacaggagtcccagcggccattcttttggattttcatggacaacttgctgctgaccgaggatgaccaggaaactaccactcggttcctgcagaccgaagccgtgaccctgcaggacgtgagaggccgggactaccagaacgccatgcgggtgtggtccaacatccctggactgaaaagcaagcacgcacctctgacccctaaagaagaggagtacctgcaggcccaggtgcggagcagaagcaagctggacgcccctaaggtggatctgctggtgaagaattgcctcctgcccctgagagagtacttcaagtatttcagccagaatagtctgcccctgggcggcccaagcagcggcgcccctcctcccagcggcggcagcccagccggctccccaacctctaccgaggagggcacctctgagtccgccacccccgagagcggccctggcacctccaccgagcccagcgagggcagcgcacccggcagccctgccggcagccccacctccacagaggagggaaccagcaccgagcccagcgaaggcagcgccccaggcaccagcaccgagcctagtgagggcggctctggcggcggcagcgcccaggagattaaacggatcaacaagatcagaagaagacttgtgaaagacagcaacaccaagaaggccggcaagacaggccccatgaaaaccctgctggttagagtgatgacacccgatctgagagagcggctggaaaacctgagaaagaagcctgaaaatatcccccagcccatcagcaatacatctagagccaacctgaataagctgctgaccgattacaccgaaatgaagaaggcgatcctgcatgtgtactgggaagagttccagaaggaccctgtgggcctgatgagccgggtggcccagcctgccagcaagaagatcgatcagaacaagctgaaacctgagatggacgagaagggcaacctgaccaccgccggctttgcctgctctcagtgtggccagcccctgttcgtgtacaagctggagcaggtgtctgagaagggcaaggcttacaccaactacttcggacggtgcaatgtggccgagcacgaaaagctgatcctgctggcccagctgaagcccgagaaggatagcgacgaagccgtgacatatagcctgggaaagtttgggcagagggccctggatttctacagcattcatgtgaccaaggagtccacccaccccgtgaagcccctggcccagatcgccggaaacagatacgcctccggacctgtgggaaaggccctgagcgacgcatgtatgggcacaatcgcctccttcctgtctaagtaccaggacatcatcatcgaacaccagaaggtggtgaagggcaaccagaagagactggagagcctgcgggagctggccggcaaggaaaacctggaataccctagcgtgaccctgccacctcagcctcacaccaaggagggcgttgatgcctacaacgaagtgatcgcccgggtgcgaatgtgggtgaacctgaacctgtggcagaagctgaagctaagcagagatgatgccaagcctctgctgagactgaagggattcccttcctttcctctggtcgagagacaggccaacgaagtggactggtgggacatggtgtgtaacgtgaagaagctgatcaacgagaaaaaggaggatggcaaggtgttttggcagaatctggctggctacaagagacaggaagccctgagaccatacctgagcagcgaggaagatcggaagaagggaaagaaattcgctcggtaccagctgggcgacctgctgctgcacctggaaaagaagcacggcgaggactggggaaaggtgtacgacgaggcctgggagcggattgacaagaaagtggaaggcctgagcaagcacatcaagctggaagaggaacggagaagcgaggacgcccagagcaaggccgccctgaccgactggctgcgggctaaggccagcttcgtgatcgagggcctgaaggaggccgacaaggacgagttctgcagatgcgagctgaagctgcagaagtggtacggggacctgcggggaaagcccttcgccatcgaagccgagaacagcatcctggacatcagcggcttcagcaagcagtacaactgtgccttcatctggcagaaggacggcgtgaagaagctgaacctgtacctgatcatcaactacttcaagggcggcaagctgcggttcaagaagatcaaacctgaagccttcgaagccaacagattctacaccgtgatcaacaaaaagagcggcgagatcgtgcccatggaggtgaacttcaacttcgacgaccccaacctgatcatcctgcctctggcctttggcaagagacagggcagagaattcatctggaacgacctgctgtccctggaaaccggcagcctgaagctggccaacggaagagtgatcgagaagacactgtacaacagaagaacccggcaggatgagcctgccctgttcgtggccctgaccttcgagcggcgggaggtcctggactcctccaatatcaaaccaatgaacctgatcggcgtggcaagaggcgaaaacatccccgccgtgatcgccctgaccgaccccgagggctgcccactgagccggtttaaggatagcctgggaaacccaacccacatcctgagaatcggcgagagctataaggagaagcagcggaccatccaggccaagaaggaggtggagcagcggagagccggcggctacagccggaagtacgccagcaaagccaagaatctggcagacgatatggtgagaaacaccgctagagatctgctgtactacgccgtgacccaggatgccatgctgatcttcgccaacctgagccggggcttcggccggcagggcaagcggaccttcatggccgagagacagtacacacggatggaggactggctgaccgccaagctggcctacgagggcctgagcaagacctacctgtccaagacactggcccagtacacctccaagacatgcagcaactgtgggtttaccatcaccagcgccgactacgacagggtgctggagaagctgaagaagacagcaacaggctggatgaccacaattaacggcaaggagctgaaggtggagggccagattacctactacaacagatacaagagacagaacgtagtcaaggacctgtccgtcgagctggatagactgagcgaagaatctgtgaacaacgacatctcctcctggacaaagggcagaagcggagaagctctgagcctcctgaagaaaagattctcccatagacccgtgcaggagaagttcgtgtgcctgaactgcggcttcgagacacacgcagccgagcaagccgccctgaacatcgccagatcctggctgttcctgcggagccaggagtacaagaaataccagacaaacaagacaaccggcaacaccgataagagagccttcgtcgagacctggcagtccttttaccggaagaagcttaaggaggtgtggaaacctgccgtgcggtctggcggatctggcggaggctccacaagcagccagggcaggctgaccttccaggacgtggccatcgacttcacccaggaggagtgggagtgcctggacctgggccagagggagctgtacagggacgtgatgctggagaactacggcaacctggccagcctgggcctggtgatcagcaagcccgacctggtgaccttcctggagcagatgaaggacccctgggacaccaggaggatggagacccccgccgtgcaccccgccgtgagcagccacaccagccccaagaaaaagagaaaagtctaagctgccttctgcggggcttgccttctggccatgcccttcttctctcccttgcacctgtacctcttggtctttgaataaagcctgagtaggaaggctagcaaaaaaaaaaaaaaaaaaaaaaaaaaaaaaaaaaaaaaaaaaaaaaaaaaaaaaaaaaaaaaaaaaaaaaaaaaaaaaaa

SEQ ID NO: 3191 - RNA, 5419 nt, synthetic construct
  source 1..5419: mol_type = other RNA
aggaaataagagagaaaagaagagtaagaagaaatataagagccaccatggcccctaagaagaagcgtaaagtgagccgggtgaacggcagcggcagcggcggcggcatgaaccacgaccaggagttcgacccccctaaggtgtaccctcccgtccccgccgagaagagaaagcccatccgggtcctgagcctgttcgatggcatcgccaccggtctgctggtgctgaaggacctgggcatccaggtggataggtacattgcctccgaggtgtgcgaggactccatcaccgtgggaatggtgcgtcatcagggcaagatcatgtacgtgggcgacgtgcggagcgtgacacagaagcatatccaggagtggggccctttcgacctggtgatcggcggcagcccttgcaatgacctgagcatcgtgaacccagcccggaagggcctgtacgagggaaccggcagactgttcttcgagttttacagactgctgcacgacgcccggcctaaggaaggcgacgaccggcccttcttttggctgttcgagaatgtggtggccatgggagtcagcgacaagcgggatattagccggttcctggagagcaaccccgtgatgatcgatgccaaggaagtgagcgccgcccaccgggccagatacttctggggcaatctgcctggcatgaacagacccctggccagcaccgtgaacgacaagctggagctgcaggagtgcctggagcacggccggatcgccaagttcagcaaggtgagaaccatcaccacccgaagcaacagcatcaaacaaggcaaggaccagcactttcctgtgttcatgaacgagaaggaggacatcctgtggtgtaccgagatggagagagtgttcgggttcccagtccactacacagatgtcagcaacatgtctagactggccagacagagactgctgggaagaagctggtccgtccctgtgatcagacacctgttcgcccctctgaaggagtacttcgcctgcgtgagcagcggcaacagcaacgccaacagccggggccccagcttctctagcggcctggtgccactgtccctgagagggagccacatgggccccatggagatctacaaaaccgtgagcgcctggaagcggcagcctgtgcgcgtgctgagcctgtttcggaatatcgataaagtcctgaaaagcctgggattcctggagagcggctctggctccggcggtggcaccctgaagtacgtggaggatgtgacaaacgtggtcagacgggatgtggagaagtggggccccttcgatctggtgtacggcagcacccaacccctgggcagctcttgtgaccggtgccctggctggtacatgtttcagttccaccggatcctgcagtacgccctgccgagacaggagtcccagcggccattcttttggattttcatggacaacttgctgctgaccgaggatgaccaggaaactaccactcggttcctgcagaccgaagccgtgaccctgcaggacgtgagaggccgggactaccagaacgccatgcgggtgtggtccaacatccctggactgaaaagcaagcacgcacctctgacccctaaagaagaggagtacctgcaggcccaggtgcggagcagaagcaagctggacgcccctaaggtggatctgctggtgaagaattgcctcctgcccctgagagagtacttcaagtatttcagccagaatagtctgcccctgggcggcccaagcagcggcgcccctcctcccagcggcggcagcccagccggctccccaacctctaccgaggagggcacctctgagtccgccacccccgagagcggccctggcacctccaccgagcccagcgagggcagcgcacccggcagccctgccggcagccccacctccacagaggagggaaccagcaccgagcccagcgaaggcagcgccccaggcaccagcaccgagcctagtgagggcggctctggcggcggcagcgcccaggagattaaacggatcaacaagatcagaagaagacttgtgaaagacagcaacaccaagaaggccggcaagacaggccccatgaaaaccctgctggttagagtgatgacacccgatctgagagagcggctggaaaacctgagaaagaagcctgaaaatatcccccagcccatcagcaatacatctagagccaacctgaataagctgctgaccgattacaccgaaatgaagaaggcgatcctgcatgtgtactgggaagagttccagaaggaccctgtgggcctgatgagccgggtggcccagcctgccagcaagaagatcgatcagaacaagctgaaacctgagatggacgagaagggcaacctgaccaccgccggctttgcctgctctcagtgtggccagcccctgttcgtgtacaagctggagcaggtgtctgagaagggcaaggcttacaccaactacttcggacggtgcaatgtggccgagcacgaaaagctgatcctgctggcccagctgaagcccgagaaggatagcgacgaagccgtgacatatagcctgggaaagtttgggcagagggccctggatttctacagcattcatgtgaccaaggagtccacccaccccgtgaagcccctggcccagatcgccggaaacagatacgcctccggacctgtgggaaaggccctgagcgacgcatgtatgggcacaatcgcctccttcctgtctaagtaccaggacatcatcatcgaacaccagaaggtggtgaagggcaaccagaagagactggagagcctgcgggagctggccggcaaggaaaacctggaataccctagcgtgaccctgccacctcagcctcacaccaaggagggcgttgatgcctacaacgaagtgatcgcccgggtgcgaatgtgggtgaacctgaacctgtggcagaagctgaagctaagcagagatgatgccaagcctctgctgagactgaagggattcccttcctttcctctggtcgagagacaggccaacgaagtggactggtgggacatggtgtgtaacgtgaagaagctgatcaacgagaaaaaggaggatggcaaggtgttttggcagaatctggctggctacaagagacaggaagccctgagaccatacctgagcagcgaggaagatcggaagaagggaaagaaattcgctcggtaccagctgggcgacctgctgctgcacctggaaaagaagcacggcgaggactggggaaaggtgtacgacgaggcctgggagcggattgacaagaaagtggaaggcctgagcaagcacatcaagctggaagaggaacggagaagcgaggacgcccagagcaaggccgccctgaccgactggctgcgggctaaggccagcttcgtgatcgagggcctgaaggaggccgacaaggacgagttctgcagatgcgagctgaagctgcagaagtggtacggggacctgcggggaaagcccttcgccatcgaagccgagaacagcatcctggacatcagcggcttcagcaagcagtacaactgtgccttcatctggcagaaggacggcgtgaagaagctgaacctgtacctgatcatcaactacttcaagggcggcaagctgcggttcaagaagatcaaacctgaagccttcgaagccaacagattctacaccgtgatcaacaaaaagagcggcgagatcgtgcccatggaggtgaacttcaacttcgacgaccccaacctgatcatcctgcctctggcctttggcaagagacagggcagagaattcatctggaacgacctgctgtccctggaaaccggcagcctgaagctggccaacggaagagtgatcgagaagacactgtacaacagaagaacccggcaggatgagcctgccctgttcgtggccctgaccttcgagcggcgggaggtcctggactcctccaatatcaaaccaatgaacctgatcggcgtggcaagaggcgaaaacatccccgccgtgatcgccctgaccgaccccgagggctgcccactgagccggtttaaggatagcctgggaaacccaacccacatcctgagaatcggcgagagctataaggagaagcagcggaccatccaggccaagaaggaggtggagcagcggagagccggcggctacagccggaagtacgccagcaaagccaagaatctggcagacgatatggtgagaaacaccgctagagatctgctgtactacgccgtgacccaggatgccatgctgatcttcgccaacctgagccggggcttcggccggcagggcaagcggaccttcatggccgagagacagtacacacggatggaggactggctgaccgccaagctggcctacgagggcctgagcaagacctacctgtccaagacactggcccagtacacctccaagacatgcagcaactgtgggtttaccatcaccagcgccgactacgacagggtgctggagaagctgaagaagacagcaacaggctggatgaccacaattaacggcaaggagctgaaggtggagggccagattacctactacaacagatacaagagacagaacgtagtcaaggacctgtccgtcgagctggatagactgagcgaagaatctgtgaacaacgacatctcctcctggacaaagggcagaagcggagaagctctgagcctcctgaagaaaagattctcccatagacccgtgcaggagaagttcgtgtgcctgaactgcggcttcgagacacacgcagccgagcaagccgccctgaacatcgccagatcctggctgttcctgcggagccaggagtacaagaaataccagacaaacaagacaaccggcaacaccgataagagagccttcgtcgagacctggcagtccttttaccggaagaagcttaaggaggtgtggaaacctgccgtgcggtctggcggatctggcggaggctccacaagcatgcaggtgaagttcgaggacgtggccgtgagcttcagccaggaggagtgggagtacctggacgagggccagaaggagctgtacagggaggtgatgaaggagaactacgagaccctgctgagcctgggcctgaagtgcctgcagaagatccacgagagcgacaggcccttcacctaccccgcctgcggcaagagcttcaaccaccagagcaacctgaggaagcacaagaggaaccacaccggcaccagccccaagaaaaagagaaaagtctaagctgccttctgcggggcttgccttctggccatgcccttcttctctcccttgcacctgtacctcttggtctttgaataaagcctgagtaggaaggctagcaaaaaaaaaaaaaaaaaaaaaaaaaaaaaaaaaaaaaaaaaaaaaaaaaaaaaaaaaaaaaaaaaaaaaaaaaaaaaaaa

SEQ ID NO: 3192 - RNA, 5419 nt, synthetic construct
  source 1..5419: mol_type = other RNA
aggaaataagagagaaaagaagagtaagaagaaatataagagccaccatggcccctaagaagaagcgtaaagtgagccgggtgaacggcagcggcagcggcggcggcatgaaccacgaccaggagttcgacccccctaaggtgtaccctcccgtccccgccgagaagagaaagcccatccgggtcctgagcctgttcgatggcatcgccaccggtctgctggtgctgaaggacctgggcatccaggtggataggtacattgcctccgaggtgtgcgaggactccatcaccgtgggaatggtgcgtcatcagggcaagatcatgtacgtgggcgacgtgcggagcgtgacacagaagcatatccaggagtggggccctttcgacctggtgatcggcggcagcccttgcaatgacctgagcatcgtgaacccagcccggaagggcctgtacgagggaaccggcagactgttcttcgagttttacagactgctgcacgacgcccggcctaaggaaggcgacgaccggcccttcttttggctgttcgagaatgtggtggccatgggagtcagcgacaagcgggatattagccggttcctggagagcaaccccgtgatgatcgatgccaaggaagtgagcgccgcccaccgggccagatacttctggggcaatctgcctggcatgaacagacccctggccagcaccgtgaacgacaagctggagctgcaggagtgcctggagcacggccggatcgccaagttcagcaaggtgagaaccatcaccacccgaagcaacagcatcaaacaaggcaaggaccagcactttcctgtgttcatgaacgagaaggaggacatcctgtggtgtaccgagatggagagagtgttcgggttcccagtccactacacagatgtcagcaacatgtctagactggccagacagagactgctgggaagaagctggtccgtccctgtgatcagacacctgttcgcccctctgaaggagtacttcgcctgcgtgagcagcggcaacagcaacgccaacagccggggccccagcttctctagcggcctggtgccactgtccctgagagggagccacatgggccccatggagatctacaaaaccgtgagcgcctggaagcggcagcctgtgcgcgtgctgagcctgtttcggaatatcgataaagtcctgaaaagcctgggattcctggagagcggctctggctccggcggtggcaccctgaagtacgtggaggatgtgacaaacgtggtcagacgggatgtggagaagtggggccccttcgatctggtgtacggcagcacccaacccctgggcagctcttgtgaccggtgccctggctggtacatgtttcagttccaccggatcctgcagtacgccctgccgagacaggagtcccagcggccattcttttggattttcatggacaacttgctgctgaccgaggatgaccaggaaactaccactcggttcctgcagaccgaagccgtgaccctgcaggacgtgagaggccgggactaccagaacgccatgcgggtgtggtccaacatccctggactgaaaagcaagcacgcacctctgacccctaaagaagaggagtacctgcaggcccaggtgcggagcagaagcaagctggacgcccctaaggtggatctgctggtgaagaattgcctcctgcccctgagagagtacttcaagtatttcagccagaatagtctgcccctgggcggcccaagcagcggcgcccctcctcccagcggcggcagcccagccggctccccaacctctaccgaggagggcacctctgagtccgccacccccgagagcggccctggcacctccaccgagcccagcgagggcagcgcacccggcagccctgccggcagccccacctccacagaggagggaaccagcaccgagcccagcgaaggcagcgccccaggcaccagcaccgagcctagtgagggcggctctggcggcggcagcgcccaggagattaaacggatcaacaagatcagaagaagacttgtgaaagacagcaacaccaagaaggccggcaagacaggccccatgaaaaccctgctggttagagtgatgacacccgatctgagagagcggctggaaaacctgagaaagaagcctgaaaatatcccccagcccatcagcaatacatctagagccaacctgaataagctgctgaccgattacaccgaaatgaagaaggcgatcctgcatgtgtactgggaagagttccagaaggaccctgtgggcctgatgagccgggtggcccagcctgccagcaagaagatcgatcagaacaagctgaaacctgagatggacgagaagggcaacctgaccaccgccggctttgcctgctctcagtgtggccagcccctgttcgtgtacaagctggagcaggtgtctgagaagggcaaggcttacaccaactacttcggacggtgcaatgtggccgagcacgaaaagctgatcctgctggcccagctgaagcccgagaaggatagcgacgaagccgtgacatatagcctgggaaagtttgggcagagggccctggatttctacagcattcatgtgaccaaggagtccacccaccccgtgaagcccctggcccagatcgccggaaacagatacgcctccggacctgtgggaaaggccctgagcgacgcatgtatgggcacaatcgcctccttcctgtctaagtaccaggacatcatcatcgaacaccagaaggtggtgaagggcaaccagaagagactggagagcctgcgggagctggccggcaaggaaaacctggaataccctagcgtgaccctgccacctcagcctcacaccaaggagggcgttgatgcctacaacgaagtgatcgcccgggtgcgaatgtgggtgaacctgaacctgtggcagaagctgaagctaagcagagatgatgccaagcctctgctgagactgaagggattcccttcctttcctctggtcgagagacaggccaacgaagtggactggtgggacatggtgtgtaacgtgaagaagctgatcaacgagaaaaaggaggatggcaaggtgttttggcagaatctggctggctacaagagacaggaagccctgagaccatacctgagcagcgaggaagatcggaagaagggaaagaaattcgctcggtaccagctgggcgacctgctgctgcacctggaaaagaagcacggcgaggactggggaaaggtgtacgacgaggcctgggagcggattgacaagaaagtggaaggcctgagcaagcacatcaagctggaagaggaacggagaagcgaggacgcccagagcaaggccgccctgaccgactggctgcgggctaaggccagcttcgtgatcgagggcctgaaggaggccgacaaggacgagttctgcagatgcgagctgaagctgcagaagtggtacggggacctgcggggaaagcccttcgccatcgaagccgagaacagcatcctggacatcagcggcttcagcaagcagtacaactgtgccttcatctggcagaaggacggcgtgaagaagctgaacctgtacctgatcatcaactacttcaagggcggcaagctgcggttcaagaagatcaaacctgaagccttcgaagccaacagattctacaccgtgatcaacaaaaagagcggcgagatcgtgcccatggaggtgaacttcaacttcgacgaccccaacctgatcatcctgcctctggcctttggcaagagacagggcagagaattcatctggaacgacctgctgtccctggaaaccggcagcctgaagctggccaacggaagagtgatcgagaagacactgtacaacagaagaacccggcaggatgagcctgccctgttcgtggccctgaccttcgagcggcgggaggtcctggactcctccaatatcaaaccaatgaacctgatcggcgtggcaagaggcgaaaacatccccgccgtgatcgccctgaccgaccccgagggctgcccactgagccggtttaaggatagcctgggaaacccaacccacatcctgagaatcggcgagagctataaggagaagcagcggaccatccaggccaagaaggaggtggagcagcggagagccggcggctacagccggaagtacgccagcaaagccaagaatctggcagacgatatggtgagaaacaccgctagagatctgctgtactacgccgtgacccaggatgccatgctgatcttcgccaacctgagccggggcttcggccggcagggcaagcggaccttcatggccgagagacagtacacacggatggaggactggctgaccgccaagctggcctacgagggcctgagcaagacctacctgtccaagacactggcccagtacacctccaagacatgcagcaactgtgggtttaccatcaccagcgccgactacgacagggtgctggagaagctgaagaagacagcaacaggctggatgaccacaattaacggcaaggagctgaaggtggagggccagattacctactacaacagatacaagagacagaacgtagtcaaggacctgtccgtcgagctggatagactgagcgaagaatctgtgaacaacgacatctcctcctggacaaagggcagaagcggagaagctctgagcctcctgaagaaaagattctcccatagacccgtgcaggagaagttcgtgtgcctgaactgcggcttcgagacacacgcagccgagcaagccgccctgaacatcgccagatcctggctgttcctgcggagccaggagtacaagaaataccagacaaacaagacaaccggcaacaccgataagagagccttcgtcgagacctggcagtccttttaccggaagaagcttaaggaggtgtggaaacctgccgtgcggtctggcggatctggcggaggctccacaagcaggaagaggggcagcctgaccctggaggacgtggccgtggacttcacctgggaggagtggcagctgctggcccccgcccagaaggccctgtacagggacgtgatgctggagaactacggcaacctggtgttcgtgggctaccaggccagcaagcccgccgccctgagcaggctggagaggggcgagccctggcccgtggaggacgaggtgcacagccagctgtgccccgagatgaggaaggacaccagccccaagaaaaagagaaaagtctaagctgccttctgcggggcttgccttctggccatgcccttcttctctcccttgcacctgtacctcttggtctttgaataaagcctgagtaggaaggctagcaaaaaaaaaaaaaaaaaaaaaaaaaaaaaaaaaaaaaaaaaaaaaaaaaaaaaaaaaaaaaaaaaaaaaaaaaaaaaaaa

SEQ ID NO: 3193 - RNA, 5419 nt, synthetic construct
  source 1..5419: mol_type = other RNA
aggaaataagagagaaaagaagagtaagaagaaatataagagccaccatggcccctaagaagaagcgtaaagtgagccgggtgaacggcagcggcagcggcggcggcatgaaccacgaccaggagttcgacccccctaaggtgtaccctcccgtccccgccgagaagagaaagcccatccgggtcctgagcctgttcgatggcatcgccaccggtctgctggtgctgaaggacctgggcatccaggtggataggtacattgcctccgaggtgtgcgaggactccatcaccgtgggaatggtgcgtcatcagggcaagatcatgtacgtgggcgacgtgcggagcgtgacacagaagcatatccaggagtggggccctttcgacctggtgatcggcggcagcccttgcaatgacctgagcatcgtgaacccagcccggaagggcctgtacgagggaaccggcagactgttcttcgagttttacagactgctgcacgacgcccggcctaaggaaggcgacgaccggcccttcttttggctgttcgagaatgtggtggccatgggagtcagcgacaagcgggatattagccggttcctggagagcaaccccgtgatgatcgatgccaaggaagtgagcgccgcccaccgggccagatacttctggggcaatctgcctggcatgaacagacccctggccagcaccgtgaacgacaagctggagctgcaggagtgcctggagcacggccggatcgccaagttcagcaaggtgagaaccatcaccacccgaagcaacagcatcaaacaaggcaaggaccagcactttcctgtgttcatgaacgagaaggaggacatcctgtggtgtaccgagatggagagagtgttcgggttcccagtccactacacagatgtcagcaacatgtctagactggccagacagagactgctgggaagaagctggtccgtccctgtgatcagacacctgttcgcccctctgaaggagtacttcgcctgcgtgagcagcggcaacagcaacgccaacagccggggccccagcttctctagcggcctggtgccactgtccctgagagggagccacatgggccccatggagatctacaaaaccgtgagcgcctggaagcggcagcctgtgcgcgtgctgagcctgtttcggaatatcgataaagtcctgaaaagcctgggattcctggagagcggctctggctccggcggtggcaccctgaagtacgtggaggatgtgacaaacgtggtcagacgggatgtggagaagtggggccccttcgatctggtgtacggcagcacccaacccctgggcagctcttgtgaccggtgccctggctggtacatgtttcagttccaccggatcctgcagtacgccctgccgagacaggagtcccagcggccattcttttggattttcatggacaacttgctgctgaccgaggatgaccaggaaactaccactcggttcctgcagaccgaagccgtgaccctgcaggacgtgagaggccgggactaccagaacgccatgcgggtgtggtccaacatccctggactgaaaagcaagcacgcacctctgacccctaaagaagaggagtacctgcaggcccaggtgcggagcagaagcaagctggacgcccctaaggtggatctgctggtgaagaattgcctcctgcccctgagagagtacttcaagtatttcagccagaatagtctgcccctgggcggcccaagcagcggcgcccctcctcccagcggcggcagcccagccggctccccaacctctaccgaggagggcacctctgagtccgccacccccgagagcggccctggcacctccaccgagcccagcgagggcagcgcacccggcagccctgccggcagccccacctccacagaggagggaaccagcaccgagcccagcgaaggcagcgccccaggcaccagcaccgagcctagtgagggcggctctggcggcggcagcgcccaggagattaaacggatcaacaagatcagaagaagacttgtgaaagacagcaacaccaagaaggccggcaagacaggccccatgaaaaccctgctggttagagtgatgacacccgatctgagagagcggctggaaaacctgagaaagaagcctgaaaatatcccccagcccatcagcaatacatctagagccaacctgaataagctgctgaccgattacaccgaaatgaagaaggcgatcctgcatgtgtactgggaagagttccagaaggaccctgtgggcctgatgagccgggtggcccagcctgccagcaagaagatcgatcagaacaagctgaaacctgagatggacgagaagggcaacctgaccaccgccggctttgcctgctctcagtgtggccagcccctgttcgtgtacaagctggagcaggtgtctgagaagggcaaggcttacaccaactacttcggacggtgcaatgtggccgagcacgaaaagctgatcctgctggcccagctgaagcccgagaaggatagcgacgaagccgtgacatatagcctgggaaagtttgggcagagggccctggatttctacagcattcatgtgaccaaggagtccacccaccccgtgaagcccctggcccagatcgccggaaacagatacgcctccggacctgtgggaaaggccctgagcgacgcatgtatgggcacaatcgcctccttcctgtctaagtaccaggacatcatcatcgaacaccagaaggtggtgaagggcaaccagaagagactggagagcctgcgggagctggccggcaaggaaaacctggaataccctagcgtgaccctgccacctcagcctcacaccaaggagggcgttgatgcctacaacgaagtgatcgcccgggtgcgaatgtgggtgaacctgaacctgtggcagaagctgaagctaagcagagatgatgccaagcctctgctgagactgaagggattcccttcctttcctctggtcgagagacaggccaacgaagtggactggtgggacatggtgtgtaacgtgaagaagctgatcaacgagaaaaaggaggatggcaaggtgttttggcagaatctggctggctacaagagacaggaagccctgagaccatacctgagcagcgaggaagatcggaagaagggaaagaaattcgctcggtaccagctgggcgacctgctgctgcacctggaaaagaagcacggcgaggactggggaaaggtgtacgacgaggcctgggagcggattgacaagaaagtggaaggcctgagcaagcacatcaagctggaagaggaacggagaagcgaggacgcccagagcaaggccgccctgaccgactggctgcgggctaaggccagcttcgtgatcgagggcctgaaggaggccgacaaggacgagttctgcagatgcgagctgaagctgcagaagtggtacggggacctgcggggaaagcccttcgccatcgaagccgagaacagcatcctggacatcagcggcttcagcaagcagtacaactgtgccttcatctggcagaaggacggcgtgaagaagctgaacctgtacctgatcatcaactacttcaagggcggcaagctgcggttcaagaagatcaaacctgaagccttcgaagccaacagattctacaccgtgatcaacaaaaagagcggcgagatcgtgcccatggaggtgaacttcaacttcgacgaccccaacctgatcatcctgcctctggcctttggcaagagacagggcagagaattcatctggaacgacctgctgtccctggaaaccggcagcctgaagctggccaacggaagagtgatcgagaagacactgtacaacagaagaacccggcaggatgagcctgccctgttcgtggccctgaccttcgagcggcgggaggtcctggactcctccaatatcaaaccaatgaacctgatcggcgtggcaagaggcgaaaacatccccgccgtgatcgccctgaccgaccccgagggctgcccactgagccggtttaaggatagcctgggaaacccaacccacatcctgagaatcggcgagagctataaggagaagcagcggaccatccaggccaagaaggaggtggagcagcggagagccggcggctacagccggaagtacgccagcaaagccaagaatctggcagacgatatggtgagaaacaccgctagagatctgctgtactacgccgtgacccaggatgccatgctgatcttcgccaacctgagccggggcttcggccggcagggcaagcggaccttcatggccgagagacagtacacacggatggaggactggctgaccgccaagctggcctacgagggcctgagcaagacctacctgtccaagacactggcccagtacacctccaagacatgcagcaactgtgggtttaccatcaccagcgccgactacgacagggtgctggagaagctgaagaagacagcaacaggctggatgaccacaattaacggcaaggagctgaaggtggagggccagattacctactacaacagatacaagagacagaacgtagtcaaggacctgtccgtcgagctggatagactgagcgaagaatctgtgaacaacgacatctcctcctggacaaagggcagaagcggagaagctctgagcctcctgaagaaaagattctcccatagacccgtgcaggagaagttcgtgtgcctgaactgcggcttcgagacacacgcagccgagcaagccgccctgaacatcgccagatcctggctgttcctgcggagccaggagtacaagaaataccagacaaacaagacaaccggcaacaccgataagagagccttcgtcgagacctggcagtccttttaccggaagaagcttaaggaggtgtggaaacctgccgtgcggtctggcggatctggcggaggctccacaagcagcatgggcagcgacctgttcagggacgtggccgtggtgttcagcagggaggagtgggagaggctggcccccgcccagagggacctgtacagggacgtgatgctggagacctacagccacctgaggagcctggacctggccatcagcaagcccgacgtgatcgccttcctggagcagggcgaggagccctggagggccgaggaggccgccagggacggcctgtgccccgtggactgggagtgcaccagccccaagaaaaagagaaaagtctaagctgccttctgcggggcttgccttctggccatgcccttcttctctcccttgcacctgtacctcttggtctttgaataaagcctgagtaggaaggctagcaaaaaaaaaaaaaaaaaaaaaaaaaaaaaaaaaaaaaaaaaaaaaaaaaaaaaaaaaaaaaaaaaaaaaaaaaaaaaaaa

SEQ ID NO: 3194 - RNA, 5419 nt, synthetic construct
  source 1..5419: mol_type = other RNA
aggaaataagagagaaaagaagagtaagaagaaatataagagccaccatggcccctaagaagaagcgtaaagtgagccgggtgaacggcagcggcagcggcggcggcatgaaccacgaccaggagttcgacccccctaaggtgtaccctcccgtccccgccgagaagagaaagcccatccgggtcctgagcctgttcgatggcatcgccaccggtctgctggtgctgaaggacctgggcatccaggtggataggtacattgcctccgaggtgtgcgaggactccatcaccgtgggaatggtgcgtcatcagggcaagatcatgtacgtgggcgacgtgcggagcgtgacacagaagcatatccaggagtggggccctttcgacctggtgatcggcggcagcccttgcaatgacctgagcatcgtgaacccagcccggaagggcctgtacgagggaaccggcagactgttcttcgagttttacagactgctgcacgacgcccggcctaaggaaggcgacgaccggcccttcttttggctgttcgagaatgtggtggccatgggagtcagcgacaagcgggatattagccggttcctggagagcaaccccgtgatgatcgatgccaaggaagtgagcgccgcccaccgggccagatacttctggggcaatctgcctggcatgaacagacccctggccagcaccgtgaacgacaagctggagctgcaggagtgcctggagcacggccggatcgccaagttcagcaaggtgagaaccatcaccacccgaagcaacagcatcaaacaaggcaaggaccagcactttcctgtgttcatgaacgagaaggaggacatcctgtggtgtaccgagatggagagagtgttcgggttcccagtccactacacagatgtcagcaacatgtctagactggccagacagagactgctgggaagaagctggtccgtccctgtgatcagacacctgttcgcccctctgaaggagtacttcgcctgcgtgagcagcggcaacagcaacgccaacagccggggccccagcttctctagcggcctggtgccactgtccctgagagggagccacatgggccccatggagatctacaaaaccgtgagcgcctggaagcggcagcctgtgcgcgtgctgagcctgtttcggaatatcgataaagtcctgaaaagcctgggattcctggagagcggctctggctccggcggtggcaccctgaagtacgtggaggatgtgacaaacgtggtcagacgggatgtggagaagtggggccccttcgatctggtgtacggcagcacccaacccctgggcagctcttgtgaccggtgccctggctggtacatgtttcagttccaccggatcctgcagtacgccctgccgagacaggagtcccagcggccattcttttggattttcatggacaacttgctgctgaccgaggatgaccaggaaactaccactcggttcctgcagaccgaagccgtgaccctgcaggacgtgagaggccgggactaccagaacgccatgcgggtgtggtccaacatccctggactgaaaagcaagcacgcacctctgacccctaaagaagaggagtacctgcaggcccaggtgcggagcagaagcaagctggacgcccctaaggtggatctgctggtgaagaattgcctcctgcccctgagagagtacttcaagtatttcagccagaatagtctgcccctgggcggcccaagcagcggcgcccctcctcccagcggcggcagcccagccggctccccaacctctaccgaggagggcacctctgagtccgccacccccgagagcggccctggcacctccaccgagcccagcgagggcagcgcacccggcagccctgccggcagccccacctccacagaggagggaaccagcaccgagcccagcgaaggcagcgccccaggcaccagcaccgagcctagtgagggcggctctggcggcggcagcgcccaggagattaaacggatcaacaagatcagaagaagacttgtgaaagacagcaacaccaagaaggccggcaagacaggccccatgaaaaccctgctggttagagtgatgacacccgatctgagagagcggctggaaaacctgagaaagaagcctgaaaatatcccccagcccatcagcaatacatctagagccaacctgaataagctgctgaccgattacaccgaaatgaagaaggcgatcctgcatgtgtactgggaagagttccagaaggaccctgtgggcctgatgagccgggtggcccagcctgccagcaagaagatcgatcagaacaagctgaaacctgagatggacgagaagggcaacctgaccaccgccggctttgcctgctctcagtgtggccagcccctgttcgtgtacaagctggagcaggtgtctgagaagggcaaggcttacaccaactacttcggacggtgcaatgtggccgagcacgaaaagctgatcctgctggcccagctgaagcccgagaaggatagcgacgaagccgtgacatatagcctgggaaagtttgggcagagggccctggatttctacagcattcatgtgaccaaggagtccacccaccccgtgaagcccctggcccagatcgccggaaacagatacgcctccggacctgtgggaaaggccctgagcgacgcatgtatgggcacaatcgcctccttcctgtctaagtaccaggacatcatcatcgaacaccagaaggtggtgaagggcaaccagaagagactggagagcctgcgggagctggccggcaaggaaaacctggaataccctagcgtgaccctgccacctcagcctcacaccaaggagggcgttgatgcctacaacgaagtgatcgcccgggtgcgaatgtgggtgaacctgaacctgtggcagaagctgaagctaagcagagatgatgccaagcctctgctgagactgaagggattcccttcctttcctctggtcgagagacaggccaacgaagtggactggtgggacatggtgtgtaacgtgaagaagctgatcaacgagaaaaaggaggatggcaaggtgttttggcagaatctggctggctacaagagacaggaagccctgagaccatacctgagcagcgaggaagatcggaagaagggaaagaaattcgctcggtaccagctgggcgacctgctgctgcacctggaaaagaagcacggcgaggactggggaaaggtgtacgacgaggcctgggagcggattgacaagaaagtggaaggcctgagcaagcacatcaagctggaagaggaacggagaagcgaggacgcccagagcaaggccgccctgaccgactggctgcgggctaaggccagcttcgtgatcgagggcctgaaggaggccgacaaggacgagttctgcagatgcgagctgaagctgcagaagtggtacggggacctgcggggaaagcccttcgccatcgaagccgagaacagcatcctggacatcagcggcttcagcaagcagtacaactgtgccttcatctggcagaaggacggcgtgaagaagctgaacctgtacctgatcatcaactacttcaagggcggcaagctgcggttcaagaagatcaaacctgaagccttcgaagccaacagattctacaccgtgatcaacaaaaagagcggcgagatcgtgcccatggaggtgaacttcaacttcgacgaccccaacctgatcatcctgcctctggcctttggcaagagacagggcagagaattcatctggaacgacctgctgtccctggaaaccggcagcctgaagctggccaacggaagagtgatcgagaagacactgtacaacagaagaacccggcaggatgagcctgccctgttcgtggccctgaccttcgagcggcgggaggtcctggactcctccaatatcaaaccaatgaacctgatcggcgtggcaagaggcgaaaacatccccgccgtgatcgccctgaccgaccccgagggctgcccactgagccggtttaaggatagcctgggaaacccaacccacatcctgagaatcggcgagagctataaggagaagcagcggaccatccaggccaagaaggaggtggagcagcggagagccggcggctacagccggaagtacgccagcaaagccaagaatctggcagacgatatggtgagaaacaccgctagagatctgctgtactacgccgtgacccaggatgccatgctgatcttcgccaacctgagccggggcttcggccggcagggcaagcggaccttcatggccgagagacagtacacacggatggaggactggctgaccgccaagctggcctacgagggcctgagcaagacctacctgtccaagacactggcccagtacacctccaagacatgcagcaactgtgggtttaccatcaccagcgccgactacgacagggtgctggagaagctgaagaagacagcaacaggctggatgaccacaattaacggcaaggagctgaaggtggagggccagattacctactacaacagatacaagagacagaacgtagtcaaggacctgtccgtcgagctggatagactgagcgaagaatctgtgaacaacgacatctcctcctggacaaagggcagaagcggagaagctctgagcctcctgaagaaaagattctcccatagacccgtgcaggagaagttcgtgtgcctgaactgcggcttcgagacacacgcagccgagcaagccgccctgaacatcgccagatcctggctgttcctgcggagccaggagtacaagaaataccagacaaacaagacaaccggcaacaccgataagagagccttcgtcgagacctggcagtccttttaccggaagaagcttaaggaggtgtggaaacctgccgtgcggtctggcggatctggcggaggctccacaagcggcagcgtgagcttcgacgaggtgagcgtgaggttcagcaacgaggagtgggccctgctggaccccggccagagggccctgtacgaggaggtgatggaggagatcagggagatgatgaccagcgtgggcgacgtgagcgagttcctgaccgagggcgagcagagcgagcccagcagggagggcgccgaggagcagaaggagcagaggaagcagagggtgcaggtgggcacctacaggaaggagaccagccccaagaaaaagagaaaagtctaagctgccttctgcggggcttgccttctggccatgcccttcttctctcccttgcacctgtacctcttggtctttgaataaagcctgagtaggaaggctagcaaaaaaaaaaaaaaaaaaaaaaaaaaaaaaaaaaaaaaaaaaaaaaaaaaaaaaaaaaaaaaaaaaaaaaaaaaaaaaaa

SEQ ID NO: 3195 - RNA, 5419 nt, synthetic construct
  source 1..5419: mol_type = other RNA
aggaaataagagagaaaagaagagtaagaagaaatataagagccaccatggcccctaagaagaagcgtaaagtgagccgggtgaacggcagcggcagcggcggcggcatgaaccacgaccaggagttcgacccccctaaggtgtaccctcccgtccccgccgagaagagaaagcccatccgggtcctgagcctgttcgatggcatcgccaccggtctgctggtgctgaaggacctgggcatccaggtggataggtacattgcctccgaggtgtgcgaggactccatcaccgtgggaatggtgcgtcatcagggcaagatcatgtacgtgggcgacgtgcggagcgtgacacagaagcatatccaggagtggggccctttcgacctggtgatcggcggcagcccttgcaatgacctgagcatcgtgaacccagcccggaagggcctgtacgagggaaccggcagactgttcttcgagttttacagactgctgcacgacgcccggcctaaggaaggcgacgaccggcccttcttttggctgttcgagaatgtggtggccatgggagtcagcgacaagcgggatattagccggttcctggagagcaaccccgtgatgatcgatgccaaggaagtgagcgccgcccaccgggccagatacttctggggcaatctgcctggcatgaacagacccctggccagcaccgtgaacgacaagctggagctgcaggagtgcctggagcacggccggatcgccaagttcagcaaggtgagaaccatcaccacccgaagcaacagcatcaaacaaggcaaggaccagcactttcctgtgttcatgaacgagaaggaggacatcctgtggtgtaccgagatggagagagtgttcgggttcccagtccactacacagatgtcagcaacatgtctagactggccagacagagactgctgggaagaagctggtccgtccctgtgatcagacacctgttcgcccctctgaaggagtacttcgcctgcgtgagcagcggcaacagcaacgccaacagccggggccccagcttctctagcggcctggtgccactgtccctgagagggagccacatgggccccatggagatctacaaaaccgtgagcgcctggaagcggcagcctgtgcgcgtgctgagcctgtttcggaatatcgataaagtcctgaaaagcctgggattcctggagagcggctctggctccggcggtggcaccctgaagtacgtggaggatgtgacaaacgtggtcagacgggatgtggagaagtggggccccttcgatctggtgtacggcagcacccaacccctgggcagctcttgtgaccggtgccctggctggtacatgtttcagttccaccggatcctgcagtacgccctgccgagacaggagtcccagcggccattcttttggattttcatggacaacttgctgctgaccgaggatgaccaggaaactaccactcggttcctgcagaccgaagccgtgaccctgcaggacgtgagaggccgggactaccagaacgccatgcgggtgtggtccaacatccctggactgaaaagcaagcacgcacctctgacccctaaagaagaggagtacctgcaggcccaggtgcggagcagaagcaagctggacgcccctaaggtggatctgctggtgaagaattgcctcctgcccctgagagagtacttcaagtatttcagccagaatagtctgcccctgggcggcccaagcagcggcgcccctcctcccagcggcggcagcccagccggctccccaacctctaccgaggagggcacctctgagtccgccacccccgagagcggccctggcacctccaccgagcccagcgagggcagcgcacccggcagccctgccggcagccccacctccacagaggagggaaccagcaccgagcccagcgaaggcagcgccccaggcaccagcaccgagcctagtgagggcggctctggcggcggcagcgcccaggagattaaacggatcaacaagatcagaagaagacttgtgaaagacagcaacaccaagaaggccggcaagacaggccccatgaaaaccctgctggttagagtgatgacacccgatctgagagagcggctggaaaacctgagaaagaagcctgaaaatatcccccagcccatcagcaatacatctagagccaacctgaataagctgctgaccgattacaccgaaatgaagaaggcgatcctgcatgtgtactgggaagagttccagaaggaccctgtgggcctgatgagccgggtggcccagcctgccagcaagaagatcgatcagaacaagctgaaacctgagatggacgagaagggcaacctgaccaccgccggctttgcctgctctcagtgtggccagcccctgttcgtgtacaagctggagcaggtgtctgagaagggcaaggcttacaccaactacttcggacggtgcaatgtggccgagcacgaaaagctgatcctgctggcccagctgaagcccgagaaggatagcgacgaagccgtgacatatagcctgggaaagtttgggcagagggccctggatttctacagcattcatgtgaccaaggagtccacccaccccgtgaagcccctggcccagatcgccggaaacagatacgcctccggacctgtgggaaaggccctgagcgacgcatgtatgggcacaatcgcctccttcctgtctaagtaccaggacatcatcatcgaacaccagaaggtggtgaagggcaaccagaagagactggagagcctgcgggagctggccggcaaggaaaacctggaataccctagcgtgaccctgccacctcagcctcacaccaaggagggcgttgatgcctacaacgaagtgatcgcccgggtgcgaatgtgggtgaacctgaacctgtggcagaagctgaagctaagcagagatgatgccaagcctctgctgagactgaagggattcccttcctttcctctggtcgagagacaggccaacgaagtggactggtgggacatggtgtgtaacgtgaagaagctgatcaacgagaaaaaggaggatggcaaggtgttttggcagaatctggctggctacaagagacaggaagccctgagaccatacctgagcagcgaggaagatcggaagaagggaaagaaattcgctcggtaccagctgggcgacctgctgctgcacctggaaaagaagcacggcgaggactggggaaaggtgtacgacgaggcctgggagcggattgacaagaaagtggaaggcctgagcaagcacatcaagctggaagaggaacggagaagcgaggacgcccagagcaaggccgccctgaccgactggctgcgggctaaggccagcttcgtgatcgagggcctgaaggaggccgacaaggacgagttctgcagatgcgagctgaagctgcagaagtggtacggggacctgcggggaaagcccttcgccatcgaagccgagaacagcatcctggacatcagcggcttcagcaagcagtacaactgtgccttcatctggcagaaggacggcgtgaagaagctgaacctgtacctgatcatcaactacttcaagggcggcaagctgcggttcaagaagatcaaacctgaagccttcgaagccaacagattctacaccgtgatcaacaaaaagagcggcgagatcgtgcccatggaggtgaacttcaacttcgacgaccccaacctgatcatcctgcctctggcctttggcaagagacagggcagagaattcatctggaacgacctgctgtccctggaaaccggcagcctgaagctggccaacggaagagtgatcgagaagacactgtacaacagaagaacccggcaggatgagcctgccctgttcgtggccctgaccttcgagcggcgggaggtcctggactcctccaatatcaaaccaatgaacctgatcggcgtggcaagaggcgaaaacatccccgccgtgatcgccctgaccgaccccgagggctgcccactgagccggtttaaggatagcctgggaaacccaacccacatcctgagaatcggcgagagctataaggagaagcagcggaccatccaggccaagaaggaggtggagcagcggagagccggcggctacagccggaagtacgccagcaaagccaagaatctggcagacgatatggtgagaaacaccgctagagatctgctgtactacgccgtgacccaggatgccatgctgatcttcgccaacctgagccggggcttcggccggcagggcaagcggaccttcatggccgagagacagtacacacggatggaggactggctgaccgccaagctggcctacgagggcctgagcaagacctacctgtccaagacactggcccagtacacctccaagacatgcagcaactgtgggtttaccatcaccagcgccgactacgacagggtgctggagaagctgaagaagacagcaacaggctggatgaccacaattaacggcaaggagctgaaggtggagggccagattacctactacaacagatacaagagacagaacgtagtcaaggacctgtccgtcgagctggatagactgagcgaagaatctgtgaacaacgacatctcctcctggacaaagggcagaagcggagaagctctgagcctcctgaagaaaagattctcccatagacccgtgcaggagaagttcgtgtgcctgaactgcggcttcgagacacacgcagccgagcaagccgccctgaacatcgccagatcctggctgttcctgcggagccaggagtacaagaaataccagacaaacaagacaaccggcaacaccgataagagagccttcgtcgagacctggcagtccttttaccggaagaagcttaaggaggtgtggaaacctgccgtgcggtctggcggatctggcggaggctccacaagcttccaggaggccgtgaccttcaaggacgtggccgtggtgttcagcgaggaggagctgggcctgctggaccccgcccagaggaagctgtacagggacgtgatgctggagaacttcaggaacctggtgagcgtgggccacagcagcagcaagcccgacatgatcagccagctggagagggaggagaagctgtgcgtgaaggagatccacaccgagaggggcggcaggaaccccaacgaggccgagaccagccccaagaaaaagagaaaagtctaagctgccttctgcggggcttgccttctggccatgcccttcttctctcccttgcacctgtacctcttggtctttgaataaagcctgagtaggaaggctagcaaaaaaaaaaaaaaaaaaaaaaaaaaaaaaaaaaaaaaaaaaaaaaaaaaaaaaaaaaaaaaaaaaaaaaaaaaaaaaaa

SEQ ID NO: 3196 - RNA, 5419 nt, synthetic construct
  source 1..5419: mol_type = other RNA
aggaaataagagagaaaagaagagtaagaagaaatataagagccaccatggcccctaagaagaagcgtaaagtgagccgggtgaacggcagcggcagcggcggcggcatgaaccacgaccaggagttcgacccccctaaggtgtaccctcccgtccccgccgagaagagaaagcccatccgggtcctgagcctgttcgatggcatcgccaccggtctgctggtgctgaaggacctgggcatccaggtggataggtacattgcctccgaggtgtgcgaggactccatcaccgtgggaatggtgcgtcatcagggcaagatcatgtacgtgggcgacgtgcggagcgtgacacagaagcatatccaggagtggggccctttcgacctggtgatcggcggcagcccttgcaatgacctgagcatcgtgaacccagcccggaagggcctgtacgagggaaccggcagactgttcttcgagttttacagactgctgcacgacgcccggcctaaggaaggcgacgaccggcccttcttttggctgttcgagaatgtggtggccatgggagtcagcgacaagcgggatattagccggttcctggagagcaaccccgtgatgatcgatgccaaggaagtgagcgccgcccaccgggccagatacttctggggcaatctgcctggcatgaacagacccctggccagcaccgtgaacgacaagctggagctgcaggagtgcctggagcacggccggatcgccaagttcagcaaggtgagaaccatcaccacccgaagcaacagcatcaaacaaggcaaggaccagcactttcctgtgttcatgaacgagaaggaggacatcctgtggtgtaccgagatggagagagtgttcgggttcccagtccactacacagatgtcagcaacatgtctagactggccagacagagactgctgggaagaagctggtccgtccctgtgatcagacacctgttcgcccctctgaaggagtacttcgcctgcgtgagcagcggcaacagcaacgccaacagccggggccccagcttctctagcggcctggtgccactgtccctgagagggagccacatgggccccatggagatctacaaaaccgtgagcgcctggaagcggcagcctgtgcgcgtgctgagcctgtttcggaatatcgataaagtcctgaaaagcctgggattcctggagagcggctctggctccggcggtggcaccctgaagtacgtggaggatgtgacaaacgtggtcagacgggatgtggagaagtggggccccttcgatctggtgtacggcagcacccaacccctgggcagctcttgtgaccggtgccctggctggtacatgtttcagttccaccggatcctgcagtacgccctgccgagacaggagtcccagcggccattcttttggattttcatggacaacttgctgctgaccgaggatgaccaggaaactaccactcggttcctgcagaccgaagccgtgaccctgcaggacgtgagaggccgggactaccagaacgccatgcgggtgtggtccaacatccctggactgaaaagcaagcacgcacctctgacccctaaagaagaggagtacctgcaggcccaggtgcggagcagaagcaagctggacgcccctaaggtggatctgctggtgaagaattgcctcctgcccctgagagagtacttcaagtatttcagccagaatagtctgcccctgggcggcccaagcagcggcgcccctcctcccagcggcggcagcccagccggctccccaacctctaccgaggagggcacctctgagtccgccacccccgagagcggccctggcacctccaccgagcccagcgagggcagcgcacccggcagccctgccggcagccccacctccacagaggagggaaccagcaccgagcccagcgaaggcagcgccccaggcaccagcaccgagcctagtgagggcggctctggcggcggcagcgcccaggagattaaacggatcaacaagatcagaagaagacttgtgaaagacagcaacaccaagaaggccggcaagacaggccccatgaaaaccctgctggttagagtgatgacacccgatctgagagagcggctggaaaacctgagaaagaagcctgaaaatatcccccagcccatcagcaatacatctagagccaacctgaataagctgctgaccgattacaccgaaatgaagaaggcgatcctgcatgtgtactgggaagagttccagaaggaccctgtgggcctgatgagccgggtggcccagcctgccagcaagaagatcgatcagaacaagctgaaacctgagatggacgagaagggcaacctgaccaccgccggctttgcctgctctcagtgtggccagcccctgttcgtgtacaagctggagcaggtgtctgagaagggcaaggcttacaccaactacttcggacggtgcaatgtggccgagcacgaaaagctgatcctgctggcccagctgaagcccgagaaggatagcgacgaagccgtgacatatagcctgggaaagtttgggcagagggccctggatttctacagcattcatgtgaccaaggagtccacccaccccgtgaagcccctggcccagatcgccggaaacagatacgcctccggacctgtgggaaaggccctgagcgacgcatgtatgggcacaatcgcctccttcctgtctaagtaccaggacatcatcatcgaacaccagaaggtggtgaagggcaaccagaagagactggagagcctgcgggagctggccggcaaggaaaacctggaataccctagcgtgaccctgccacctcagcctcacaccaaggagggcgttgatgcctacaacgaagtgatcgcccgggtgcgaatgtgggtgaacctgaacctgtggcagaagctgaagctaagcagagatgatgccaagcctctgctgagactgaagggattcccttcctttcctctggtcgagagacaggccaacgaagtggactggtgggacatggtgtgtaacgtgaagaagctgatcaacgagaaaaaggaggatggcaaggtgttttggcagaatctggctggctacaagagacaggaagccctgagaccatacctgagcagcgaggaagatcggaagaagggaaagaaattcgctcggtaccagctgggcgacctgctgctgcacctggaaaagaagcacggcgaggactggggaaaggtgtacgacgaggcctgggagcggattgacaagaaagtggaaggcctgagcaagcacatcaagctggaagaggaacggagaagcgaggacgcccagagcaaggccgccctgaccgactggctgcgggctaaggccagcttcgtgatcgagggcctgaaggaggccgacaaggacgagttctgcagatgcgagctgaagctgcagaagtggtacggggacctgcggggaaagcccttcgccatcgaagccgagaacagcatcctggacatcagcggcttcagcaagcagtacaactgtgccttcatctggcagaaggacggcgtgaagaagctgaacctgtacctgatcatcaactacttcaagggcggcaagctgcggttcaagaagatcaaacctgaagccttcgaagccaacagattctacaccgtgatcaacaaaaagagcggcgagatcgtgcccatggaggtgaacttcaacttcgacgaccccaacctgatcatcctgcctctggcctttggcaagagacagggcagagaattcatctggaacgacctgctgtccctggaaaccggcagcctgaagctggccaacggaagagtgatcgagaagacactgtacaacagaagaacccggcaggatgagcctgccctgttcgtggccctgaccttcgagcggcgggaggtcctggactcctccaatatcaaaccaatgaacctgatcggcgtggcaagaggcgaaaacatccccgccgtgatcgccctgaccgaccccgagggctgcccactgagccggtttaaggatagcctgggaaacccaacccacatcctgagaatcggcgagagctataaggagaagcagcggaccatccaggccaagaaggaggtggagcagcggagagccggcggctacagccggaagtacgccagcaaagccaagaatctggcagacgatatggtgagaaacaccgctagagatctgctgtactacgccgtgacccaggatgccatgctgatcttcgccaacctgagccggggcttcggccggcagggcaagcggaccttcatggccgagagacagtacacacggatggaggactggctgaccgccaagctggcctacgagggcctgagcaagacctacctgtccaagacactggcccagtacacctccaagacatgcagcaactgtgggtttaccatcaccagcgccgactacgacagggtgctggagaagctgaagaagacagcaacaggctggatgaccacaattaacggcaaggagctgaaggtggagggccagattacctactacaacagatacaagagacagaacgtagtcaaggacctgtccgtcgagctggatagactgagcgaagaatctgtgaacaacgacatctcctcctggacaaagggcagaagcggagaagctctgagcctcctgaagaaaagattctcccatagacccgtgcaggagaagttcgtgtgcctgaactgcggcttcgagacacacgcagccgagcaagccgccctgaacatcgccagatcctggctgttcctgcggagccaggagtacaagaaataccagacaaacaagacaaccggcaacaccgataagagagccttcgtcgagacctggcagtccttttaccggaagaagcttaaggaggtgtggaaacctgccgtgcggtctggcggatctggcggaggctccacaagcctgcaggtgagcgtgagcttcgaggacgtgaccgtgaacttcagcagggaggagtggcagaggctggaccccgcccagaggaggctgtacagggacgtgaccctggagaactacagccacctgaggagcgtgggctaccaggtgcccaagcccgaggtgatcttcaagctggagcagggcgagggcccctggaccctggagggcgagaccccccaccagagctgcagcggcgaggacatcggcaccagccccaagaaaaagagaaaagtctaagctgccttctgcggggcttgccttctggccatgcccttcttctctcccttgcacctgtacctcttggtctttgaataaagcctgagtaggaaggctagcaaaaaaaaaaaaaaaaaaaaaaaaaaaaaaaaaaaaaaaaaaaaaaaaaaaaaaaaaaaaaaaaaaaaaaaaaaaaaaaa

SEQ ID NO: 3197 - RNA, 5419 nt, synthetic construct
  source 1..5419: mol_type = other RNA
aggaaataagagagaaaagaagagtaagaagaaatataagagccaccatggcccctaagaagaagcgtaaagtgagccgggtgaacggcagcggcagcggcggcggcatgaaccacgaccaggagttcgacccccctaaggtgtaccctcccgtccccgccgagaagagaaagcccatccgggtcctgagcctgttcgatggcatcgccaccggtctgctggtgctgaaggacctgggcatccaggtggataggtacattgcctccgaggtgtgcgaggactccatcaccgtgggaatggtgcgtcatcagggcaagatcatgtacgtgggcgacgtgcggagcgtgacacagaagcatatccaggagtggggccctttcgacctggtgatcggcggcagcccttgcaatgacctgagcatcgtgaacccagcccggaagggcctgtacgagggaaccggcagactgttcttcgagttttacagactgctgcacgacgcccggcctaaggaaggcgacgaccggcccttcttttggctgttcgagaatgtggtggccatgggagtcagcgacaagcgggatattagccggttcctggagagcaaccccgtgatgatcgatgccaaggaagtgagcgccgcccaccgggccagatacttctggggcaatctgcctggcatgaacagacccctggccagcaccgtgaacgacaagctggagctgcaggagtgcctggagcacggccggatcgccaagttcagcaaggtgagaaccatcaccacccgaagcaacagcatcaaacaaggcaaggaccagcactttcctgtgttcatgaacgagaaggaggacatcctgtggtgtaccgagatggagagagtgttcgggttcccagtccactacacagatgtcagcaacatgtctagactggccagacagagactgctgggaagaagctggtccgtccctgtgatcagacacctgttcgcccctctgaaggagtacttcgcctgcgtgagcagcggcaacagcaacgccaacagccggggccccagcttctctagcggcctggtgccactgtccctgagagggagccacatgggccccatggagatctacaaaaccgtgagcgcctggaagcggcagcctgtgcgcgtgctgagcctgtttcggaatatcgataaagtcctgaaaagcctgggattcctggagagcggctctggctccggcggtggcaccctgaagtacgtggaggatgtgacaaacgtggtcagacgggatgtggagaagtggggccccttcgatctggtgtacggcagcacccaacccctgggcagctcttgtgaccggtgccctggctggtacatgtttcagttccaccggatcctgcagtacgccctgccgagacaggagtcccagcggccattcttttggattttcatggacaacttgctgctgaccgaggatgaccaggaaactaccactcggttcctgcagaccgaagccgtgaccctgcaggacgtgagaggccgggactaccagaacgccatgcgggtgtggtccaacatccctggactgaaaagcaagcacgcacctctgacccctaaagaagaggagtacctgcaggcccaggtgcggagcagaagcaagctggacgcccctaaggtggatctgctggtgaagaattgcctcctgcccctgagagagtacttcaagtatttcagccagaatagtctgcccctgggcggcccaagcagcggcgcccctcctcccagcggcggcagcccagccggctccccaacctctaccgaggagggcacctctgagtccgccacccccgagagcggccctggcacctccaccgagcccagcgagggcagcgcacccggcagccctgccggcagccccacctccacagaggagggaaccagcaccgagcccagcgaaggcagcgccccaggcaccagcaccgagcctagtgagggcggctctggcggcggcagcgcccaggagattaaacggatcaacaagatcagaagaagacttgtgaaagacagcaacaccaagaaggccggcaagacaggccccatgaaaaccctgctggttagagtgatgacacccgatctgagagagcggctggaaaacctgagaaagaagcctgaaaatatcccccagcccatcagcaatacatctagagccaacctgaataagctgctgaccgattacaccgaaatgaagaaggcgatcctgcatgtgtactgggaagagttccagaaggaccctgtgggcctgatgagccgggtggcccagcctgccagcaagaagatcgatcagaacaagctgaaacctgagatggacgagaagggcaacctgaccaccgccggctttgcctgctctcagtgtggccagcccctgttcgtgtacaagctggagcaggtgtctgagaagggcaaggcttacaccaactacttcggacggtgcaatgtggccgagcacgaaaagctgatcctgctggcccagctgaagcccgagaaggatagcgacgaagccgtgacatatagcctgggaaagtttgggcagagggccctggatttctacagcattcatgtgaccaaggagtccacccaccccgtgaagcccctggcccagatcgccggaaacagatacgcctccggacctgtgggaaaggccctgagcgacgcatgtatgggcacaatcgcctccttcctgtctaagtaccaggacatcatcatcgaacaccagaaggtggtgaagggcaaccagaagagactggagagcctgcgggagctggccggcaaggaaaacctggaataccctagcgtgaccctgccacctcagcctcacaccaaggagggcgttgatgcctacaacgaagtgatcgcccgggtgcgaatgtgggtgaacctgaacctgtggcagaagctgaagctaagcagagatgatgccaagcctctgctgagactgaagggattcccttcctttcctctggtcgagagacaggccaacgaagtggactggtgggacatggtgtgtaacgtgaagaagctgatcaacgagaaaaaggaggatggcaaggtgttttggcagaatctggctggctacaagagacaggaagccctgagaccatacctgagcagcgaggaagatcggaagaagggaaagaaattcgctcggtaccagctgggcgacctgctgctgcacctggaaaagaagcacggcgaggactggggaaaggtgtacgacgaggcctgggagcggattgacaagaaagtggaaggcctgagcaagcacatcaagctggaagaggaacggagaagcgaggacgcccagagcaaggccgccctgaccgactggctgcgggctaaggccagcttcgtgatcgagggcctgaaggaggccgacaaggacgagttctgcagatgcgagctgaagctgcagaagtggtacggggacctgcggggaaagcccttcgccatcgaagccgagaacagcatcctggacatcagcggcttcagcaagcagtacaactgtgccttcatctggcagaaggacggcgtgaagaagctgaacctgtacctgatcatcaactacttcaagggcggcaagctgcggttcaagaagatcaaacctgaagccttcgaagccaacagattctacaccgtgatcaacaaaaagagcggcgagatcgtgcccatggaggtgaacttcaacttcgacgaccccaacctgatcatcctgcctctggcctttggcaagagacagggcagagaattcatctggaacgacctgctgtccctggaaaccggcagcctgaagctggccaacggaagagtgatcgagaagacactgtacaacagaagaacccggcaggatgagcctgccctgttcgtggccctgaccttcgagcggcgggaggtcctggactcctccaatatcaaaccaatgaacctgatcggcgtggcaagaggcgaaaacatccccgccgtgatcgccctgaccgaccccgagggctgcccactgagccggtttaaggatagcctgggaaacccaacccacatcctgagaatcggcgagagctataaggagaagcagcggaccatccaggccaagaaggaggtggagcagcggagagccggcggctacagccggaagtacgccagcaaagccaagaatctggcagacgatatggtgagaaacaccgctagagatctgctgtactacgccgtgacccaggatgccatgctgatcttcgccaacctgagccggggcttcggccggcagggcaagcggaccttcatggccgagagacagtacacacggatggaggactggctgaccgccaagctggcctacgagggcctgagcaagacctacctgtccaagacactggcccagtacacctccaagacatgcagcaactgtgggtttaccatcaccagcgccgactacgacagggtgctggagaagctgaagaagacagcaacaggctggatgaccacaattaacggcaaggagctgaaggtggagggccagattacctactacaacagatacaagagacagaacgtagtcaaggacctgtccgtcgagctggatagactgagcgaagaatctgtgaacaacgacatctcctcctggacaaagggcagaagcggagaagctctgagcctcctgaagaaaagattctcccatagacccgtgcaggagaagttcgtgtgcctgaactgcggcttcgagacacacgcagccgagcaagccgccctgaacatcgccagatcctggctgttcctgcggagccaggagtacaagaaataccagacaaacaagacaaccggcaacaccgataagagagccttcgtcgagacctggcagtccttttaccggaagaagcttaaggaggtgtggaaacctgccgtgcggtctggcggatctggcggaggctccacaagcgcccagggcctggtgaccttcagggacgtggccatcgagttcagccaggaggagtggaagtgcctggagcccgcccagaggaacctgtacagggacgtgaccctggagaacttcagcaacctggtgagcctgggcctgagcatcagcaagcccgacctgatcagcctgctggagcagggcagggagccctggatgatcgccaacgacatgaccggcccctggtgccccgagctggagagcaggaccagccccaagaaaaagagaaaagtctaagctgccttctgcggggcttgccttctggccatgcccttcttctctcccttgcacctgtacctcttggtctttgaataaagcctgagtaggaaggctagcaaaaaaaaaaaaaaaaaaaaaaaaaaaaaaaaaaaaaaaaaaaaaaaaaaaaaaaaaaaaaaaaaaaaaaaaaaaaaaaa

SEQ ID NO: 3198 - RNA, 5419 nt, synthetic construct
  source 1..5419: mol_type = other RNA
aggaaataagagagaaaagaagagtaagaagaaatataagagccaccatggcccctaagaagaagcgtaaagtgagccgggtgaacggcagcggcagcggcggcggcatgaaccacgaccaggagttcgacccccctaaggtgtaccctcccgtccccgccgagaagagaaagcccatccgggtcctgagcctgttcgatggcatcgccaccggtctgctggtgctgaaggacctgggcatccaggtggataggtacattgcctccgaggtgtgcgaggactccatcaccgtgggaatggtgcgtcatcagggcaagatcatgtacgtgggcgacgtgcggagcgtgacacagaagcatatccaggagtggggccctttcgacctggtgatcggcggcagcccttgcaatgacctgagcatcgtgaacccagcccggaagggcctgtacgagggaaccggcagactgttcttcgagttttacagactgctgcacgacgcccggcctaaggaaggcgacgaccggcccttcttttggctgttcgagaatgtggtggccatgggagtcagcgacaagcgggatattagccggttcctggagagcaaccccgtgatgatcgatgccaaggaagtgagcgccgcccaccgggccagatacttctggggcaatctgcctggcatgaacagacccctggccagcaccgtgaacgacaagctggagctgcaggagtgcctggagcacggccggatcgccaagttcagcaaggtgagaaccatcaccacccgaagcaacagcatcaaacaaggcaaggaccagcactttcctgtgttcatgaacgagaaggaggacatcctgtggtgtaccgagatggagagagtgttcgggttcccagtccactacacagatgtcagcaacatgtctagactggccagacagagactgctgggaagaagctggtccgtccctgtgatcagacacctgttcgcccctctgaaggagtacttcgcctgcgtgagcagcggcaacagcaacgccaacagccggggccccagcttctctagcggcctggtgccactgtccctgagagggagccacatgggccccatggagatctacaaaaccgtgagcgcctggaagcggcagcctgtgcgcgtgctgagcctgtttcggaatatcgataaagtcctgaaaagcctgggattcctggagagcggctctggctccggcggtggcaccctgaagtacgtggaggatgtgacaaacgtggtcagacgggatgtggagaagtggggccccttcgatctggtgtacggcagcacccaacccctgggcagctcttgtgaccggtgccctggctggtacatgtttcagttccaccggatcctgcagtacgccctgccgagacaggagtcccagcggccattcttttggattttcatggacaacttgctgctgaccgaggatgaccaggaaactaccactcggttcctgcagaccgaagccgtgaccctgcaggacgtgagaggccgggactaccagaacgccatgcgggtgtggtccaacatccctggactgaaaagcaagcacgcacctctgacccctaaagaagaggagtacctgcaggcccaggtgcggagcagaagcaagctggacgcccctaaggtggatctgctggtgaagaattgcctcctgcccctgagagagtacttcaagtatttcagccagaatagtctgcccctgggcggcccaagcagcggcgcccctcctcccagcggcggcagcccagccggctccccaacctctaccgaggagggcacctctgagtccgccacccccgagagcggccctggcacctccaccgagcccagcgagggcagcgcacccggcagccctgccggcagccccacctccacagaggagggaaccagcaccgagcccagcgaaggcagcgccccaggcaccagcaccgagcctagtgagggcggctctggcggcggcagcgcccaggagattaaacggatcaacaagatcagaagaagacttgtgaaagacagcaacaccaagaaggccggcaagacaggccccatgaaaaccctgctggttagagtgatgacacccgatctgagagagcggctggaaaacctgagaaagaagcctgaaaatatcccccagcccatcagcaatacatctagagccaacctgaataagctgctgaccgattacaccgaaatgaagaaggcgatcctgcatgtgtactgggaagagttccagaaggaccctgtgggcctgatgagccgggtggcccagcctgccagcaagaagatcgatcagaacaagctgaaacctgagatggacgagaagggcaacctgaccaccgccggctttgcctgctctcagtgtggccagcccctgttcgtgtacaagctggagcaggtgtctgagaagggcaaggcttacaccaactacttcggacggtgcaatgtggccgagcacgaaaagctgatcctgctggcccagctgaagcccgagaaggatagcgacgaagccgtgacatatagcctgggaaagtttgggcagagggccctggatttctacagcattcatgtgaccaaggagtccacccaccccgtgaagcccctggcccagatcgccggaaacagatacgcctccggacctgtgggaaaggccctgagcgacgcatgtatgggcacaatcgcctccttcctgtctaagtaccaggacatcatcatcgaacaccagaaggtggtgaagggcaaccagaagagactggagagcctgcgggagctggccggcaaggaaaacctggaataccctagcgtgaccctgccacctcagcctcacaccaaggagggcgttgatgcctacaacgaagtgatcgcccgggtgcgaatgtgggtgaacctgaacctgtggcagaagctgaagctaagcagagatgatgccaagcctctgctgagactgaagggattcccttcctttcctctggtcgagagacaggccaacgaagtggactggtgggacatggtgtgtaacgtgaagaagctgatcaacgagaaaaaggaggatggcaaggtgttttggcagaatctggctggctacaagagacaggaagccctgagaccatacctgagcagcgaggaagatcggaagaagggaaagaaattcgctcggtaccagctgggcgacctgctgctgcacctggaaaagaagcacggcgaggactggggaaaggtgtacgacgaggcctgggagcggattgacaagaaagtggaaggcctgagcaagcacatcaagctggaagaggaacggagaagcgaggacgcccagagcaaggccgccctgaccgactggctgcgggctaaggccagcttcgtgatcgagggcctgaaggaggccgacaaggacgagttctgcagatgcgagctgaagctgcagaagtggtacggggacctgcggggaaagcccttcgccatcgaagccgagaacagcatcctggacatcagcggcttcagcaagcagtacaactgtgccttcatctggcagaaggacggcgtgaagaagctgaacctgtacctgatcatcaactacttcaagggcggcaagctgcggttcaagaagatcaaacctgaagccttcgaagccaacagattctacaccgtgatcaacaaaaagagcggcgagatcgtgcccatggaggtgaacttcaacttcgacgaccccaacctgatcatcctgcctctggcctttggcaagagacagggcagagaattcatctggaacgacctgctgtccctggaaaccggcagcctgaagctggccaacggaagagtgatcgagaagacactgtacaacagaagaacccggcaggatgagcctgccctgttcgtggccctgaccttcgagcggcgggaggtcctggactcctccaatatcaaaccaatgaacctgatcggcgtggcaagaggcgaaaacatccccgccgtgatcgccctgaccgaccccgagggctgcccactgagccggtttaaggatagcctgggaaacccaacccacatcctgagaatcggcgagagctataaggagaagcagcggaccatccaggccaagaaggaggtggagcagcggagagccggcggctacagccggaagtacgccagcaaagccaagaatctggcagacgatatggtgagaaacaccgctagagatctgctgtactacgccgtgacccaggatgccatgctgatcttcgccaacctgagccggggcttcggccggcagggcaagcggaccttcatggccgagagacagtacacacggatggaggactggctgaccgccaagctggcctacgagggcctgagcaagacctacctgtccaagacactggcccagtacacctccaagacatgcagcaactgtgggtttaccatcaccagcgccgactacgacagggtgctggagaagctgaagaagacagcaacaggctggatgaccacaattaacggcaaggagctgaaggtggagggccagattacctactacaacagatacaagagacagaacgtagtcaaggacctgtccgtcgagctggatagactgagcgaagaatctgtgaacaacgacatctcctcctggacaaagggcagaagcggagaagctctgagcctcctgaagaaaagattctcccatagacccgtgcaggagaagttcgtgtgcctgaactgcggcttcgagacacacgcagccgagcaagccgccctgaacatcgccagatcctggctgttcctgcggagccaggagtacaagaaataccagacaaacaagacaaccggcaacaccgataagagagccttcgtcgagacctggcagtccttttaccggaagaagcttaaggaggtgtggaaacctgccgtgcggtctggcggatctggcggaggctccacaagcgcccacgtgagcctgagcttcagggacgtggccatcgacctgagccaggaggagtgggagtgcctggaccccgtgcagagggccctgtacagggacgtgatgctggagaactacagcaacctggtgagcctgggctgcagcagccccaagcccgacgtgatcaccctgctggagcaggagaaggagccctggaccgtgatgagggagggcaccaggagctggtacaccgacctggagagcaagaccagccccaagaaaaagagaaaagtctaagctgccttctgcggggcttgccttctggccatgcccttcttctctcccttgcacctgtacctcttggtctttgaataaagcctgagtaggaaggctagcaaaaaaaaaaaaaaaaaaaaaaaaaaaaaaaaaaaaaaaaaaaaaaaaaaaaaaaaaaaaaaaaaaaaaaaaaaaaaaaa

SEQ ID NO: 3199 - RNA, 5419 nt, synthetic construct
  source 1..5419: mol_type = other RNA
aggaaataagagagaaaagaagagtaagaagaaatataagagccaccatggcccctaagaagaagcgtaaagtgagccgggtgaacggcagcggcagcggcggcggcatgaaccacgaccaggagttcgacccccctaaggtgtaccctcccgtccccgccgagaagagaaagcccatccgggtcctgagcctgttcgatggcatcgccaccggtctgctggtgctgaaggacctgggcatccaggtggataggtacattgcctccgaggtgtgcgaggactccatcaccgtgggaatggtgcgtcatcagggcaagatcatgtacgtgggcgacgtgcggagcgtgacacagaagcatatccaggagtggggccctttcgacctggtgatcggcggcagcccttgcaatgacctgagcatcgtgaacccagcccggaagggcctgtacgagggaaccggcagactgttcttcgagttttacagactgctgcacgacgcccggcctaaggaaggcgacgaccggcccttcttttggctgttcgagaatgtggtggccatgggagtcagcgacaagcgggatattagccggttcctggagagcaaccccgtgatgatcgatgccaaggaagtgagcgccgcccaccgggccagatacttctggggcaatctgcctggcatgaacagacccctggccagcaccgtgaacgacaagctggagctgcaggagtgcctggagcacggccggatcgccaagttcagcaaggtgagaaccatcaccacccgaagcaacagcatcaaacaaggcaaggaccagcactttcctgtgttcatgaacgagaaggaggacatcctgtggtgtaccgagatggagagagtgttcgggttcccagtccactacacagatgtcagcaacatgtctagactggccagacagagactgctgggaagaagctggtccgtccctgtgatcagacacctgttcgcccctctgaaggagtacttcgcctgcgtgagcagcggcaacagcaacgccaacagccggggccccagcttctctagcggcctggtgccactgtccctgagagggagccacatgggccccatggagatctacaaaaccgtgagcgcctggaagcggcagcctgtgcgcgtgctgagcctgtttcggaatatcgataaagtcctgaaaagcctgggattcctggagagcggctctggctccggcggtggcaccctgaagtacgtggaggatgtgacaaacgtggtcagacgggatgtggagaagtggggccccttcgatctggtgtacggcagcacccaacccctgggcagctcttgtgaccggtgccctggctggtacatgtttcagttccaccggatcctgcagtacgccctgccgagacaggagtcccagcggccattcttttggattttcatggacaacttgctgctgaccgaggatgaccaggaaactaccactcggttcctgcagaccgaagccgtgaccctgcaggacgtgagaggccgggactaccagaacgccatgcgggtgtggtccaacatccctggactgaaaagcaagcacgcacctctgacccctaaagaagaggagtacctgcaggcccaggtgcggagcagaagcaagctggacgcccctaaggtggatctgctggtgaagaattgcctcctgcccctgagagagtacttcaagtatttcagccagaatagtctgcccctgggcggcccaagcagcggcgcccctcctcccagcggcggcagcccagccggctccccaacctctaccgaggagggcacctctgagtccgccacccccgagagcggccctggcacctccaccgagcccagcgagggcagcgcacccggcagccctgccggcagccccacctccacagaggagggaaccagcaccgagcccagcgaaggcagcgccccaggcaccagcaccgagcctagtgagggcggctctggcggcggcagcgcccaggagattaaacggatcaacaagatcagaagaagacttgtgaaagacagcaacaccaagaaggccggcaagacaggccccatgaaaaccctgctggttagagtgatgacacccgatctgagagagcggctggaaaacctgagaaagaagcctgaaaatatcccccagcccatcagcaatacatctagagccaacctgaataagctgctgaccgattacaccgaaatgaagaaggcgatcctgcatgtgtactgggaagagttccagaaggaccctgtgggcctgatgagccgggtggcccagcctgccagcaagaagatcgatcagaacaagctgaaacctgagatggacgagaagggcaacctgaccaccgccggctttgcctgctctcagtgtggccagcccctgttcgtgtacaagctggagcaggtgtctgagaagggcaaggcttacaccaactacttcggacggtgcaatgtggccgagcacgaaaagctgatcctgctggcccagctgaagcccgagaaggatagcgacgaagccgtgacatatagcctgggaaagtttgggcagagggccctggatttctacagcattcatgtgaccaaggagtccacccaccccgtgaagcccctggcccagatcgccggaaacagatacgcctccggacctgtgggaaaggccctgagcgacgcatgtatgggcacaatcgcctccttcctgtctaagtaccaggacatcatcatcgaacaccagaaggtggtgaagggcaaccagaagagactggagagcctgcgggagctggccggcaaggaaaacctggaataccctagcgtgaccctgccacctcagcctcacaccaaggagggcgttgatgcctacaacgaagtgatcgcccgggtgcgaatgtgggtgaacctgaacctgtggcagaagctgaagctaagcagagatgatgccaagcctctgctgagactgaagggattcccttcctttcctctggtcgagagacaggccaacgaagtggactggtgggacatggtgtgtaacgtgaagaagctgatcaacgagaaaaaggaggatggcaaggtgttttggcagaatctggctggctacaagagacaggaagccctgagaccatacctgagcagcgaggaagatcggaagaagggaaagaaattcgctcggtaccagctgggcgacctgctgctgcacctggaaaagaagcacggcgaggactggggaaaggtgtacgacgaggcctgggagcggattgacaagaaagtggaaggcctgagcaagcacatcaagctggaagaggaacggagaagcgaggacgcccagagcaaggccgccctgaccgactggctgcgggctaaggccagcttcgtgatcgagggcctgaaggaggccgacaaggacgagttctgcagatgcgagctgaagctgcagaagtggtacggggacctgcggggaaagcccttcgccatcgaagccgagaacagcatcctggacatcagcggcttcagcaagcagtacaactgtgccttcatctggcagaaggacggcgtgaagaagctgaacctgtacctgatcatcaactacttcaagggcggcaagctgcggttcaagaagatcaaacctgaagccttcgaagccaacagattctacaccgtgatcaacaaaaagagcggcgagatcgtgcccatggaggtgaacttcaacttcgacgaccccaacctgatcatcctgcctctggcctttggcaagagacagggcagagaattcatctggaacgacctgctgtccctggaaaccggcagcctgaagctggccaacggaagagtgatcgagaagacactgtacaacagaagaacccggcaggatgagcctgccctgttcgtggccctgaccttcgagcggcgggaggtcctggactcctccaatatcaaaccaatgaacctgatcggcgtggcaagaggcgaaaacatccccgccgtgatcgccctgaccgaccccgagggctgcccactgagccggtttaaggatagcctgggaaacccaacccacatcctgagaatcggcgagagctataaggagaagcagcggaccatccaggccaagaaggaggtggagcagcggagagccggcggctacagccggaagtacgccagcaaagccaagaatctggcagacgatatggtgagaaacaccgctagagatctgctgtactacgccgtgacccaggatgccatgctgatcttcgccaacctgagccggggcttcggccggcagggcaagcggaccttcatggccgagagacagtacacacggatggaggactggctgaccgccaagctggcctacgagggcctgagcaagacctacctgtccaagacactggcccagtacacctccaagacatgcagcaactgtgggtttaccatcaccagcgccgactacgacagggtgctggagaagctgaagaagacagcaacaggctggatgaccacaattaacggcaaggagctgaaggtggagggccagattacctactacaacagatacaagagacagaacgtagtcaaggacctgtccgtcgagctggatagactgagcgaagaatctgtgaacaacgacatctcctcctggacaaagggcagaagcggagaagctctgagcctcctgaagaaaagattctcccatagacccgtgcaggagaagttcgtgtgcctgaactgcggcttcgagacacacgcagccgagcaagccgccctgaacatcgccagatcctggctgttcctgcggagccaggagtacaagaaataccagacaaacaagacaaccggcaacaccgataagagagccttcgtcgagacctggcagtccttttaccggaagaagcttaaggaggtgtggaaacctgccgtgcggtctggcggatctggcggaggctccacaagccaccagggcctgctgaccttcagggacgtggccgtggagttcagcctggaggagtggggcaggctgacccacacccagaggcagctgtacagggacgtgatgctggagaactacggccacctgctgttcctgggcctgatcgtgagcaagcccgacctggtgagcttcctggagcagaagaaggagccctggaacctgaagaggaagaagaccgtggccttccaccccgccatcagcagccacaccagccccaagaaaaagagaaaagtctaagctgccttctgcggggcttgccttctggccatgcccttcttctctcccttgcacctgtacctcttggtctttgaataaagcctgagtaggaaggctagcaaaaaaaaaaaaaaaaaaaaaaaaaaaaaaaaaaaaaaaaaaaaaaaaaaaaaaaaaaaaaaaaaaaaaaaaaaaaaaaa

SEQ ID NO: 3200 - RNA, 5419 nt, synthetic construct
  source 1..5419: mol_type = other RNA
aggaaataagagagaaaagaagagtaagaagaaatataagagccaccatggcccctaagaagaagcgtaaagtgagccgggtgaacggcagcggcagcggcggcggcatgaaccacgaccaggagttcgacccccctaaggtgtaccctcccgtccccgccgagaagagaaagcccatccgggtcctgagcctgttcgatggcatcgccaccggtctgctggtgctgaaggacctgggcatccaggtggataggtacattgcctccgaggtgtgcgaggactccatcaccgtgggaatggtgcgtcatcagggcaagatcatgtacgtgggcgacgtgcggagcgtgacacagaagcatatccaggagtggggccctttcgacctggtgatcggcggcagcccttgcaatgacctgagcatcgtgaacccagcccggaagggcctgtacgagggaaccggcagactgttcttcgagttttacagactgctgcacgacgcccggcctaaggaaggcgacgaccggcccttcttttggctgttcgagaatgtggtggccatgggagtcagcgacaagcgggatattagccggttcctggagagcaaccccgtgatgatcgatgccaaggaagtgagcgccgcccaccgggccagatacttctggggcaatctgcctggcatgaacagacccctggccagcaccgtgaacgacaagctggagctgcaggagtgcctggagcacggccggatcgccaagttcagcaaggtgagaaccatcaccacccgaagcaacagcatcaaacaaggcaaggaccagcactttcctgtgttcatgaacgagaaggaggacatcctgtggtgtaccgagatggagagagtgttcgggttcccagtccactacacagatgtcagcaacatgtctagactggccagacagagactgctgggaagaagctggtccgtccctgtgatcagacacctgttcgcccctctgaaggagtacttcgcctgcgtgagcagcggcaacagcaacgccaacagccggggccccagcttctctagcggcctggtgccactgtccctgagagggagccacatgggccccatggagatctacaaaaccgtgagcgcctggaagcggcagcctgtgcgcgtgctgagcctgtttcggaatatcgataaagtcctgaaaagcctgggattcctggagagcggctctggctccggcggtggcaccctgaagtacgtggaggatgtgacaaacgtggtcagacgggatgtggagaagtggggccccttcgatctggtgtacggcagcacccaacccctgggcagctcttgtgaccggtgccctggctggtacatgtttcagttccaccggatcctgcagtacgccctgccgagacaggagtcccagcggccattcttttggattttcatggacaacttgctgctgaccgaggatgaccaggaaactaccactcggttcctgcagaccgaagccgtgaccctgcaggacgtgagaggccgggactaccagaacgccatgcgggtgtggtccaacatccctggactgaaaagcaagcacgcacctctgacccctaaagaagaggagtacctgcaggcccaggtgcggagcagaagcaagctggacgcccctaaggtggatctgctggtgaagaattgcctcctgcccctgagagagtacttcaagtatttcagccagaatagtctgcccctgggcggcccaagcagcggcgcccctcctcccagcggcggcagcccagccggctccccaacctctaccgaggagggcacctctgagtccgccacccccgagagcggccctggcacctccaccgagcccagcgagggcagcgcacccggcagccctgccggcagccccacctccacagaggagggaaccagcaccgagcccagcgaaggcagcgccccaggcaccagcaccgagcctagtgagggcggctctggcggcggcagcgcccaggagattaaacggatcaacaagatcagaagaagacttgtgaaagacagcaacaccaagaaggccggcaagacaggccccatgaaaaccctgctggttagagtgatgacacccgatctgagagagcggctggaaaacctgagaaagaagcctgaaaatatcccccagcccatcagcaatacatctagagccaacctgaataagctgctgaccgattacaccgaaatgaagaaggcgatcctgcatgtgtactgggaagagttccagaaggaccctgtgggcctgatgagccgggtggcccagcctgccagcaagaagatcgatcagaacaagctgaaacctgagatggacgagaagggcaacctgaccaccgccggctttgcctgctctcagtgtggccagcccctgttcgtgtacaagctggagcaggtgtctgagaagggcaaggcttacaccaactacttcggacggtgcaatgtggccgagcacgaaaagctgatcctgctggcccagctgaagcccgagaaggatagcgacgaagccgtgacatatagcctgggaaagtttgggcagagggccctggatttctacagcattcatgtgaccaaggagtccacccaccccgtgaagcccctggcccagatcgccggaaacagatacgcctccggacctgtgggaaaggccctgagcgacgcatgtatgggcacaatcgcctccttcctgtctaagtaccaggacatcatcatcgaacaccagaaggtggtgaagggcaaccagaagagactggagagcctgcgggagctggccggcaaggaaaacctggaataccctagcgtgaccctgccacctcagcctcacaccaaggagggcgttgatgcctacaacgaagtgatcgcccgggtgcgaatgtgggtgaacctgaacctgtggcagaagctgaagctaagcagagatgatgccaagcctctgctgagactgaagggattcccttcctttcctctggtcgagagacaggccaacgaagtggactggtgggacatggtgtgtaacgtgaagaagctgatcaacgagaaaaaggaggatggcaaggtgttttggcagaatctggctggctacaagagacaggaagccctgagaccatacctgagcagcgaggaagatcggaagaagggaaagaaattcgctcggtaccagctgggcgacctgctgctgcacctggaaaagaagcacggcgaggactggggaaaggtgtacgacgaggcctgggagcggattgacaagaaagtggaaggcctgagcaagcacatcaagctggaagaggaacggagaagcgaggacgcccagagcaaggccgccctgaccgactggctgcgggctaaggccagcttcgtgatcgagggcctgaaggaggccgacaaggacgagttctgcagatgcgagctgaagctgcagaagtggtacggggacctgcggggaaagcccttcgccatcgaagccgagaacagcatcctggacatcagcggcttcagcaagcagtacaactgtgccttcatctggcagaaggacggcgtgaagaagctgaacctgtacctgatcatcaactacttcaagggcggcaagctgcggttcaagaagatcaaacctgaagccttcgaagccaacagattctacaccgtgatcaacaaaaagagcggcgagatcgtgcccatggaggtgaacttcaacttcgacgaccccaacctgatcatcctgcctctggcctttggcaagagacagggcagagaattcatctggaacgacctgctgtccctggaaaccggcagcctgaagctggccaacggaagagtgatcgagaagacactgtacaacagaagaacccggcaggatgagcctgccctgttcgtggccctgaccttcgagcggcgggaggtcctggactcctccaatatcaaaccaatgaacctgatcggcgtggcaagaggcgaaaacatccccgccgtgatcgccctgaccgaccccgagggctgcccactgagccggtttaaggatagcctgggaaacccaacccacatcctgagaatcggcgagagctataaggagaagcagcggaccatccaggccaagaaggaggtggagcagcggagagccggcggctacagccggaagtacgccagcaaagccaagaatctggcagacgatatggtgagaaacaccgctagagatctgctgtactacgccgtgacccaggatgccatgctgatcttcgccaacctgagccggggcttcggccggcagggcaagcggaccttcatggccgagagacagtacacacggatggaggactggctgaccgccaagctggcctacgagggcctgagcaagacctacctgtccaagacactggcccagtacacctccaagacatgcagcaactgtgggtttaccatcaccagcgccgactacgacagggtgctggagaagctgaagaagacagcaacaggctggatgaccacaattaacggcaaggagctgaaggtggagggccagattacctactacaacagatacaagagacagaacgtagtcaaggacctgtccgtcgagctggatagactgagcgaagaatctgtgaacaacgacatctcctcctggacaaagggcagaagcggagaagctctgagcctcctgaagaaaagattctcccatagacccgtgcaggagaagttcgtgtgcctgaactgcggcttcgagacacacgcagccgagcaagccgccctgaacatcgccagatcctggctgttcctgcggagccaggagtacaagaaataccagacaaacaagacaaccggcaacaccgataagagagccttcgtcgagacctggcagtccttttaccggaagaagcttaaggaggtgtggaaacctgccgtgcggtctggcggatctggcggaggctccacaagcagcgtggagatgctgagcttcagggacgtggccatcgacttcagcgccggcgagctggagtgcctggagcccgcccagtgggacctgtacagggacgtgatgctggagaacttcagccacctggtgttcctgggcttcagcttcagcaagcccctgctggtgaggttcctggagaagaaccaggagctgaggaacgtgaagaggaaggccgccaccgtgcccaggggcaagaagccctacaagaccagccccaagaaaaagagaaaagtctaagctgccttctgcggggcttgccttctggccatgcccttcttctctcccttgcacctgtacctcttggtctttgaataaagcctgagtaggaaggctagcaaaaaaaaaaaaaaaaaaaaaaaaaaaaaaaaaaaaaaaaaaaaaaaaaaaaaaaaaaaaaaaaaaaaaaaaaaaaaaaa

SEQ ID NO: 3201 - RNA, 5419 nt, synthetic construct
  source 1..5419: mol_type = other RNA
aggaaataagagagaaaagaagagtaagaagaaatataagagccaccatggcccctaagaagaagcgtaaagtgagccgggtgaacggcagcggcagcggcggcggcatgaaccacgaccaggagttcgacccccctaaggtgtaccctcccgtccccgccgagaagagaaagcccatccgggtcctgagcctgttcgatggcatcgccaccggtctgctggtgctgaaggacctgggcatccaggtggataggtacattgcctccgaggtgtgcgaggactccatcaccgtgggaatggtgcgtcatcagggcaagatcatgtacgtgggcgacgtgcggagcgtgacacagaagcatatccaggagtggggccctttcgacctggtgatcggcggcagcccttgcaatgacctgagcatcgtgaacccagcccggaagggcctgtacgagggaaccggcagactgttcttcgagttttacagactgctgcacgacgcccggcctaaggaaggcgacgaccggcccttcttttggctgttcgagaatgtggtggccatgggagtcagcgacaagcgggatattagccggttcctggagagcaaccccgtgatgatcgatgccaaggaagtgagcgccgcccaccgggccagatacttctggggcaatctgcctggcatgaacagacccctggccagcaccgtgaacgacaagctggagctgcaggagtgcctggagcacggccggatcgccaagttcagcaaggtgagaaccatcaccacccgaagcaacagcatcaaacaaggcaaggaccagcactttcctgtgttcatgaacgagaaggaggacatcctgtggtgtaccgagatggagagagtgttcgggttcccagtccactacacagatgtcagcaacatgtctagactggccagacagagactgctgggaagaagctggtccgtccctgtgatcagacacctgttcgcccctctgaaggagtacttcgcctgcgtgagcagcggcaacagcaacgccaacagccggggccccagcttctctagcggcctggtgccactgtccctgagagggagccacatgggccccatggagatctacaaaaccgtgagcgcctggaagcggcagcctgtgcgcgtgctgagcctgtttcggaatatcgataaagtcctgaaaagcctgggattcctggagagcggctctggctccggcggtggcaccctgaagtacgtggaggatgtgacaaacgtggtcagacgggatgtggagaagtggggccccttcgatctggtgtacggcagcacccaacccctgggcagctcttgtgaccggtgccctggctggtacatgtttcagttccaccggatcctgcagtacgccctgccgagacaggagtcccagcggccattcttttggattttcatggacaacttgctgctgaccgaggatgaccaggaaactaccactcggttcctgcagaccgaagccgtgaccctgcaggacgtgagaggccgggactaccagaacgccatgcgggtgtggtccaacatccctggactgaaaagcaagcacgcacctctgacccctaaagaagaggagtacctgcaggcccaggtgcggagcagaagcaagctggacgcccctaaggtggatctgctggtgaagaattgcctcctgcccctgagagagtacttcaagtatttcagccagaatagtctgcccctgggcggcccaagcagcggcgcccctcctcccagcggcggcagcccagccggctccccaacctctaccgaggagggcacctctgagtccgccacccccgagagcggccctggcacctccaccgagcccagcgagggcagcgcacccggcagccctgccggcagccccacctccacagaggagggaaccagcaccgagcccagcgaaggcagcgccccaggcaccagcaccgagcctagtgagggcggctctggcggcggcagcgcccaggagattaaacggatcaacaagatcagaagaagacttgtgaaagacagcaacaccaagaaggccggcaagacaggccccatgaaaaccctgctggttagagtgatgacacccgatctgagagagcggctggaaaacctgagaaagaagcctgaaaatatcccccagcccatcagcaatacatctagagccaacctgaataagctgctgaccgattacaccgaaatgaagaaggcgatcctgcatgtgtactgggaagagttccagaaggaccctgtgggcctgatgagccgggtggcccagcctgccagcaagaagatcgatcagaacaagctgaaacctgagatggacgagaagggcaacctgaccaccgccggctttgcctgctctcagtgtggccagcccctgttcgtgtacaagctggagcaggtgtctgagaagggcaaggcttacaccaactacttcggacggtgcaatgtggccgagcacgaaaagctgatcctgctggcccagctgaagcccgagaaggatagcgacgaagccgtgacatatagcctgggaaagtttgggcagagggccctggatttctacagcattcatgtgaccaaggagtccacccaccccgtgaagcccctggcccagatcgccggaaacagatacgcctccggacctgtgggaaaggccctgagcgacgcatgtatgggcacaatcgcctccttcctgtctaagtaccaggacatcatcatcgaacaccagaaggtggtgaagggcaaccagaagagactggagagcctgcgggagctggccggcaaggaaaacctggaataccctagcgtgaccctgccacctcagcctcacaccaaggagggcgttgatgcctacaacgaagtgatcgcccgggtgcgaatgtgggtgaacctgaacctgtggcagaagctgaagctaagcagagatgatgccaagcctctgctgagactgaagggattcccttcctttcctctggtcgagagacaggccaacgaagtggactggtgggacatggtgtgtaacgtgaagaagctgatcaacgagaaaaaggaggatggcaaggtgttttggcagaatctggctggctacaagagacaggaagccctgagaccatacctgagcagcgaggaagatcggaagaagggaaagaaattcgctcggtaccagctgggcgacctgctgctgcacctggaaaagaagcacggcgaggactggggaaaggtgtacgacgaggcctgggagcggattgacaagaaagtggaaggcctgagcaagcacatcaagctggaagaggaacggagaagcgaggacgcccagagcaaggccgccctgaccgactggctgcgggctaaggccagcttcgtgatcgagggcctgaaggaggccgacaaggacgagttctgcagatgcgagctgaagctgcagaagtggtacggggacctgcggggaaagcccttcgccatcgaagccgagaacagcatcctggacatcagcggcttcagcaagcagtacaactgtgccttcatctggcagaaggacggcgtgaagaagctgaacctgtacctgatcatcaactacttcaagggcggcaagctgcggttcaagaagatcaaacctgaagccttcgaagccaacagattctacaccgtgatcaacaaaaagagcggcgagatcgtgcccatggaggtgaacttcaacttcgacgaccccaacctgatcatcctgcctctggcctttggcaagagacagggcagagaattcatctggaacgacctgctgtccctggaaaccggcagcctgaagctggccaacggaagagtgatcgagaagacactgtacaacagaagaacccggcaggatgagcctgccctgttcgtggccctgaccttcgagcggcgggaggtcctggactcctccaatatcaaaccaatgaacctgatcggcgtggcaagaggcgaaaacatccccgccgtgatcgccctgaccgaccccgagggctgcccactgagccggtttaaggatagcctgggaaacccaacccacatcctgagaatcggcgagagctataaggagaagcagcggaccatccaggccaagaaggaggtggagcagcggagagccggcggctacagccggaagtacgccagcaaagccaagaatctggcagacgatatggtgagaaacaccgctagagatctgctgtactacgccgtgacccaggatgccatgctgatcttcgccaacctgagccggggcttcggccggcagggcaagcggaccttcatggccgagagacagtacacacggatggaggactggctgaccgccaagctggcctacgagggcctgagcaagacctacctgtccaagacactggcccagtacacctccaagacatgcagcaactgtgggtttaccatcaccagcgccgactacgacagggtgctggagaagctgaagaagacagcaacaggctggatgaccacaattaacggcaaggagctgaaggtggagggccagattacctactacaacagatacaagagacagaacgtagtcaaggacctgtccgtcgagctggatagactgagcgaagaatctgtgaacaacgacatctcctcctggacaaagggcagaagcggagaagctctgagcctcctgaagaaaagattctcccatagacccgtgcaggagaagttcgtgtgcctgaactgcggcttcgagacacacgcagccgagcaagccgccctgaacatcgccagatcctggctgttcctgcggagccaggagtacaagaaataccagacaaacaagacaaccggcaacaccgataagagagccttcgtcgagacctggcagtccttttaccggaagaagcttaaggaggtgtggaaacctgccgtgcggtctggcggatctggcggaggctccacaagcagccaggagagcgtgagcttcgaggacgtggccgtgtacttcacccagaaccagtgggccagcctggacagcgcccagaggaccctgtacagggaggtgatgctggagaactacgccaacgtgaccagcctggccgccttccccttccccaagcccgacctgatcttccagctggagaggggcaaggcccccggcggcctggacccctggacccccatcaggaggaaggtgaggggcgtgtgcaccagccccaagaaaaagagaaaagtctaagctgccttctgcggggcttgccttctggccatgcccttcttctctcccttgcacctgtacctcttggtctttgaataaagcctgagtaggaaggctagcaaaaaaaaaaaaaaaaaaaaaaaaaaaaaaaaaaaaaaaaaaaaaaaaaaaaaaaaaaaaaaaaaaaaaaaaaaaaaaaa

SEQ ID NO: 3202 - RNA, 5419 nt, synthetic construct
  source 1..5419: mol_type = other RNA
aggaaataagagagaaaagaagagtaagaagaaatataagagccaccatggcccctaagaagaagcgtaaagtgagccgggtgaacggcagcggcagcggcggcggcatgaaccacgaccaggagttcgacccccctaaggtgtaccctcccgtccccgccgagaagagaaagcccatccgggtcctgagcctgttcgatggcatcgccaccggtctgctggtgctgaaggacctgggcatccaggtggataggtacattgcctccgaggtgtgcgaggactccatcaccgtgggaatggtgcgtcatcagggcaagatcatgtacgtgggcgacgtgcggagcgtgacacagaagcatatccaggagtggggccctttcgacctggtgatcggcggcagcccttgcaatgacctgagcatcgtgaacccagcccggaagggcctgtacgagggaaccggcagactgttcttcgagttttacagactgctgcacgacgcccggcctaaggaaggcgacgaccggcccttcttttggctgttcgagaatgtggtggccatgggagtcagcgacaagcgggatattagccggttcctggagagcaaccccgtgatgatcgatgccaaggaagtgagcgccgcccaccgggccagatacttctggggcaatctgcctggcatgaacagacccctggccagcaccgtgaacgacaagctggagctgcaggagtgcctggagcacggccggatcgccaagttcagcaaggtgagaaccatcaccacccgaagcaacagcatcaaacaaggcaaggaccagcactttcctgtgttcatgaacgagaaggaggacatcctgtggtgtaccgagatggagagagtgttcgggttcccagtccactacacagatgtcagcaacatgtctagactggccagacagagactgctgggaagaagctggtccgtccctgtgatcagacacctgttcgcccctctgaaggagtacttcgcctgcgtgagcagcggcaacagcaacgccaacagccggggccccagcttctctagcggcctggtgccactgtccctgagagggagccacatgggccccatggagatctacaaaaccgtgagcgcctggaagcggcagcctgtgcgcgtgctgagcctgtttcggaatatcgataaagtcctgaaaagcctgggattcctggagagcggctctggctccggcggtggcaccctgaagtacgtggaggatgtgacaaacgtggtcagacgggatgtggagaagtggggccccttcgatctggtgtacggcagcacccaacccctgggcagctcttgtgaccggtgccctggctggtacatgtttcagttccaccggatcctgcagtacgccctgccgagacaggagtcccagcggccattcttttggattttcatggacaacttgctgctgaccgaggatgaccaggaaactaccactcggttcctgcagaccgaagccgtgaccctgcaggacgtgagaggccgggactaccagaacgccatgcgggtgtggtccaacatccctggactgaaaagcaagcacgcacctctgacccctaaagaagaggagtacctgcaggcccaggtgcggagcagaagcaagctggacgcccctaaggtggatctgctggtgaagaattgcctcctgcccctgagagagtacttcaagtatttcagccagaatagtctgcccctgggcggcccaagcagcggcgcccctcctcccagcggcggcagcccagccggctccccaacctctaccgaggagggcacctctgagtccgccacccccgagagcggccctggcacctccaccgagcccagcgagggcagcgcacccggcagccctgccggcagccccacctccacagaggagggaaccagcaccgagcccagcgaaggcagcgccccaggcaccagcaccgagcctagtgagggcggctctggcggcggcagcgcccaggagattaaacggatcaacaagatcagaagaagacttgtgaaagacagcaacaccaagaaggccggcaagacaggccccatgaaaaccctgctggttagagtgatgacacccgatctgagagagcggctggaaaacctgagaaagaagcctgaaaatatcccccagcccatcagcaatacatctagagccaacctgaataagctgctgaccgattacaccgaaatgaagaaggcgatcctgcatgtgtactgggaagagttccagaaggaccctgtgggcctgatgagccgggtggcccagcctgccagcaagaagatcgatcagaacaagctgaaacctgagatggacgagaagggcaacctgaccaccgccggctttgcctgctctcagtgtggccagcccctgttcgtgtacaagctggagcaggtgtctgagaagggcaaggcttacaccaactacttcggacggtgcaatgtggccgagcacgaaaagctgatcctgctggcccagctgaagcccgagaaggatagcgacgaagccgtgacatatagcctgggaaagtttgggcagagggccctggatttctacagcattcatgtgaccaaggagtccacccaccccgtgaagcccctggcccagatcgccggaaacagatacgcctccggacctgtgggaaaggccctgagcgacgcatgtatgggcacaatcgcctccttcctgtctaagtaccaggacatcatcatcgaacaccagaaggtggtgaagggcaaccagaagagactggagagcctgcgggagctggccggcaaggaaaacctggaataccctagcgtgaccctgccacctcagcctcacaccaaggagggcgttgatgcctacaacgaagtgatcgcccgggtgcgaatgtgggtgaacctgaacctgtggcagaagctgaagctaagcagagatgatgccaagcctctgctgagactgaagggattcccttcctttcctctggtcgagagacaggccaacgaagtggactggtgggacatggtgtgtaacgtgaagaagctgatcaacgagaaaaaggaggatggcaaggtgttttggcagaatctggctggctacaagagacaggaagccctgagaccatacctgagcagcgaggaagatcggaagaagggaaagaaattcgctcggtaccagctgggcgacctgctgctgcacctggaaaagaagcacggcgaggactggggaaaggtgtacgacgaggcctgggagcggattgacaagaaagtggaaggcctgagcaagcacatcaagctggaagaggaacggagaagcgaggacgcccagagcaaggccgccctgaccgactggctgcgggctaaggccagcttcgtgatcgagggcctgaaggaggccgacaaggacgagttctgcagatgcgagctgaagctgcagaagtggtacggggacctgcggggaaagcccttcgccatcgaagccgagaacagcatcctggacatcagcggcttcagcaagcagtacaactgtgccttcatctggcagaaggacggcgtgaagaagctgaacctgtacctgatcatcaactacttcaagggcggcaagctgcggttcaagaagatcaaacctgaagccttcgaagccaacagattctacaccgtgatcaacaaaaagagcggcgagatcgtgcccatggaggtgaacttcaacttcgacgaccccaacctgatcatcctgcctctggcctttggcaagagacagggcagagaattcatctggaacgacctgctgtccctggaaaccggcagcctgaagctggccaacggaagagtgatcgagaagacactgtacaacagaagaacccggcaggatgagcctgccctgttcgtggccctgaccttcgagcggcgggaggtcctggactcctccaatatcaaaccaatgaacctgatcggcgtggcaagaggcgaaaacatccccgccgtgatcgccctgaccgaccccgagggctgcccactgagccggtttaaggatagcctgggaaacccaacccacatcctgagaatcggcgagagctataaggagaagcagcggaccatccaggccaagaaggaggtggagcagcggagagccggcggctacagccggaagtacgccagcaaagccaagaatctggcagacgatatggtgagaaacaccgctagagatctgctgtactacgccgtgacccaggatgccatgctgatcttcgccaacctgagccggggcttcggccggcagggcaagcggaccttcatggccgagagacagtacacacggatggaggactggctgaccgccaagctggcctacgagggcctgagcaagacctacctgtccaagacactggcccagtacacctccaagacatgcagcaactgtgggtttaccatcaccagcgccgactacgacagggtgctggagaagctgaagaagacagcaacaggctggatgaccacaattaacggcaaggagctgaaggtggagggccagattacctactacaacagatacaagagacagaacgtagtcaaggacctgtccgtcgagctggatagactgagcgaagaatctgtgaacaacgacatctcctcctggacaaagggcagaagcggagaagctctgagcctcctgaagaaaagattctcccatagacccgtgcaggagaagttcgtgtgcctgaactgcggcttcgagacacacgcagccgagcaagccgccctgaacatcgccagatcctggctgttcctgcggagccaggagtacaagaaataccagacaaacaagacaaccggcaacaccgataagagagccttcgtcgagacctggcagtccttttaccggaagaagcttaaggaggtgtggaaacctgccgtgcggtctggcggatctggcggaggctccacaagcgcccaggagagcgtgatgttcagcgacgtgagcatcgacttcagccaggaggagtgggagtacctgaacgacgaccagagggacctgtacagggaggtgatgctggagaactacagcaacctggtgagcatggccggccacagcatcagcaagcccgacgtgatcagcttcctggagcagggcaaggagccctggctggtggacagggagctgaccagggaccagtggcccgtgctggagagcaccagccccaagaaaaagagaaaagtctaagctgccttctgcggggcttgccttctggccatgcccttcttctctcccttgcacctgtacctcttggtctttgaataaagcctgagtaggaaggctagcaaaaaaaaaaaaaaaaaaaaaaaaaaaaaaaaaaaaaaaaaaaaaaaaaaaaaaaaaaaaaaaaaaaaaaaaaaaaaaaa

SEQ ID NO: 3203 - RNA, 5419 nt, synthetic construct
  source 1..5419: mol_type = other RNA
aggaaataagagagaaaagaagagtaagaagaaatataagagccaccatggcccctaagaagaagcgtaaagtgagccgggtgaacggcagcggcagcggcggcggcatgaaccacgaccaggagttcgacccccctaaggtgtaccctcccgtccccgccgagaagagaaagcccatccgggtcctgagcctgttcgatggcatcgccaccggtctgctggtgctgaaggacctgggcatccaggtggataggtacattgcctccgaggtgtgcgaggactccatcaccgtgggaatggtgcgtcatcagggcaagatcatgtacgtgggcgacgtgcggagcgtgacacagaagcatatccaggagtggggccctttcgacctggtgatcggcggcagcccttgcaatgacctgagcatcgtgaacccagcccggaagggcctgtacgagggaaccggcagactgttcttcgagttttacagactgctgcacgacgcccggcctaaggaaggcgacgaccggcccttcttttggctgttcgagaatgtggtggccatgggagtcagcgacaagcgggatattagccggttcctggagagcaaccccgtgatgatcgatgccaaggaagtgagcgccgcccaccgggccagatacttctggggcaatctgcctggcatgaacagacccctggccagcaccgtgaacgacaagctggagctgcaggagtgcctggagcacggccggatcgccaagttcagcaaggtgagaaccatcaccacccgaagcaacagcatcaaacaaggcaaggaccagcactttcctgtgttcatgaacgagaaggaggacatcctgtggtgtaccgagatggagagagtgttcgggttcccagtccactacacagatgtcagcaacatgtctagactggccagacagagactgctgggaagaagctggtccgtccctgtgatcagacacctgttcgcccctctgaaggagtacttcgcctgcgtgagcagcggcaacagcaacgccaacagccggggccccagcttctctagcggcctggtgccactgtccctgagagggagccacatgggccccatggagatctacaaaaccgtgagcgcctggaagcggcagcctgtgcgcgtgctgagcctgtttcggaatatcgataaagtcctgaaaagcctgggattcctggagagcggctctggctccggcggtggcaccctgaagtacgtggaggatgtgacaaacgtggtcagacgggatgtggagaagtggggccccttcgatctggtgtacggcagcacccaacccctgggcagctcttgtgaccggtgccctggctggtacatgtttcagttccaccggatcctgcagtacgccctgccgagacaggagtcccagcggccattcttttggattttcatggacaacttgctgctgaccgaggatgaccaggaaactaccactcggttcctgcagaccgaagccgtgaccctgcaggacgtgagaggccgggactaccagaacgccatgcgggtgtggtccaacatccctggactgaaaagcaagcacgcacctctgacccctaaagaagaggagtacctgcaggcccaggtgcggagcagaagcaagctggacgcccctaaggtggatctgctggtgaagaattgcctcctgcccctgagagagtacttcaagtatttcagccagaatagtctgcccctgggcggcccaagcagcggcgcccctcctcccagcggcggcagcccagccggctccccaacctctaccgaggagggcacctctgagtccgccacccccgagagcggccctggcacctccaccgagcccagcgagggcagcgcacccggcagccctgccggcagccccacctccacagaggagggaaccagcaccgagcccagcgaaggcagcgccccaggcaccagcaccgagcctagtgagggcggctctggcggcggcagcgcccaggagattaaacggatcaacaagatcagaagaagacttgtgaaagacagcaacaccaagaaggccggcaagacaggccccatgaaaaccctgctggttagagtgatgacacccgatctgagagagcggctggaaaacctgagaaagaagcctgaaaatatcccccagcccatcagcaatacatctagagccaacctgaataagctgctgaccgattacaccgaaatgaagaaggcgatcctgcatgtgtactgggaagagttccagaaggaccctgtgggcctgatgagccgggtggcccagcctgccagcaagaagatcgatcagaacaagctgaaacctgagatggacgagaagggcaacctgaccaccgccggctttgcctgctctcagtgtggccagcccctgttcgtgtacaagctggagcaggtgtctgagaagggcaaggcttacaccaactacttcggacggtgcaatgtggccgagcacgaaaagctgatcctgctggcccagctgaagcccgagaaggatagcgacgaagccgtgacatatagcctgggaaagtttgggcagagggccctggatttctacagcattcatgtgaccaaggagtccacccaccccgtgaagcccctggcccagatcgccggaaacagatacgcctccggacctgtgggaaaggccctgagcgacgcatgtatgggcacaatcgcctccttcctgtctaagtaccaggacatcatcatcgaacaccagaaggtggtgaagggcaaccagaagagactggagagcctgcgggagctggccggcaaggaaaacctggaataccctagcgtgaccctgccacctcagcctcacaccaaggagggcgttgatgcctacaacgaagtgatcgcccgggtgcgaatgtgggtgaacctgaacctgtggcagaagctgaagctaagcagagatgatgccaagcctctgctgagactgaagggattcccttcctttcctctggtcgagagacaggccaacgaagtggactggtgggacatggtgtgtaacgtgaagaagctgatcaacgagaaaaaggaggatggcaaggtgttttggcagaatctggctggctacaagagacaggaagccctgagaccatacctgagcagcgaggaagatcggaagaagggaaagaaattcgctcggtaccagctgggcgacctgctgctgcacctggaaaagaagcacggcgaggactggggaaaggtgtacgacgaggcctgggagcggattgacaagaaagtggaaggcctgagcaagcacatcaagctggaagaggaacggagaagcgaggacgcccagagcaaggccgccctgaccgactggctgcgggctaaggccagcttcgtgatcgagggcctgaaggaggccgacaaggacgagttctgcagatgcgagctgaagctgcagaagtggtacggggacctgcggggaaagcccttcgccatcgaagccgagaacagcatcctggacatcagcggcttcagcaagcagtacaactgtgccttcatctggcagaaggacggcgtgaagaagctgaacctgtacctgatcatcaactacttcaagggcggcaagctgcggttcaagaagatcaaacctgaagccttcgaagccaacagattctacaccgtgatcaacaaaaagagcggcgagatcgtgcccatggaggtgaacttcaacttcgacgaccccaacctgatcatcctgcctctggcctttggcaagagacagggcagagaattcatctggaacgacctgctgtccctggaaaccggcagcctgaagctggccaacggaagagtgatcgagaagacactgtacaacagaagaacccggcaggatgagcctgccctgttcgtggccctgaccttcgagcggcgggaggtcctggactcctccaatatcaaaccaatgaacctgatcggcgtggcaagaggcgaaaacatccccgccgtgatcgccctgaccgaccccgagggctgcccactgagccggtttaaggatagcctgggaaacccaacccacatcctgagaatcggcgagagctataaggagaagcagcggaccatccaggccaagaaggaggtggagcagcggagagccggcggctacagccggaagtacgccagcaaagccaagaatctggcagacgatatggtgagaaacaccgctagagatctgctgtactacgccgtgacccaggatgccatgctgatcttcgccaacctgagccggggcttcggccggcagggcaagcggaccttcatggccgagagacagtacacacggatggaggactggctgaccgccaagctggcctacgagggcctgagcaagacctacctgtccaagacactggcccagtacacctccaagacatgcagcaactgtgggtttaccatcaccagcgccgactacgacagggtgctggagaagctgaagaagacagcaacaggctggatgaccacaattaacggcaaggagctgaaggtggagggccagattacctactacaacagatacaagagacagaacgtagtcaaggacctgtccgtcgagctggatagactgagcgaagaatctgtgaacaacgacatctcctcctggacaaagggcagaagcggagaagctctgagcctcctgaagaaaagattctcccatagacccgtgcaggagaagttcgtgtgcctgaactgcggcttcgagacacacgcagccgagcaagccgccctgaacatcgccagatcctggctgttcctgcggagccaggagtacaagaaataccagacaaacaagacaaccggcaacaccgataagagagccttcgtcgagacctggcagtccttttaccggaagaagcttaaggaggtgtggaaacctgccgtgcggtctggcggatctggcggaggctccacaagcagcaaggtgcccgtgaccttcggcgacctggccatctacttcagccaggaggagtgggagtggctgagccccatccagaaggacctgtacgaggacgtgatgctggagaactaccagaacctggtgagcctgggcctgagcttcaggaggcccaacgtgatcaccctgctggagaagggcaaggccccctgggtggtggagcccgtgaggaagaggaggggcctggacagcggcttcaagtgcaccagccccaagaaaaagagaaaagtctaagctgccttctgcggggcttgccttctggccatgcccttcttctctcccttgcacctgtacctcttggtctttgaataaagcctgagtaggaaggctagcaaaaaaaaaaaaaaaaaaaaaaaaaaaaaaaaaaaaaaaaaaaaaaaaaaaaaaaaaaaaaaaaaaaaaaaaaaaaaaaa

SEQ ID NO: 3204 - RNA, 5419 nt, synthetic construct
  source 1..5419: mol_type = other RNA
aggaaataagagagaaaagaagagtaagaagaaatataagagccaccatggcccctaagaagaagcgtaaagtgagccgggtgaacggcagcggcagcggcggcggcatgaaccacgaccaggagttcgacccccctaaggtgtaccctcccgtccccgccgagaagagaaagcccatccgggtcctgagcctgttcgatggcatcgccaccggtctgctggtgctgaaggacctgggcatccaggtggataggtacattgcctccgaggtgtgcgaggactccatcaccgtgggaatggtgcgtcatcagggcaagatcatgtacgtgggcgacgtgcggagcgtgacacagaagcatatccaggagtggggccctttcgacctggtgatcggcggcagcccttgcaatgacctgagcatcgtgaacccagcccggaagggcctgtacgagggaaccggcagactgttcttcgagttttacagactgctgcacgacgcccggcctaaggaaggcgacgaccggcccttcttttggctgttcgagaatgtggtggccatgggagtcagcgacaagcgggatattagccggttcctggagagcaaccccgtgatgatcgatgccaaggaagtgagcgccgcccaccgggccagatacttctggggcaatctgcctggcatgaacagacccctggccagcaccgtgaacgacaagctggagctgcaggagtgcctggagcacggccggatcgccaagttcagcaaggtgagaaccatcaccacccgaagcaacagcatcaaacaaggcaaggaccagcactttcctgtgttcatgaacgagaaggaggacatcctgtggtgtaccgagatggagagagtgttcgggttcccagtccactacacagatgtcagcaacatgtctagactggccagacagagactgctgggaagaagctggtccgtccctgtgatcagacacctgttcgcccctctgaaggagtacttcgcctgcgtgagcagcggcaacagcaacgccaacagccggggccccagcttctctagcggcctggtgccactgtccctgagagggagccacatgggccccatggagatctacaaaaccgtgagcgcctggaagcggcagcctgtgcgcgtgctgagcctgtttcggaatatcgataaagtcctgaaaagcctgggattcctggagagcggctctggctccggcggtggcaccctgaagtacgtggaggatgtgacaaacgtggtcagacgggatgtggagaagtggggccccttcgatctggtgtacggcagcacccaacccctgggcagctcttgtgaccggtgccctggctggtacatgtttcagttccaccggatcctgcagtacgccctgccgagacaggagtcccagcggccattcttttggattttcatggacaacttgctgctgaccgaggatgaccaggaaactaccactcggttcctgcagaccgaagccgtgaccctgcaggacgtgagaggccgggactaccagaacgccatgcgggtgtggtccaacatccctggactgaaaagcaagcacgcacctctgacccctaaagaagaggagtacctgcaggcccaggtgcggagcagaagcaagctggacgcccctaaggtggatctgctggtgaagaattgcctcctgcccctgagagagtacttcaagtatttcagccagaatagtctgcccctgggcggcccaagcagcggcgcccctcctcccagcggcggcagcccagccggctccccaacctctaccgaggagggcacctctgagtccgccacccccgagagcggccctggcacctccaccgagcccagcgagggcagcgcacccggcagccctgccggcagccccacctccacagaggagggaaccagcaccgagcccagcgaaggcagcgccccaggcaccagcaccgagcctagtgagggcggctctggcggcggcagcgcccaggagattaaacggatcaacaagatcagaagaagacttgtgaaagacagcaacaccaagaaggccggcaagacaggccccatgaaaaccctgctggttagagtgatgacacccgatctgagagagcggctggaaaacctgagaaagaagcctgaaaatatcccccagcccatcagcaatacatctagagccaacctgaataagctgctgaccgattacaccgaaatgaagaaggcgatcctgcatgtgtactgggaagagttccagaaggaccctgtgggcctgatgagccgggtggcccagcctgccagcaagaagatcgatcagaacaagctgaaacctgagatggacgagaagggcaacctgaccaccgccggctttgcctgctctcagtgtggccagcccctgttcgtgtacaagctggagcaggtgtctgagaagggcaaggcttacaccaactacttcggacggtgcaatgtggccgagcacgaaaagctgatcctgctggcccagctgaagcccgagaaggatagcgacgaagccgtgacatatagcctgggaaagtttgggcagagggccctggatttctacagcattcatgtgaccaaggagtccacccaccccgtgaagcccctggcccagatcgccggaaacagatacgcctccggacctgtgggaaaggccctgagcgacgcatgtatgggcacaatcgcctccttcctgtctaagtaccaggacatcatcatcgaacaccagaaggtggtgaagggcaaccagaagagactggagagcctgcgggagctggccggcaaggaaaacctggaataccctagcgtgaccctgccacctcagcctcacaccaaggagggcgttgatgcctacaacgaagtgatcgcccgggtgcgaatgtgggtgaacctgaacctgtggcagaagctgaagctaagcagagatgatgccaagcctctgctgagactgaagggattcccttcctttcctctggtcgagagacaggccaacgaagtggactggtgggacatggtgtgtaacgtgaagaagctgatcaacgagaaaaaggaggatggcaaggtgttttggcagaatctggctggctacaagagacaggaagccctgagaccatacctgagcagcgaggaagatcggaagaagggaaagaaattcgctcggtaccagctgggcgacctgctgctgcacctggaaaagaagcacggcgaggactggggaaaggtgtacgacgaggcctgggagcggattgacaagaaagtggaaggcctgagcaagcacatcaagctggaagaggaacggagaagcgaggacgcccagagcaaggccgccctgaccgactggctgcgggctaaggccagcttcgtgatcgagggcctgaaggaggccgacaaggacgagttctgcagatgcgagctgaagctgcagaagtggtacggggacctgcggggaaagcccttcgccatcgaagccgagaacagcatcctggacatcagcggcttcagcaagcagtacaactgtgccttcatctggcagaaggacggcgtgaagaagctgaacctgtacctgatcatcaactacttcaagggcggcaagctgcggttcaagaagatcaaacctgaagccttcgaagccaacagattctacaccgtgatcaacaaaaagagcggcgagatcgtgcccatggaggtgaacttcaacttcgacgaccccaacctgatcatcctgcctctggcctttggcaagagacagggcagagaattcatctggaacgacctgctgtccctggaaaccggcagcctgaagctggccaacggaagagtgatcgagaagacactgtacaacagaagaacccggcaggatgagcctgccctgttcgtggccctgaccttcgagcggcgggaggtcctggactcctccaatatcaaaccaatgaacctgatcggcgtggcaagaggcgaaaacatccccgccgtgatcgccctgaccgaccccgagggctgcccactgagccggtttaaggatagcctgggaaacccaacccacatcctgagaatcggcgagagctataaggagaagcagcggaccatccaggccaagaaggaggtggagcagcggagagccggcggctacagccggaagtacgccagcaaagccaagaatctggcagacgatatggtgagaaacaccgctagagatctgctgtactacgccgtgacccaggatgccatgctgatcttcgccaacctgagccggggcttcggccggcagggcaagcggaccttcatggccgagagacagtacacacggatggaggactggctgaccgccaagctggcctacgagggcctgagcaagacctacctgtccaagacactggcccagtacacctccaagacatgcagcaactgtgggtttaccatcaccagcgccgactacgacagggtgctggagaagctgaagaagacagcaacaggctggatgaccacaattaacggcaaggagctgaaggtggagggccagattacctactacaacagatacaagagacagaacgtagtcaaggacctgtccgtcgagctggatagactgagcgaagaatctgtgaacaacgacatctcctcctggacaaagggcagaagcggagaagctctgagcctcctgaagaaaagattctcccatagacccgtgcaggagaagttcgtgtgcctgaactgcggcttcgagacacacgcagccgagcaagccgccctgaacatcgccagatcctggctgttcctgcggagccaggagtacaagaaataccagacaaacaagacaaccggcaacaccgataagagagccttcgtcgagacctggcagtccttttaccggaagaagcttaaggaggtgtggaaacctgccgtgcggtctggcggatctggcggaggctccacaagctaccagaggcccgtgagcttcaaggacgtggtggtgggcttcacccaggaggagtggcacaggctgaaccccgcccagagggccctgtacagggacgtgatgctggagacctacagcaacctggtgagcgtgggctacgagggcaccaagccctacgtgatcctgaggctggagcaggaggaggccccctggatctgcgaggccgcctgccccggctgccactgcagggagaacatctggcagaccagccccaagaaaaagagaaaagtctaagctgccttctgcggggcttgccttctggccatgcccttcttctctcccttgcacctgtacctcttggtctttgaataaagcctgagtaggaaggctagcaaaaaaaaaaaaaaaaaaaaaaaaaaaaaaaaaaaaaaaaaaaaaaaaaaaaaaaaaaaaaaaaaaaaaaaaaaaaaaaa

SEQ ID NO: 3205 - RNA, 5419 nt, synthetic construct
  source 1..5419: mol_type = other RNA
aggaaataagagagaaaagaagagtaagaagaaatataagagccaccatggcccctaagaagaagcgtaaagtgagccgggtgaacggcagcggcagcggcggcggcatgaaccacgaccaggagttcgacccccctaaggtgtaccctcccgtccccgccgagaagagaaagcccatccgggtcctgagcctgttcgatggcatcgccaccggtctgctggtgctgaaggacctgggcatccaggtggataggtacattgcctccgaggtgtgcgaggactccatcaccgtgggaatggtgcgtcatcagggcaagatcatgtacgtgggcgacgtgcggagcgtgacacagaagcatatccaggagtggggccctttcgacctggtgatcggcggcagcccttgcaatgacctgagcatcgtgaacccagcccggaagggcctgtacgagggaaccggcagactgttcttcgagttttacagactgctgcacgacgcccggcctaaggaaggcgacgaccggcccttcttttggctgttcgagaatgtggtggccatgggagtcagcgacaagcgggatattagccggttcctggagagcaaccccgtgatgatcgatgccaaggaagtgagcgccgcccaccgggccagatacttctggggcaatctgcctggcatgaacagacccctggccagcaccgtgaacgacaagctggagctgcaggagtgcctggagcacggccggatcgccaagttcagcaaggtgagaaccatcaccacccgaagcaacagcatcaaacaaggcaaggaccagcactttcctgtgttcatgaacgagaaggaggacatcctgtggtgtaccgagatggagagagtgttcgggttcccagtccactacacagatgtcagcaacatgtctagactggccagacagagactgctgggaagaagctggtccgtccctgtgatcagacacctgttcgcccctctgaaggagtacttcgcctgcgtgagcagcggcaacagcaacgccaacagccggggccccagcttctctagcggcctggtgccactgtccctgagagggagccacatgggccccatggagatctacaaaaccgtgagcgcctggaagcggcagcctgtgcgcgtgctgagcctgtttcggaatatcgataaagtcctgaaaagcctgggattcctggagagcggctctggctccggcggtggcaccctgaagtacgtggaggatgtgacaaacgtggtcagacgggatgtggagaagtggggccccttcgatctggtgtacggcagcacccaacccctgggcagctcttgtgaccggtgccctggctggtacatgtttcagttccaccggatcctgcagtacgccctgccgagacaggagtcccagcggccattcttttggattttcatggacaacttgctgctgaccgaggatgaccaggaaactaccactcggttcctgcagaccgaagccgtgaccctgcaggacgtgagaggccgggactaccagaacgccatgcgggtgtggtccaacatccctggactgaaaagcaagcacgcacctctgacccctaaagaagaggagtacctgcaggcccaggtgcggagcagaagcaagctggacgcccctaaggtggatctgctggtgaagaattgcctcctgcccctgagagagtacttcaagtatttcagccagaatagtctgcccctgggcggcccaagcagcggcgcccctcctcccagcggcggcagcccagccggctccccaacctctaccgaggagggcacctctgagtccgccacccccgagagcggccctggcacctccaccgagcccagcgagggcagcgcacccggcagccctgccggcagccccacctccacagaggagggaaccagcaccgagcccagcgaaggcagcgccccaggcaccagcaccgagcctagtgagggcggctctggcggcggcagcgcccaggagattaaacggatcaacaagatcagaagaagacttgtgaaagacagcaacaccaagaaggccggcaagacaggccccatgaaaaccctgctggttagagtgatgacacccgatctgagagagcggctggaaaacctgagaaagaagcctgaaaatatcccccagcccatcagcaatacatctagagccaacctgaataagctgctgaccgattacaccgaaatgaagaaggcgatcctgcatgtgtactgggaagagttccagaaggaccctgtgggcctgatgagccgggtggcccagcctgccagcaagaagatcgatcagaacaagctgaaacctgagatggacgagaagggcaacctgaccaccgccggctttgcctgctctcagtgtggccagcccctgttcgtgtacaagctggagcaggtgtctgagaagggcaaggcttacaccaactacttcggacggtgcaatgtggccgagcacgaaaagctgatcctgctggcccagctgaagcccgagaaggatagcgacgaagccgtgacatatagcctgggaaagtttgggcagagggccctggatttctacagcattcatgtgaccaaggagtccacccaccccgtgaagcccctggcccagatcgccggaaacagatacgcctccggacctgtgggaaaggccctgagcgacgcatgtatgggcacaatcgcctccttcctgtctaagtaccaggacatcatcatcgaacaccagaaggtggtgaagggcaaccagaagagactggagagcctgcgggagctggccggcaaggaaaacctggaataccctagcgtgaccctgccacctcagcctcacaccaaggagggcgttgatgcctacaacgaagtgatcgcccgggtgcgaatgtgggtgaacctgaacctgtggcagaagctgaagctaagcagagatgatgccaagcctctgctgagactgaagggattcccttcctttcctctggtcgagagacaggccaacgaagtggactggtgggacatggtgtgtaacgtgaagaagctgatcaacgagaaaaaggaggatggcaaggtgttttggcagaatctggctggctacaagagacaggaagccctgagaccatacctgagcagcgaggaagatcggaagaagggaaagaaattcgctcggtaccagctgggcgacctgctgctgcacctggaaaagaagcacggcgaggactggggaaaggtgtacgacgaggcctgggagcggattgacaagaaagtggaaggcctgagcaagcacatcaagctggaagaggaacggagaagcgaggacgcccagagcaaggccgccctgaccgactggctgcgggctaaggccagcttcgtgatcgagggcctgaaggaggccgacaaggacgagttctgcagatgcgagctgaagctgcagaagtggtacggggacctgcggggaaagcccttcgccatcgaagccgagaacagcatcctggacatcagcggcttcagcaagcagtacaactgtgccttcatctggcagaaggacggcgtgaagaagctgaacctgtacctgatcatcaactacttcaagggcggcaagctgcggttcaagaagatcaaacctgaagccttcgaagccaacagattctacaccgtgatcaacaaaaagagcggcgagatcgtgcccatggaggtgaacttcaacttcgacgaccccaacctgatcatcctgcctctggcctttggcaagagacagggcagagaattcatctggaacgacctgctgtccctggaaaccggcagcctgaagctggccaacggaagagtgatcgagaagacactgtacaacagaagaacccggcaggatgagcctgccctgttcgtggccctgaccttcgagcggcgggaggtcctggactcctccaatatcaaaccaatgaacctgatcggcgtggcaagaggcgaaaacatccccgccgtgatcgccctgaccgaccccgagggctgcccactgagccggtttaaggatagcctgggaaacccaacccacatcctgagaatcggcgagagctataaggagaagcagcggaccatccaggccaagaaggaggtggagcagcggagagccggcggctacagccggaagtacgccagcaaagccaagaatctggcagacgatatggtgagaaacaccgctagagatctgctgtactacgccgtgacccaggatgccatgctgatcttcgccaacctgagccggggcttcggccggcagggcaagcggaccttcatggccgagagacagtacacacggatggaggactggctgaccgccaagctggcctacgagggcctgagcaagacctacctgtccaagacactggcccagtacacctccaagacatgcagcaactgtgggtttaccatcaccagcgccgactacgacagggtgctggagaagctgaagaagacagcaacaggctggatgaccacaattaacggcaaggagctgaaggtggagggccagattacctactacaacagatacaagagacagaacgtagtcaaggacctgtccgtcgagctggatagactgagcgaagaatctgtgaacaacgacatctcctcctggacaaagggcagaagcggagaagctctgagcctcctgaagaaaagattctcccatagacccgtgcaggagaagttcgtgtgcctgaactgcggcttcgagacacacgcagccgagcaagccgccctgaacatcgccagatcctggctgttcctgcggagccaggagtacaagaaataccagacaaacaagacaaccggcaacaccgataagagagccttcgtcgagacctggcagtccttttaccggaagaagcttaaggaggtgtggaaacctgccgtgcggtctggcggatctggcggaggctccacaagcatgaccttcgaggacgtggccgtggagttcaccaggtgggagtggggccagctggaccccacccagaaggacgtgtacagggaggtgatgctggagaacttcaagaacctggccagcctgggcttccccatgagcaagccctacgtgatctgcaggctggaggagggcgaggagccctgcatcctggagagggagatcagcaccggcgcccccgccgactgggagaggaggaggcaggccaagaccagccccaagaaaaagagaaaagtctaagctgccttctgcggggcttgccttctggccatgcccttcttctctcccttgcacctgtacctcttggtctttgaataaagcctgagtaggaaggctagcaaaaaaaaaaaaaaaaaaaaaaaaaaaaaaaaaaaaaaaaaaaaaaaaaaaaaaaaaaaaaaaaaaaaaaaaaaaaaaaa

SEQ ID NO: 3206 - RNA, 5419 nt, synthetic construct
  source 1..5419: mol_type = other RNA
aggaaataagagagaaaagaagagtaagaagaaatataagagccaccatggcccctaagaagaagcgtaaagtgagccgggtgaacggcagcggcagcggcggcggcatgaaccacgaccaggagttcgacccccctaaggtgtaccctcccgtccccgccgagaagagaaagcccatccgggtcctgagcctgttcgatggcatcgccaccggtctgctggtgctgaaggacctgggcatccaggtggataggtacattgcctccgaggtgtgcgaggactccatcaccgtgggaatggtgcgtcatcagggcaagatcatgtacgtgggcgacgtgcggagcgtgacacagaagcatatccaggagtggggccctttcgacctggtgatcggcggcagcccttgcaatgacctgagcatcgtgaacccagcccggaagggcctgtacgagggaaccggcagactgttcttcgagttttacagactgctgcacgacgcccggcctaaggaaggcgacgaccggcccttcttttggctgttcgagaatgtggtggccatgggagtcagcgacaagcgggatattagccggttcctggagagcaaccccgtgatgatcgatgccaaggaagtgagcgccgcccaccgggccagatacttctggggcaatctgcctggcatgaacagacccctggccagcaccgtgaacgacaagctggagctgcaggagtgcctggagcacggccggatcgccaagttcagcaaggtgagaaccatcaccacccgaagcaacagcatcaaacaaggcaaggaccagcactttcctgtgttcatgaacgagaaggaggacatcctgtggtgtaccgagatggagagagtgttcgggttcccagtccactacacagatgtcagcaacatgtctagactggccagacagagactgctgggaagaagctggtccgtccctgtgatcagacacctgttcgcccctctgaaggagtacttcgcctgcgtgagcagcggcaacagcaacgccaacagccggggccccagcttctctagcggcctggtgccactgtccctgagagggagccacatgggccccatggagatctacaaaaccgtgagcgcctggaagcggcagcctgtgcgcgtgctgagcctgtttcggaatatcgataaagtcctgaaaagcctgggattcctggagagcggctctggctccggcggtggcaccctgaagtacgtggaggatgtgacaaacgtggtcagacgggatgtggagaagtggggccccttcgatctggtgtacggcagcacccaacccctgggcagctcttgtgaccggtgccctggctggtacatgtttcagttccaccggatcctgcagtacgccctgccgagacaggagtcccagcggccattcttttggattttcatggacaacttgctgctgaccgaggatgaccaggaaactaccactcggttcctgcagaccgaagccgtgaccctgcaggacgtgagaggccgggactaccagaacgccatgcgggtgtggtccaacatccctggactgaaaagcaagcacgcacctctgacccctaaagaagaggagtacctgcaggcccaggtgcggagcagaagcaagctggacgcccctaaggtggatctgctggtgaagaattgcctcctgcccctgagagagtacttcaagtatttcagccagaatagtctgcccctgggcggcccaagcagcggcgcccctcctcccagcggcggcagcccagccggctccccaacctctaccgaggagggcacctctgagtccgccacccccgagagcggccctggcacctccaccgagcccagcgagggcagcgcacccggcagccctgccggcagccccacctccacagaggagggaaccagcaccgagcccagcgaaggcagcgccccaggcaccagcaccgagcctagtgagggcggctctggcggcggcagcgcccaggagattaaacggatcaacaagatcagaagaagacttgtgaaagacagcaacaccaagaaggccggcaagacaggccccatgaaaaccctgctggttagagtgatgacacccgatctgagagagcggctggaaaacctgagaaagaagcctgaaaatatcccccagcccatcagcaatacatctagagccaacctgaataagctgctgaccgattacaccgaaatgaagaaggcgatcctgcatgtgtactgggaagagttccagaaggaccctgtgggcctgatgagccgggtggcccagcctgccagcaagaagatcgatcagaacaagctgaaacctgagatggacgagaagggcaacctgaccaccgccggctttgcctgctctcagtgtggccagcccctgttcgtgtacaagctggagcaggtgtctgagaagggcaaggcttacaccaactacttcggacggtgcaatgtggccgagcacgaaaagctgatcctgctggcccagctgaagcccgagaaggatagcgacgaagccgtgacatatagcctgggaaagtttgggcagagggccctggatttctacagcattcatgtgaccaaggagtccacccaccccgtgaagcccctggcccagatcgccggaaacagatacgcctccggacctgtgggaaaggccctgagcgacgcatgtatgggcacaatcgcctccttcctgtctaagtaccaggacatcatcatcgaacaccagaaggtggtgaagggcaaccagaagagactggagagcctgcgggagctggccggcaaggaaaacctggaataccctagcgtgaccctgccacctcagcctcacaccaaggagggcgttgatgcctacaacgaagtgatcgcccgggtgcgaatgtgggtgaacctgaacctgtggcagaagctgaagctaagcagagatgatgccaagcctctgctgagactgaagggattcccttcctttcctctggtcgagagacaggccaacgaagtggactggtgggacatggtgtgtaacgtgaagaagctgatcaacgagaaaaaggaggatggcaaggtgttttggcagaatctggctggctacaagagacaggaagccctgagaccatacctgagcagcgaggaagatcggaagaagggaaagaaattcgctcggtaccagctgggcgacctgctgctgcacctggaaaagaagcacggcgaggactggggaaaggtgtacgacgaggcctgggagcggattgacaagaaagtggaaggcctgagcaagcacatcaagctggaagaggaacggagaagcgaggacgcccagagcaaggccgccctgaccgactggctgcgggctaaggccagcttcgtgatcgagggcctgaaggaggccgacaaggacgagttctgcagatgcgagctgaagctgcagaagtggtacggggacctgcggggaaagcccttcgccatcgaagccgagaacagcatcctggacatcagcggcttcagcaagcagtacaactgtgccttcatctggcagaaggacggcgtgaagaagctgaacctgtacctgatcatcaactacttcaagggcggcaagctgcggttcaagaagatcaaacctgaagccttcgaagccaacagattctacaccgtgatcaacaaaaagagcggcgagatcgtgcccatggaggtgaacttcaacttcgacgaccccaacctgatcatcctgcctctggcctttggcaagagacagggcagagaattcatctggaacgacctgctgtccctggaaaccggcagcctgaagctggccaacggaagagtgatcgagaagacactgtacaacagaagaacccggcaggatgagcctgccctgttcgtggccctgaccttcgagcggcgggaggtcctggactcctccaatatcaaaccaatgaacctgatcggcgtggcaagaggcgaaaacatccccgccgtgatcgccctgaccgaccccgagggctgcccactgagccggtttaaggatagcctgggaaacccaacccacatcctgagaatcggcgagagctataaggagaagcagcggaccatccaggccaagaaggaggtggagcagcggagagccggcggctacagccggaagtacgccagcaaagccaagaatctggcagacgatatggtgagaaacaccgctagagatctgctgtactacgccgtgacccaggatgccatgctgatcttcgccaacctgagccggggcttcggccggcagggcaagcggaccttcatggccgagagacagtacacacggatggaggactggctgaccgccaagctggcctacgagggcctgagcaagacctacctgtccaagacactggcccagtacacctccaagacatgcagcaactgtgggtttaccatcaccagcgccgactacgacagggtgctggagaagctgaagaagacagcaacaggctggatgaccacaattaacggcaaggagctgaaggtggagggccagattacctactacaacagatacaagagacagaacgtagtcaaggacctgtccgtcgagctggatagactgagcgaagaatctgtgaacaacgacatctcctcctggacaaagggcagaagcggagaagctctgagcctcctgaagaaaagattctcccatagacccgtgcaggagaagttcgtgtgcctgaactgcggcttcgagacacacgcagccgagcaagccgccctgaacatcgccagatcctggctgttcctgcggagccaggagtacaagaaataccagacaaacaagacaaccggcaacaccgataagagagccttcgtcgagacctggcagtccttttaccggaagaagcttaaggaggtgtggaaacctgccgtgcggtctggcggatctggcggaggctccacaagcagctacgagggcagcgtgagcttcagggacgtggccatcgacttcagcagggaggagtggaggcacctggacctgagccagaggaacctgtacagggacgtgatgctggagacctacagccacctgctgagcgtgggctaccaggtgcccgaggccgaggtggtgatgctggagcagggcaaggagccctgggccctgcagggcgagaggcccaggcacagctgccccggcgagaagctgtggaccagccccaagaaaaagagaaaagtctaagctgccttctgcggggcttgccttctggccatgcccttcttctctcccttgcacctgtacctcttggtctttgaataaagcctgagtaggaaggctagcaaaaaaaaaaaaaaaaaaaaaaaaaaaaaaaaaaaaaaaaaaaaaaaaaaaaaaaaaaaaaaaaaaaaaaaaaaaaaaaa

SEQ ID NO: 3207 - RNA, 5419 nt, synthetic construct
  source 1..5419: mol_type = other RNA
aggaaataagagagaaaagaagagtaagaagaaatataagagccaccatggcccctaagaagaagcgtaaagtgagccgggtgaacggcagcggcagcggcggcggcatgaaccacgaccaggagttcgacccccctaaggtgtaccctcccgtccccgccgagaagagaaagcccatccgggtcctgagcctgttcgatggcatcgccaccggtctgctggtgctgaaggacctgggcatccaggtggataggtacattgcctccgaggtgtgcgaggactccatcaccgtgggaatggtgcgtcatcagggcaagatcatgtacgtgggcgacgtgcggagcgtgacacagaagcatatccaggagtggggccctttcgacctggtgatcggcggcagcccttgcaatgacctgagcatcgtgaacccagcccggaagggcctgtacgagggaaccggcagactgttcttcgagttttacagactgctgcacgacgcccggcctaaggaaggcgacgaccggcccttcttttggctgttcgagaatgtggtggccatgggagtcagcgacaagcgggatattagccggttcctggagagcaaccccgtgatgatcgatgccaaggaagtgagcgccgcccaccgggccagatacttctggggcaatctgcctggcatgaacagacccctggccagcaccgtgaacgacaagctggagctgcaggagtgcctggagcacggccggatcgccaagttcagcaaggtgagaaccatcaccacccgaagcaacagcatcaaacaaggcaaggaccagcactttcctgtgttcatgaacgagaaggaggacatcctgtggtgtaccgagatggagagagtgttcgggttcccagtccactacacagatgtcagcaacatgtctagactggccagacagagactgctgggaagaagctggtccgtccctgtgatcagacacctgttcgcccctctgaaggagtacttcgcctgcgtgagcagcggcaacagcaacgccaacagccggggccccagcttctctagcggcctggtgccactgtccctgagagggagccacatgggccccatggagatctacaaaaccgtgagcgcctggaagcggcagcctgtgcgcgtgctgagcctgtttcggaatatcgataaagtcctgaaaagcctgggattcctggagagcggctctggctccggcggtggcaccctgaagtacgtggaggatgtgacaaacgtggtcagacgggatgtggagaagtggggccccttcgatctggtgtacggcagcacccaacccctgggcagctcttgtgaccggtgccctggctggtacatgtttcagttccaccggatcctgcagtacgccctgccgagacaggagtcccagcggccattcttttggattttcatggacaacttgctgctgaccgaggatgaccaggaaactaccactcggttcctgcagaccgaagccgtgaccctgcaggacgtgagaggccgggactaccagaacgccatgcgggtgtggtccaacatccctggactgaaaagcaagcacgcacctctgacccctaaagaagaggagtacctgcaggcccaggtgcggagcagaagcaagctggacgcccctaaggtggatctgctggtgaagaattgcctcctgcccctgagagagtacttcaagtatttcagccagaatagtctgcccctgggcggcccaagcagcggcgcccctcctcccagcggcggcagcccagccggctccccaacctctaccgaggagggcacctctgagtccgccacccccgagagcggccctggcacctccaccgagcccagcgagggcagcgcacccggcagccctgccggcagccccacctccacagaggagggaaccagcaccgagcccagcgaaggcagcgccccaggcaccagcaccgagcctagtgagggcggctctggcggcggcagcgcccaggagattaaacggatcaacaagatcagaagaagacttgtgaaagacagcaacaccaagaaggccggcaagacaggccccatgaaaaccctgctggttagagtgatgacacccgatctgagagagcggctggaaaacctgagaaagaagcctgaaaatatcccccagcccatcagcaatacatctagagccaacctgaataagctgctgaccgattacaccgaaatgaagaaggcgatcctgcatgtgtactgggaagagttccagaaggaccctgtgggcctgatgagccgggtggcccagcctgccagcaagaagatcgatcagaacaagctgaaacctgagatggacgagaagggcaacctgaccaccgccggctttgcctgctctcagtgtggccagcccctgttcgtgtacaagctggagcaggtgtctgagaagggcaaggcttacaccaactacttcggacggtgcaatgtggccgagcacgaaaagctgatcctgctggcccagctgaagcccgagaaggatagcgacgaagccgtgacatatagcctgggaaagtttgggcagagggccctggatttctacagcattcatgtgaccaaggagtccacccaccccgtgaagcccctggcccagatcgccggaaacagatacgcctccggacctgtgggaaaggccctgagcgacgcatgtatgggcacaatcgcctccttcctgtctaagtaccaggacatcatcatcgaacaccagaaggtggtgaagggcaaccagaagagactggagagcctgcgggagctggccggcaaggaaaacctggaataccctagcgtgaccctgccacctcagcctcacaccaaggagggcgttgatgcctacaacgaagtgatcgcccgggtgcgaatgtgggtgaacctgaacctgtggcagaagctgaagctaagcagagatgatgccaagcctctgctgagactgaagggattcccttcctttcctctggtcgagagacaggccaacgaagtggactggtgggacatggtgtgtaacgtgaagaagctgatcaacgagaaaaaggaggatggcaaggtgttttggcagaatctggctggctacaagagacaggaagccctgagaccatacctgagcagcgaggaagatcggaagaagggaaagaaattcgctcggtaccagctgggcgacctgctgctgcacctggaaaagaagcacggcgaggactggggaaaggtgtacgacgaggcctgggagcggattgacaagaaagtggaaggcctgagcaagcacatcaagctggaagaggaacggagaagcgaggacgcccagagcaaggccgccctgaccgactggctgcgggctaaggccagcttcgtgatcgagggcctgaaggaggccgacaaggacgagttctgcagatgcgagctgaagctgcagaagtggtacggggacctgcggggaaagcccttcgccatcgaagccgagaacagcatcctggacatcagcggcttcagcaagcagtacaactgtgccttcatctggcagaaggacggcgtgaagaagctgaacctgtacctgatcatcaactacttcaagggcggcaagctgcggttcaagaagatcaaacctgaagccttcgaagccaacagattctacaccgtgatcaacaaaaagagcggcgagatcgtgcccatggaggtgaacttcaacttcgacgaccccaacctgatcatcctgcctctggcctttggcaagagacagggcagagaattcatctggaacgacctgctgtccctggaaaccggcagcctgaagctggccaacggaagagtgatcgagaagacactgtacaacagaagaacccggcaggatgagcctgccctgttcgtggccctgaccttcgagcggcgggaggtcctggactcctccaatatcaaaccaatgaacctgatcggcgtggcaagaggcgaaaacatccccgccgtgatcgccctgaccgaccccgagggctgcccactgagccggtttaaggatagcctgggaaacccaacccacatcctgagaatcggcgagagctataaggagaagcagcggaccatccaggccaagaaggaggtggagcagcggagagccggcggctacagccggaagtacgccagcaaagccaagaatctggcagacgatatggtgagaaacaccgctagagatctgctgtactacgccgtgacccaggatgccatgctgatcttcgccaacctgagccggggcttcggccggcagggcaagcggaccttcatggccgagagacagtacacacggatggaggactggctgaccgccaagctggcctacgagggcctgagcaagacctacctgtccaagacactggcccagtacacctccaagacatgcagcaactgtgggtttaccatcaccagcgccgactacgacagggtgctggagaagctgaagaagacagcaacaggctggatgaccacaattaacggcaaggagctgaaggtggagggccagattacctactacaacagatacaagagacagaacgtagtcaaggacctgtccgtcgagctggatagactgagcgaagaatctgtgaacaacgacatctcctcctggacaaagggcagaagcggagaagctctgagcctcctgaagaaaagattctcccatagacccgtgcaggagaagttcgtgtgcctgaactgcggcttcgagacacacgcagccgagcaagccgccctgaacatcgccagatcctggctgttcctgcggagccaggagtacaagaaataccagacaaacaagacaaccggcaacaccgataagagagccttcgtcgagacctggcagtccttttaccggaagaagcttaaggaggtgtggaaacctgccgtgcggtctggcggatctggcggaggctccacaagcttccagaccctgctggccttcgaggacgtggccgtgttcttcagcgaggaggagtgggagctgctggacgagctgcagaaggaggtgtacaagaacaccatgagggagaactacgagaccctgctgagcctgggcctgaccaacatgaagcccgagatcatcgccaagatcgacgccggcgaggcccccagcgtgcagaacgccagctacctggagaagaggggcaagaagagcgccgccggcaccagccccaagaaaaagagaaaagtctaagctgccttctgcggggcttgccttctggccatgcccttcttctctcccttgcacctgtacctcttggtctttgaataaagcctgagtaggaaggctagcaaaaaaaaaaaaaaaaaaaaaaaaaaaaaaaaaaaaaaaaaaaaaaaaaaaaaaaaaaaaaaaaaaaaaaaaaaaaaaaa

SEQ ID NO: 3208 - RNA, 5419 nt, synthetic construct
  source 1..5419: mol_type = other RNA
aggaaataagagagaaaagaagagtaagaagaaatataagagccaccatggcccctaagaagaagcgtaaagtgagccgggtgaacggcagcggcagcggcggcggcatgaaccacgaccaggagttcgacccccctaaggtgtaccctcccgtccccgccgagaagagaaagcccatccgggtcctgagcctgttcgatggcatcgccaccggtctgctggtgctgaaggacctgggcatccaggtggataggtacattgcctccgaggtgtgcgaggactccatcaccgtgggaatggtgcgtcatcagggcaagatcatgtacgtgggcgacgtgcggagcgtgacacagaagcatatccaggagtggggccctttcgacctggtgatcggcggcagcccttgcaatgacctgagcatcgtgaacccagcccggaagggcctgtacgagggaaccggcagactgttcttcgagttttacagactgctgcacgacgcccggcctaaggaaggcgacgaccggcccttcttttggctgttcgagaatgtggtggccatgggagtcagcgacaagcgggatattagccggttcctggagagcaaccccgtgatgatcgatgccaaggaagtgagcgccgcccaccgggccagatacttctggggcaatctgcctggcatgaacagacccctggccagcaccgtgaacgacaagctggagctgcaggagtgcctggagcacggccggatcgccaagttcagcaaggtgagaaccatcaccacccgaagcaacagcatcaaacaaggcaaggaccagcactttcctgtgttcatgaacgagaaggaggacatcctgtggtgtaccgagatggagagagtgttcgggttcccagtccactacacagatgtcagcaacatgtctagactggccagacagagactgctgggaagaagctggtccgtccctgtgatcagacacctgttcgcccctctgaaggagtacttcgcctgcgtgagcagcggcaacagcaacgccaacagccggggccccagcttctctagcggcctggtgccactgtccctgagagggagccacatgggccccatggagatctacaaaaccgtgagcgcctggaagcggcagcctgtgcgcgtgctgagcctgtttcggaatatcgataaagtcctgaaaagcctgggattcctggagagcggctctggctccggcggtggcaccctgaagtacgtggaggatgtgacaaacgtggtcagacgggatgtggagaagtggggccccttcgatctggtgtacggcagcacccaacccctgggcagctcttgtgaccggtgccctggctggtacatgtttcagttccaccggatcctgcagtacgccctgccgagacaggagtcccagcggccattcttttggattttcatggacaacttgctgctgaccgaggatgaccaggaaactaccactcggttcctgcagaccgaagccgtgaccctgcaggacgtgagaggccgggactaccagaacgccatgcgggtgtggtccaacatccctggactgaaaagcaagcacgcacctctgacccctaaagaagaggagtacctgcaggcccaggtgcggagcagaagcaagctggacgcccctaaggtggatctgctggtgaagaattgcctcctgcccctgagagagtacttcaagtatttcagccagaatagtctgcccctgggcggcccaagcagcggcgcccctcctcccagcggcggcagcccagccggctccccaacctctaccgaggagggcacctctgagtccgccacccccgagagcggccctggcacctccaccgagcccagcgagggcagcgcacccggcagccctgccggcagccccacctccacagaggagggaaccagcaccgagcccagcgaaggcagcgccccaggcaccagcaccgagcctagtgagggcggctctggcggcggcagcgcccaggagattaaacggatcaacaagatcagaagaagacttgtgaaagacagcaacaccaagaaggccggcaagacaggccccatgaaaaccctgctggttagagtgatgacacccgatctgagagagcggctggaaaacctgagaaagaagcctgaaaatatcccccagcccatcagcaatacatctagagccaacctgaataagctgctgaccgattacaccgaaatgaagaaggcgatcctgcatgtgtactgggaagagttccagaaggaccctgtgggcctgatgagccgggtggcccagcctgccagcaagaagatcgatcagaacaagctgaaacctgagatggacgagaagggcaacctgaccaccgccggctttgcctgctctcagtgtggccagcccctgttcgtgtacaagctggagcaggtgtctgagaagggcaaggcttacaccaactacttcggacggtgcaatgtggccgagcacgaaaagctgatcctgctggcccagctgaagcccgagaaggatagcgacgaagccgtgacatatagcctgggaaagtttgggcagagggccctggatttctacagcattcatgtgaccaaggagtccacccaccccgtgaagcccctggcccagatcgccggaaacagatacgcctccggacctgtgggaaaggccctgagcgacgcatgtatgggcacaatcgcctccttcctgtctaagtaccaggacatcatcatcgaacaccagaaggtggtgaagggcaaccagaagagactggagagcctgcgggagctggccggcaaggaaaacctggaataccctagcgtgaccctgccacctcagcctcacaccaaggagggcgttgatgcctacaacgaagtgatcgcccgggtgcgaatgtgggtgaacctgaacctgtggcagaagctgaagctaagcagagatgatgccaagcctctgctgagactgaagggattcccttcctttcctctggtcgagagacaggccaacgaagtggactggtgggacatggtgtgtaacgtgaagaagctgatcaacgagaaaaaggaggatggcaaggtgttttggcagaatctggctggctacaagagacaggaagccctgagaccatacctgagcagcgaggaagatcggaagaagggaaagaaattcgctcggtaccagctgggcgacctgctgctgcacctggaaaagaagcacggcgaggactggggaaaggtgtacgacgaggcctgggagcggattgacaagaaagtggaaggcctgagcaagcacatcaagctggaagaggaacggagaagcgaggacgcccagagcaaggccgccctgaccgactggctgcgggctaaggccagcttcgtgatcgagggcctgaaggaggccgacaaggacgagttctgcagatgcgagctgaagctgcagaagtggtacggggacctgcggggaaagcccttcgccatcgaagccgagaacagcatcctggacatcagcggcttcagcaagcagtacaactgtgccttcatctggcagaaggacggcgtgaagaagctgaacctgtacctgatcatcaactacttcaagggcggcaagctgcggttcaagaagatcaaacctgaagccttcgaagccaacagattctacaccgtgatcaacaaaaagagcggcgagatcgtgcccatggaggtgaacttcaacttcgacgaccccaacctgatcatcctgcctctggcctttggcaagagacagggcagagaattcatctggaacgacctgctgtccctggaaaccggcagcctgaagctggccaacggaagagtgatcgagaagacactgtacaacagaagaacccggcaggatgagcctgccctgttcgtggccctgaccttcgagcggcgggaggtcctggactcctccaatatcaaaccaatgaacctgatcggcgtggcaagaggcgaaaacatccccgccgtgatcgccctgaccgaccccgagggctgcccactgagccggtttaaggatagcctgggaaacccaacccacatcctgagaatcggcgagagctataaggagaagcagcggaccatccaggccaagaaggaggtggagcagcggagagccggcggctacagccggaagtacgccagcaaagccaagaatctggcagacgatatggtgagaaacaccgctagagatctgctgtactacgccgtgacccaggatgccatgctgatcttcgccaacctgagccggggcttcggccggcagggcaagcggaccttcatggccgagagacagtacacacggatggaggactggctgaccgccaagctggcctacgagggcctgagcaagacctacctgtccaagacactggcccagtacacctccaagacatgcagcaactgtgggtttaccatcaccagcgccgactacgacagggtgctggagaagctgaagaagacagcaacaggctggatgaccacaattaacggcaaggagctgaaggtggagggccagattacctactacaacagatacaagagacagaacgtagtcaaggacctgtccgtcgagctggatagactgagcgaagaatctgtgaacaacgacatctcctcctggacaaagggcagaagcggagaagctctgagcctcctgaagaaaagattctcccatagacccgtgcaggagaagttcgtgtgcctgaactgcggcttcgagacacacgcagccgagcaagccgccctgaacatcgccagatcctggctgttcctgcggagccaggagtacaagaaataccagacaaacaagacaaccggcaacaccgataagagagccttcgtcgagacctggcagtccttttaccggaagaagcttaaggaggtgtggaaacctgccgtgcggtctggcggatctggcggaggctccacaagccaccaggagagcctgaccttcaaggacgtggccgtgaacttcacccaggaggagtggcaccacgtggacgccgcccagaggaggctgtacaaggacgtgatgctggagaactacagccacctggtgagcctgggctaccaggtgagcaagcccgaggtgatcttcaagctggagcagggcgaggagccctggatcgccgagggcgagatccagaggcccgtgtgccccgactggaagaccaggaccagccccaagaaaaagagaaaagtctaagctgccttctgcggggcttgccttctggccatgcccttcttctctcccttgcacctgtacctcttggtctttgaataaagcctgagtaggaaggctagcaaaaaaaaaaaaaaaaaaaaaaaaaaaaaaaaaaaaaaaaaaaaaaaaaaaaaaaaaaaaaaaaaaaaaaaaaaaaaaaa

SEQ ID NO: 3209 - RNA, 5419 nt, synthetic construct
  source 1..5419: mol_type = other RNA
aggaaataagagagaaaagaagagtaagaagaaatataagagccaccatggcccctaagaagaagcgtaaagtgagccgggtgaacggcagcggcagcggcggcggcatgaaccacgaccaggagttcgacccccctaaggtgtaccctcccgtccccgccgagaagagaaagcccatccgggtcctgagcctgttcgatggcatcgccaccggtctgctggtgctgaaggacctgggcatccaggtggataggtacattgcctccgaggtgtgcgaggactccatcaccgtgggaatggtgcgtcatcagggcaagatcatgtacgtgggcgacgtgcggagcgtgacacagaagcatatccaggagtggggccctttcgacctggtgatcggcggcagcccttgcaatgacctgagcatcgtgaacccagcccggaagggcctgtacgagggaaccggcagactgttcttcgagttttacagactgctgcacgacgcccggcctaaggaaggcgacgaccggcccttcttttggctgttcgagaatgtggtggccatgggagtcagcgacaagcgggatattagccggttcctggagagcaaccccgtgatgatcgatgccaaggaagtgagcgccgcccaccgggccagatacttctggggcaatctgcctggcatgaacagacccctggccagcaccgtgaacgacaagctggagctgcaggagtgcctggagcacggccggatcgccaagttcagcaaggtgagaaccatcaccacccgaagcaacagcatcaaacaaggcaaggaccagcactttcctgtgttcatgaacgagaaggaggacatcctgtggtgtaccgagatggagagagtgttcgggttcccagtccactacacagatgtcagcaacatgtctagactggccagacagagactgctgggaagaagctggtccgtccctgtgatcagacacctgttcgcccctctgaaggagtacttcgcctgcgtgagcagcggcaacagcaacgccaacagccggggccccagcttctctagcggcctggtgccactgtccctgagagggagccacatgggccccatggagatctacaaaaccgtgagcgcctggaagcggcagcctgtgcgcgtgctgagcctgtttcggaatatcgataaagtcctgaaaagcctgggattcctggagagcggctctggctccggcggtggcaccctgaagtacgtggaggatgtgacaaacgtggtcagacgggatgtggagaagtggggccccttcgatctggtgtacggcagcacccaacccctgggcagctcttgtgaccggtgccctggctggtacatgtttcagttccaccggatcctgcagtacgccctgccgagacaggagtcccagcggccattcttttggattttcatggacaacttgctgctgaccgaggatgaccaggaaactaccactcggttcctgcagaccgaagccgtgaccctgcaggacgtgagaggccgggactaccagaacgccatgcgggtgtggtccaacatccctggactgaaaagcaagcacgcacctctgacccctaaagaagaggagtacctgcaggcccaggtgcggagcagaagcaagctggacgcccctaaggtggatctgctggtgaagaattgcctcctgcccctgagagagtacttcaagtatttcagccagaatagtctgcccctgggcggcccaagcagcggcgcccctcctcccagcggcggcagcccagccggctccccaacctctaccgaggagggcacctctgagtccgccacccccgagagcggccctggcacctccaccgagcccagcgagggcagcgcacccggcagccctgccggcagccccacctccacagaggagggaaccagcaccgagcccagcgaaggcagcgccccaggcaccagcaccgagcctagtgagggcggctctggcggcggcagcgcccaggagattaaacggatcaacaagatcagaagaagacttgtgaaagacagcaacaccaagaaggccggcaagacaggccccatgaaaaccctgctggttagagtgatgacacccgatctgagagagcggctggaaaacctgagaaagaagcctgaaaatatcccccagcccatcagcaatacatctagagccaacctgaataagctgctgaccgattacaccgaaatgaagaaggcgatcctgcatgtgtactgggaagagttccagaaggaccctgtgggcctgatgagccgggtggcccagcctgccagcaagaagatcgatcagaacaagctgaaacctgagatggacgagaagggcaacctgaccaccgccggctttgcctgctctcagtgtggccagcccctgttcgtgtacaagctggagcaggtgtctgagaagggcaaggcttacaccaactacttcggacggtgcaatgtggccgagcacgaaaagctgatcctgctggcccagctgaagcccgagaaggatagcgacgaagccgtgacatatagcctgggaaagtttgggcagagggccctggatttctacagcattcatgtgaccaaggagtccacccaccccgtgaagcccctggcccagatcgccggaaacagatacgcctccggacctgtgggaaaggccctgagcgacgcatgtatgggcacaatcgcctccttcctgtctaagtaccaggacatcatcatcgaacaccagaaggtggtgaagggcaaccagaagagactggagagcctgcgggagctggccggcaaggaaaacctggaataccctagcgtgaccctgccacctcagcctcacaccaaggagggcgttgatgcctacaacgaagtgatcgcccgggtgcgaatgtgggtgaacctgaacctgtggcagaagctgaagctaagcagagatgatgccaagcctctgctgagactgaagggattcccttcctttcctctggtcgagagacaggccaacgaagtggactggtgggacatggtgtgtaacgtgaagaagctgatcaacgagaaaaaggaggatggcaaggtgttttggcagaatctggctggctacaagagacaggaagccctgagaccatacctgagcagcgaggaagatcggaagaagggaaagaaattcgctcggtaccagctgggcgacctgctgctgcacctggaaaagaagcacggcgaggactggggaaaggtgtacgacgaggcctgggagcggattgacaagaaagtggaaggcctgagcaagcacatcaagctggaagaggaacggagaagcgaggacgcccagagcaaggccgccctgaccgactggctgcgggctaaggccagcttcgtgatcgagggcctgaaggaggccgacaaggacgagttctgcagatgcgagctgaagctgcagaagtggtacggggacctgcggggaaagcccttcgccatcgaagccgagaacagcatcctggacatcagcggcttcagcaagcagtacaactgtgccttcatctggcagaaggacggcgtgaagaagctgaacctgtacctgatcatcaactacttcaagggcggcaagctgcggttcaagaagatcaaacctgaagccttcgaagccaacagattctacaccgtgatcaacaaaaagagcggcgagatcgtgcccatggaggtgaacttcaacttcgacgaccccaacctgatcatcctgcctctggcctttggcaagagacagggcagagaattcatctggaacgacctgctgtccctggaaaccggcagcctgaagctggccaacggaagagtgatcgagaagacactgtacaacagaagaacccggcaggatgagcctgccctgttcgtggccctgaccttcgagcggcgggaggtcctggactcctccaatatcaaaccaatgaacctgatcggcgtggcaagaggcgaaaacatccccgccgtgatcgccctgaccgaccccgagggctgcccactgagccggtttaaggatagcctgggaaacccaacccacatcctgagaatcggcgagagctataaggagaagcagcggaccatccaggccaagaaggaggtggagcagcggagagccggcggctacagccggaagtacgccagcaaagccaagaatctggcagacgatatggtgagaaacaccgctagagatctgctgtactacgccgtgacccaggatgccatgctgatcttcgccaacctgagccggggcttcggccggcagggcaagcggaccttcatggccgagagacagtacacacggatggaggactggctgaccgccaagctggcctacgagggcctgagcaagacctacctgtccaagacactggcccagtacacctccaagacatgcagcaactgtgggtttaccatcaccagcgccgactacgacagggtgctggagaagctgaagaagacagcaacaggctggatgaccacaattaacggcaaggagctgaaggtggagggccagattacctactacaacagatacaagagacagaacgtagtcaaggacctgtccgtcgagctggatagactgagcgaagaatctgtgaacaacgacatctcctcctggacaaagggcagaagcggagaagctctgagcctcctgaagaaaagattctcccatagacccgtgcaggagaagttcgtgtgcctgaactgcggcttcgagacacacgcagccgagcaagccgccctgaacatcgccagatcctggctgttcctgcggagccaggagtacaagaaataccagacaaacaagacaaccggcaacaccgataagagagccttcgtcgagacctggcagtccttttaccggaagaagcttaaggaggtgtggaaacctgccgtgcggtctggcggatctggcggaggctccacaagcaagcccggcgccgtgagcttcgccgacgtggccgtgtacttcagcagggaggagtggggctgcctgaggcccgcccagagggccctgtacagggacgtgatgagggagacctacggccacctgggcgccctgggcgtgggcggcagcaagcccgccctgatcagctgggtggaggagaaggccgagctgtgggaccccgccgcccaggaccccgaggtggccaagtgccccaccgaggccgacaccagccccaagaaaaagagaaaagtctaagctgccttctgcggggcttgccttctggccatgcccttcttctctcccttgcacctgtacctcttggtctttgaataaagcctgagtaggaaggctagcaaaaaaaaaaaaaaaaaaaaaaaaaaaaaaaaaaaaaaaaaaaaaaaaaaaaaaaaaaaaaaaaaaaaaaaaaaaaaaaa

SEQ ID NO: 3210 - RNA, 5419 nt, synthetic construct
  source 1..5419: mol_type = other RNA
aggaaataagagagaaaagaagagtaagaagaaatataagagccaccatggcccctaagaagaagcgtaaagtgagccgggtgaacggcagcggcagcggcggcggcatgaaccacgaccaggagttcgacccccctaaggtgtaccctcccgtccccgccgagaagagaaagcccatccgggtcctgagcctgttcgatggcatcgccaccggtctgctggtgctgaaggacctgggcatccaggtggataggtacattgcctccgaggtgtgcgaggactccatcaccgtgggaatggtgcgtcatcagggcaagatcatgtacgtgggcgacgtgcggagcgtgacacagaagcatatccaggagtggggccctttcgacctggtgatcggcggcagcccttgcaatgacctgagcatcgtgaacccagcccggaagggcctgtacgagggaaccggcagactgttcttcgagttttacagactgctgcacgacgcccggcctaaggaaggcgacgaccggcccttcttttggctgttcgagaatgtggtggccatgggagtcagcgacaagcgggatattagccggttcctggagagcaaccccgtgatgatcgatgccaaggaagtgagcgccgcccaccgggccagatacttctggggcaatctgcctggcatgaacagacccctggccagcaccgtgaacgacaagctggagctgcaggagtgcctggagcacggccggatcgccaagttcagcaaggtgagaaccatcaccacccgaagcaacagcatcaaacaaggcaaggaccagcactttcctgtgttcatgaacgagaaggaggacatcctgtggtgtaccgagatggagagagtgttcgggttcccagtccactacacagatgtcagcaacatgtctagactggccagacagagactgctgggaagaagctggtccgtccctgtgatcagacacctgttcgcccctctgaaggagtacttcgcctgcgtgagcagcggcaacagcaacgccaacagccggggccccagcttctctagcggcctggtgccactgtccctgagagggagccacatgggccccatggagatctacaaaaccgtgagcgcctggaagcggcagcctgtgcgcgtgctgagcctgtttcggaatatcgataaagtcctgaaaagcctgggattcctggagagcggctctggctccggcggtggcaccctgaagtacgtggaggatgtgacaaacgtggtcagacgggatgtggagaagtggggccccttcgatctggtgtacggcagcacccaacccctgggcagctcttgtgaccggtgccctggctggtacatgtttcagttccaccggatcctgcagtacgccctgccgagacaggagtcccagcggccattcttttggattttcatggacaacttgctgctgaccgaggatgaccaggaaactaccactcggttcctgcagaccgaagccgtgaccctgcaggacgtgagaggccgggactaccagaacgccatgcgggtgtggtccaacatccctggactgaaaagcaagcacgcacctctgacccctaaagaagaggagtacctgcaggcccaggtgcggagcagaagcaagctggacgcccctaaggtggatctgctggtgaagaattgcctcctgcccctgagagagtacttcaagtatttcagccagaatagtctgcccctgggcggcccaagcagcggcgcccctcctcccagcggcggcagcccagccggctccccaacctctaccgaggagggcacctctgagtccgccacccccgagagcggccctggcacctccaccgagcccagcgagggcagcgcacccggcagccctgccggcagccccacctccacagaggagggaaccagcaccgagcccagcgaaggcagcgccccaggcaccagcaccgagcctagtgagggcggctctggcggcggcagcgcccaggagattaaacggatcaacaagatcagaagaagacttgtgaaagacagcaacaccaagaaggccggcaagacaggccccatgaaaaccctgctggttagagtgatgacacccgatctgagagagcggctggaaaacctgagaaagaagcctgaaaatatcccccagcccatcagcaatacatctagagccaacctgaataagctgctgaccgattacaccgaaatgaagaaggcgatcctgcatgtgtactgggaagagttccagaaggaccctgtgggcctgatgagccgggtggcccagcctgccagcaagaagatcgatcagaacaagctgaaacctgagatggacgagaagggcaacctgaccaccgccggctttgcctgctctcagtgtggccagcccctgttcgtgtacaagctggagcaggtgtctgagaagggcaaggcttacaccaactacttcggacggtgcaatgtggccgagcacgaaaagctgatcctgctggcccagctgaagcccgagaaggatagcgacgaagccgtgacatatagcctgggaaagtttgggcagagggccctggatttctacagcattcatgtgaccaaggagtccacccaccccgtgaagcccctggcccagatcgccggaaacagatacgcctccggacctgtgggaaaggccctgagcgacgcatgtatgggcacaatcgcctccttcctgtctaagtaccaggacatcatcatcgaacaccagaaggtggtgaagggcaaccagaagagactggagagcctgcgggagctggccggcaaggaaaacctggaataccctagcgtgaccctgccacctcagcctcacaccaaggagggcgttgatgcctacaacgaagtgatcgcccgggtgcgaatgtgggtgaacctgaacctgtggcagaagctgaagctaagcagagatgatgccaagcctctgctgagactgaagggattcccttcctttcctctggtcgagagacaggccaacgaagtggactggtgggacatggtgtgtaacgtgaagaagctgatcaacgagaaaaaggaggatggcaaggtgttttggcagaatctggctggctacaagagacaggaagccctgagaccatacctgagcagcgaggaagatcggaagaagggaaagaaattcgctcggtaccagctgggcgacctgctgctgcacctggaaaagaagcacggcgaggactggggaaaggtgtacgacgaggcctgggagcggattgacaagaaagtggaaggcctgagcaagcacatcaagctggaagaggaacggagaagcgaggacgcccagagcaaggccgccctgaccgactggctgcgggctaaggccagcttcgtgatcgagggcctgaaggaggccgacaaggacgagttctgcagatgcgagctgaagctgcagaagtggtacggggacctgcggggaaagcccttcgccatcgaagccgagaacagcatcctggacatcagcggcttcagcaagcagtacaactgtgccttcatctggcagaaggacggcgtgaagaagctgaacctgtacctgatcatcaactacttcaagggcggcaagctgcggttcaagaagatcaaacctgaagccttcgaagccaacagattctacaccgtgatcaacaaaaagagcggcgagatcgtgcccatggaggtgaacttcaacttcgacgaccccaacctgatcatcctgcctctggcctttggcaagagacagggcagagaattcatctggaacgacctgctgtccctggaaaccggcagcctgaagctggccaacggaagagtgatcgagaagacactgtacaacagaagaacccggcaggatgagcctgccctgttcgtggccctgaccttcgagcggcgggaggtcctggactcctccaatatcaaaccaatgaacctgatcggcgtggcaagaggcgaaaacatccccgccgtgatcgccctgaccgaccccgagggctgcccactgagccggtttaaggatagcctgggaaacccaacccacatcctgagaatcggcgagagctataaggagaagcagcggaccatccaggccaagaaggaggtggagcagcggagagccggcggctacagccggaagtacgccagcaaagccaagaatctggcagacgatatggtgagaaacaccgctagagatctgctgtactacgccgtgacccaggatgccatgctgatcttcgccaacctgagccggggcttcggccggcagggcaagcggaccttcatggccgagagacagtacacacggatggaggactggctgaccgccaagctggcctacgagggcctgagcaagacctacctgtccaagacactggcccagtacacctccaagacatgcagcaactgtgggtttaccatcaccagcgccgactacgacagggtgctggagaagctgaagaagacagcaacaggctggatgaccacaattaacggcaaggagctgaaggtggagggccagattacctactacaacagatacaagagacagaacgtagtcaaggacctgtccgtcgagctggatagactgagcgaagaatctgtgaacaacgacatctcctcctggacaaagggcagaagcggagaagctctgagcctcctgaagaaaagattctcccatagacccgtgcaggagaagttcgtgtgcctgaactgcggcttcgagacacacgcagccgagcaagccgccctgaacatcgccagatcctggctgttcctgcggagccaggagtacaagaaataccagacaaacaagacaaccggcaacaccgataagagagccttcgtcgagacctggcagtccttttaccggaagaagcttaaggaggtgtggaaacctgccgtgcggtctggcggatctggcggaggctccacaagcgcccacatgagcctgagcttcagggacgtggccatcgacctgagccaggaggagtgggagtgcctggaccccgtgcagagggccctgtacagggacgtgatgctggagaactacagcaacctggtgagcctgggctgcagcacccccaagcccgacatgatcaccctgctggagcaggagaaggagccctggatgatcatgagggagggcaccggcagctggttcaccggcctggagagcaagaccagccccaagaaaaagagaaaagtctaagctgccttctgcggggcttgccttctggccatgcccttcttctctcccttgcacctgtacctcttggtctttgaataaagcctgagtaggaaggctagcaaaaaaaaaaaaaaaaaaaaaaaaaaaaaaaaaaaaaaaaaaaaaaaaaaaaaaaaaaaaaaaaaaaaaaaaaaaaaaaa

SEQ ID NO: 3211 - RNA, 5419 nt, synthetic construct
  source 1..5419: mol_type = other RNA
aggaaataagagagaaaagaagagtaagaagaaatataagagccaccatggcccctaagaagaagcgtaaagtgagccgggtgaacggcagcggcagcggcggcggcatgaaccacgaccaggagttcgacccccctaaggtgtaccctcccgtccccgccgagaagagaaagcccatccgggtcctgagcctgttcgatggcatcgccaccggtctgctggtgctgaaggacctgggcatccaggtggataggtacattgcctccgaggtgtgcgaggactccatcaccgtgggaatggtgcgtcatcagggcaagatcatgtacgtgggcgacgtgcggagcgtgacacagaagcatatccaggagtggggccctttcgacctggtgatcggcggcagcccttgcaatgacctgagcatcgtgaacccagcccggaagggcctgtacgagggaaccggcagactgttcttcgagttttacagactgctgcacgacgcccggcctaaggaaggcgacgaccggcccttcttttggctgttcgagaatgtggtggccatgggagtcagcgacaagcgggatattagccggttcctggagagcaaccccgtgatgatcgatgccaaggaagtgagcgccgcccaccgggccagatacttctggggcaatctgcctggcatgaacagacccctggccagcaccgtgaacgacaagctggagctgcaggagtgcctggagcacggccggatcgccaagttcagcaaggtgagaaccatcaccacccgaagcaacagcatcaaacaaggcaaggaccagcactttcctgtgttcatgaacgagaaggaggacatcctgtggtgtaccgagatggagagagtgttcgggttcccagtccactacacagatgtcagcaacatgtctagactggccagacagagactgctgggaagaagctggtccgtccctgtgatcagacacctgttcgcccctctgaaggagtacttcgcctgcgtgagcagcggcaacagcaacgccaacagccggggccccagcttctctagcggcctggtgccactgtccctgagagggagccacatgggccccatggagatctacaaaaccgtgagcgcctggaagcggcagcctgtgcgcgtgctgagcctgtttcggaatatcgataaagtcctgaaaagcctgggattcctggagagcggctctggctccggcggtggcaccctgaagtacgtggaggatgtgacaaacgtggtcagacgggatgtggagaagtggggccccttcgatctggtgtacggcagcacccaacccctgggcagctcttgtgaccggtgccctggctggtacatgtttcagttccaccggatcctgcagtacgccctgccgagacaggagtcccagcggccattcttttggattttcatggacaacttgctgctgaccgaggatgaccaggaaactaccactcggttcctgcagaccgaagccgtgaccctgcaggacgtgagaggccgggactaccagaacgccatgcgggtgtggtccaacatccctggactgaaaagcaagcacgcacctctgacccctaaagaagaggagtacctgcaggcccaggtgcggagcagaagcaagctggacgcccctaaggtggatctgctggtgaagaattgcctcctgcccctgagagagtacttcaagtatttcagccagaatagtctgcccctgggcggcccaagcagcggcgcccctcctcccagcggcggcagcccagccggctccccaacctctaccgaggagggcacctctgagtccgccacccccgagagcggccctggcacctccaccgagcccagcgagggcagcgcacccggcagccctgccggcagccccacctccacagaggagggaaccagcaccgagcccagcgaaggcagcgccccaggcaccagcaccgagcctagtgagggcggctctggcggcggcagcgcccaggagattaaacggatcaacaagatcagaagaagacttgtgaaagacagcaacaccaagaaggccggcaagacaggccccatgaaaaccctgctggttagagtgatgacacccgatctgagagagcggctggaaaacctgagaaagaagcctgaaaatatcccccagcccatcagcaatacatctagagccaacctgaataagctgctgaccgattacaccgaaatgaagaaggcgatcctgcatgtgtactgggaagagttccagaaggaccctgtgggcctgatgagccgggtggcccagcctgccagcaagaagatcgatcagaacaagctgaaacctgagatggacgagaagggcaacctgaccaccgccggctttgcctgctctcagtgtggccagcccctgttcgtgtacaagctggagcaggtgtctgagaagggcaaggcttacaccaactacttcggacggtgcaatgtggccgagcacgaaaagctgatcctgctggcccagctgaagcccgagaaggatagcgacgaagccgtgacatatagcctgggaaagtttgggcagagggccctggatttctacagcattcatgtgaccaaggagtccacccaccccgtgaagcccctggcccagatcgccggaaacagatacgcctccggacctgtgggaaaggccctgagcgacgcatgtatgggcacaatcgcctccttcctgtctaagtaccaggacatcatcatcgaacaccagaaggtggtgaagggcaaccagaagagactggagagcctgcgggagctggccggcaaggaaaacctggaataccctagcgtgaccctgccacctcagcctcacaccaaggagggcgttgatgcctacaacgaagtgatcgcccgggtgcgaatgtgggtgaacctgaacctgtggcagaagctgaagctaagcagagatgatgccaagcctctgctgagactgaagggattcccttcctttcctctggtcgagagacaggccaacgaagtggactggtgggacatggtgtgtaacgtgaagaagctgatcaacgagaaaaaggaggatggcaaggtgttttggcagaatctggctggctacaagagacaggaagccctgagaccatacctgagcagcgaggaagatcggaagaagggaaagaaattcgctcggtaccagctgggcgacctgctgctgcacctggaaaagaagcacggcgaggactggggaaaggtgtacgacgaggcctgggagcggattgacaagaaagtggaaggcctgagcaagcacatcaagctggaagaggaacggagaagcgaggacgcccagagcaaggccgccctgaccgactggctgcgggctaaggccagcttcgtgatcgagggcctgaaggaggccgacaaggacgagttctgcagatgcgagctgaagctgcagaagtggtacggggacctgcggggaaagcccttcgccatcgaagccgagaacagcatcctggacatcagcggcttcagcaagcagtacaactgtgccttcatctggcagaaggacggcgtgaagaagctgaacctgtacctgatcatcaactacttcaagggcggcaagctgcggttcaagaagatcaaacctgaagccttcgaagccaacagattctacaccgtgatcaacaaaaagagcggcgagatcgtgcccatggaggtgaacttcaacttcgacgaccccaacctgatcatcctgcctctggcctttggcaagagacagggcagagaattcatctggaacgacctgctgtccctggaaaccggcagcctgaagctggccaacggaagagtgatcgagaagacactgtacaacagaagaacccggcaggatgagcctgccctgttcgtggccctgaccttcgagcggcgggaggtcctggactcctccaatatcaaaccaatgaacctgatcggcgtggcaagaggcgaaaacatccccgccgtgatcgccctgaccgaccccgagggctgcccactgagccggtttaaggatagcctgggaaacccaacccacatcctgagaatcggcgagagctataaggagaagcagcggaccatccaggccaagaaggaggtggagcagcggagagccggcggctacagccggaagtacgccagcaaagccaagaatctggcagacgatatggtgagaaacaccgctagagatctgctgtactacgccgtgacccaggatgccatgctgatcttcgccaacctgagccggggcttcggccggcagggcaagcggaccttcatggccgagagacagtacacacggatggaggactggctgaccgccaagctggcctacgagggcctgagcaagacctacctgtccaagacactggcccagtacacctccaagacatgcagcaactgtgggtttaccatcaccagcgccgactacgacagggtgctggagaagctgaagaagacagcaacaggctggatgaccacaattaacggcaaggagctgaaggtggagggccagattacctactacaacagatacaagagacagaacgtagtcaaggacctgtccgtcgagctggatagactgagcgaagaatctgtgaacaacgacatctcctcctggacaaagggcagaagcggagaagctctgagcctcctgaagaaaagattctcccatagacccgtgcaggagaagttcgtgtgcctgaactgcggcttcgagacacacgcagccgagcaagccgccctgaacatcgccagatcctggctgttcctgcggagccaggagtacaagaaataccagacaaacaagacaaccggcaacaccgataagagagccttcgtcgagacctggcagtccttttaccggaagaagcttaaggaggtgtggaaacctgccgtgcggtctggcggatctggcggaggctccacaagcccccaggagcccgtgaccttcgaggacgtggccgtgctgttcacccccgaggagtggatgttcctggacagcgcccagaggagcctgtacagggacgtgatgctggagaactacaggaacctggccagcgtgggcgaccagctgggcaagttcagcagcttcagccacctggagcagggcgaggagtggtggcccaccgagaggagggtgttccccggcagctgccccgagcccagcctgcccaccagccccaagaaaaagagaaaagtctaagctgccttctgcggggcttgccttctggccatgcccttcttctctcccttgcacctgtacctcttggtctttgaataaagcctgagtaggaaggctagcaaaaaaaaaaaaaaaaaaaaaaaaaaaaaaaaaaaaaaaaaaaaaaaaaaaaaaaaaaaaaaaaaaaaaaaaaaaaaaaa

SEQ ID NO: 3212 - RNA, 5419 nt, synthetic construct
  source 1..5419: mol_type = other RNA
aggaaataagagagaaaagaagagtaagaagaaatataagagccaccatggcccctaagaagaagcgtaaagtgagccgggtgaacggcagcggcagcggcggcggcatgaaccacgaccaggagttcgacccccctaaggtgtaccctcccgtccccgccgagaagagaaagcccatccgggtcctgagcctgttcgatggcatcgccaccggtctgctggtgctgaaggacctgggcatccaggtggataggtacattgcctccgaggtgtgcgaggactccatcaccgtgggaatggtgcgtcatcagggcaagatcatgtacgtgggcgacgtgcggagcgtgacacagaagcatatccaggagtggggccctttcgacctggtgatcggcggcagcccttgcaatgacctgagcatcgtgaacccagcccggaagggcctgtacgagggaaccggcagactgttcttcgagttttacagactgctgcacgacgcccggcctaaggaaggcgacgaccggcccttcttttggctgttcgagaatgtggtggccatgggagtcagcgacaagcgggatattagccggttcctggagagcaaccccgtgatgatcgatgccaaggaagtgagcgccgcccaccgggccagatacttctggggcaatctgcctggcatgaacagacccctggccagcaccgtgaacgacaagctggagctgcaggagtgcctggagcacggccggatcgccaagttcagcaaggtgagaaccatcaccacccgaagcaacagcatcaaacaaggcaaggaccagcactttcctgtgttcatgaacgagaaggaggacatcctgtggtgtaccgagatggagagagtgttcgggttcccagtccactacacagatgtcagcaacatgtctagactggccagacagagactgctgggaagaagctggtccgtccctgtgatcagacacctgttcgcccctctgaaggagtacttcgcctgcgtgagcagcggcaacagcaacgccaacagccggggccccagcttctctagcggcctggtgccactgtccctgagagggagccacatgggccccatggagatctacaaaaccgtgagcgcctggaagcggcagcctgtgcgcgtgctgagcctgtttcggaatatcgataaagtcctgaaaagcctgggattcctggagagcggctctggctccggcggtggcaccctgaagtacgtggaggatgtgacaaacgtggtcagacgggatgtggagaagtggggccccttcgatctggtgtacggcagcacccaacccctgggcagctcttgtgaccggtgccctggctggtacatgtttcagttccaccggatcctgcagtacgccctgccgagacaggagtcccagcggccattcttttggattttcatggacaacttgctgctgaccgaggatgaccaggaaactaccactcggttcctgcagaccgaagccgtgaccctgcaggacgtgagaggccgggactaccagaacgccatgcgggtgtggtccaacatccctggactgaaaagcaagcacgcacctctgacccctaaagaagaggagtacctgcaggcccaggtgcggagcagaagcaagctggacgcccctaaggtggatctgctggtgaagaattgcctcctgcccctgagagagtacttcaagtatttcagccagaatagtctgcccctgggcggcccaagcagcggcgcccctcctcccagcggcggcagcccagccggctccccaacctctaccgaggagggcacctctgagtccgccacccccgagagcggccctggcacctccaccgagcccagcgagggcagcgcacccggcagccctgccggcagccccacctccacagaggagggaaccagcaccgagcccagcgaaggcagcgccccaggcaccagcaccgagcctagtgagggcggctctggcggcggcagcgcccaggagattaaacggatcaacaagatcagaagaagacttgtgaaagacagcaacaccaagaaggccggcaagacaggccccatgaaaaccctgctggttagagtgatgacacccgatctgagagagcggctggaaaacctgagaaagaagcctgaaaatatcccccagcccatcagcaatacatctagagccaacctgaataagctgctgaccgattacaccgaaatgaagaaggcgatcctgcatgtgtactgggaagagttccagaaggaccctgtgggcctgatgagccgggtggcccagcctgccagcaagaagatcgatcagaacaagctgaaacctgagatggacgagaagggcaacctgaccaccgccggctttgcctgctctcagtgtggccagcccctgttcgtgtacaagctggagcaggtgtctgagaagggcaaggcttacaccaactacttcggacggtgcaatgtggccgagcacgaaaagctgatcctgctggcccagctgaagcccgagaaggatagcgacgaagccgtgacatatagcctgggaaagtttgggcagagggccctggatttctacagcattcatgtgaccaaggagtccacccaccccgtgaagcccctggcccagatcgccggaaacagatacgcctccggacctgtgggaaaggccctgagcgacgcatgtatgggcacaatcgcctccttcctgtctaagtaccaggacatcatcatcgaacaccagaaggtggtgaagggcaaccagaagagactggagagcctgcgggagctggccggcaaggaaaacctggaataccctagcgtgaccctgccacctcagcctcacaccaaggagggcgttgatgcctacaacgaagtgatcgcccgggtgcgaatgtgggtgaacctgaacctgtggcagaagctgaagctaagcagagatgatgccaagcctctgctgagactgaagggattcccttcctttcctctggtcgagagacaggccaacgaagtggactggtgggacatggtgtgtaacgtgaagaagctgatcaacgagaaaaaggaggatggcaaggtgttttggcagaatctggctggctacaagagacaggaagccctgagaccatacctgagcagcgaggaagatcggaagaagggaaagaaattcgctcggtaccagctgggcgacctgctgctgcacctggaaaagaagcacggcgaggactggggaaaggtgtacgacgaggcctgggagcggattgacaagaaagtggaaggcctgagcaagcacatcaagctggaagaggaacggagaagcgaggacgcccagagcaaggccgccctgaccgactggctgcgggctaaggccagcttcgtgatcgagggcctgaaggaggccgacaaggacgagttctgcagatgcgagctgaagctgcagaagtggtacggggacctgcggggaaagcccttcgccatcgaagccgagaacagcatcctggacatcagcggcttcagcaagcagtacaactgtgccttcatctggcagaaggacggcgtgaagaagctgaacctgtacctgatcatcaactacttcaagggcggcaagctgcggttcaagaagatcaaacctgaagccttcgaagccaacagattctacaccgtgatcaacaaaaagagcggcgagatcgtgcccatggaggtgaacttcaacttcgacgaccccaacctgatcatcctgcctctggcctttggcaagagacagggcagagaattcatctggaacgacctgctgtccctggaaaccggcagcctgaagctggccaacggaagagtgatcgagaagacactgtacaacagaagaacccggcaggatgagcctgccctgttcgtggccctgaccttcgagcggcgggaggtcctggactcctccaatatcaaaccaatgaacctgatcggcgtggcaagaggcgaaaacatccccgccgtgatcgccctgaccgaccccgagggctgcccactgagccggtttaaggatagcctgggaaacccaacccacatcctgagaatcggcgagagctataaggagaagcagcggaccatccaggccaagaaggaggtggagcagcggagagccggcggctacagccggaagtacgccagcaaagccaagaatctggcagacgatatggtgagaaacaccgctagagatctgctgtactacgccgtgacccaggatgccatgctgatcttcgccaacctgagccggggcttcggccggcagggcaagcggaccttcatggccgagagacagtacacacggatggaggactggctgaccgccaagctggcctacgagggcctgagcaagacctacctgtccaagacactggcccagtacacctccaagacatgcagcaactgtgggtttaccatcaccagcgccgactacgacagggtgctggagaagctgaagaagacagcaacaggctggatgaccacaattaacggcaaggagctgaaggtggagggccagattacctactacaacagatacaagagacagaacgtagtcaaggacctgtccgtcgagctggatagactgagcgaagaatctgtgaacaacgacatctcctcctggacaaagggcagaagcggagaagctctgagcctcctgaagaaaagattctcccatagacccgtgcaggagaagttcgtgtgcctgaactgcggcttcgagacacacgcagccgagcaagccgccctgaacatcgccagatcctggctgttcctgcggagccaggagtacaagaaataccagacaaacaagacaaccggcaacaccgataagagagccttcgtcgagacctggcagtccttttaccggaagaagcttaaggaggtgtggaaacctgccgtgcggtctggcggatctggcggaggctccacaagctggcaggagcccgtgaccttcgaggacgtggccgtgtacctgagccacgccgagtgggacgccatggcccccgagcagagggagctgtactgcagcgtgatgctggacaactaccagctgctggccagcctgggctaccccggccccaagcccgacatcgtgtacaggctggagaggggcgaggagccctggggctgcgccccccagagccccctgagctgggacggccccaggagccccagcaccagccccaagaaaaagagaaaagtctaagctgccttctgcggggcttgccttctggccatgcccttcttctctcccttgcacctgtacctcttggtctttgaataaagcctgagtaggaaggctagcaaaaaaaaaaaaaaaaaaaaaaaaaaaaaaaaaaaaaaaaaaaaaaaaaaaaaaaaaaaaaaaaaaaaaaaaaaaaaaaa

SEQ ID NO: 3213 - RNA, 5419 nt, synthetic construct
  source 1..5419: mol_type = other RNA
aggaaataagagagaaaagaagagtaagaagaaatataagagccaccatggcccctaagaagaagcgtaaagtgagccgggtgaacggcagcggcagcggcggcggcatgaaccacgaccaggagttcgacccccctaaggtgtaccctcccgtccccgccgagaagagaaagcccatccgggtcctgagcctgttcgatggcatcgccaccggtctgctggtgctgaaggacctgggcatccaggtggataggtacattgcctccgaggtgtgcgaggactccatcaccgtgggaatggtgcgtcatcagggcaagatcatgtacgtgggcgacgtgcggagcgtgacacagaagcatatccaggagtggggccctttcgacctggtgatcggcggcagcccttgcaatgacctgagcatcgtgaacccagcccggaagggcctgtacgagggaaccggcagactgttcttcgagttttacagactgctgcacgacgcccggcctaaggaaggcgacgaccggcccttcttttggctgttcgagaatgtggtggccatgggagtcagcgacaagcgggatattagccggttcctggagagcaaccccgtgatgatcgatgccaaggaagtgagcgccgcccaccgggccagatacttctggggcaatctgcctggcatgaacagacccctggccagcaccgtgaacgacaagctggagctgcaggagtgcctggagcacggccggatcgccaagttcagcaaggtgagaaccatcaccacccgaagcaacagcatcaaacaaggcaaggaccagcactttcctgtgttcatgaacgagaaggaggacatcctgtggtgtaccgagatggagagagtgttcgggttcccagtccactacacagatgtcagcaacatgtctagactggccagacagagactgctgggaagaagctggtccgtccctgtgatcagacacctgttcgcccctctgaaggagtacttcgcctgcgtgagcagcggcaacagcaacgccaacagccggggccccagcttctctagcggcctggtgccactgtccctgagagggagccacatgggccccatggagatctacaaaaccgtgagcgcctggaagcggcagcctgtgcgcgtgctgagcctgtttcggaatatcgataaagtcctgaaaagcctgggattcctggagagcggctctggctccggcggtggcaccctgaagtacgtggaggatgtgacaaacgtggtcagacgggatgtggagaagtggggccccttcgatctggtgtacggcagcacccaacccctgggcagctcttgtgaccggtgccctggctggtacatgtttcagttccaccggatcctgcagtacgccctgccgagacaggagtcccagcggccattcttttggattttcatggacaacttgctgctgaccgaggatgaccaggaaactaccactcggttcctgcagaccgaagccgtgaccctgcaggacgtgagaggccgggactaccagaacgccatgcgggtgtggtccaacatccctggactgaaaagcaagcacgcacctctgacccctaaagaagaggagtacctgcaggcccaggtgcggagcagaagcaagctggacgcccctaaggtggatctgctggtgaagaattgcctcctgcccctgagagagtacttcaagtatttcagccagaatagtctgcccctgggcggcccaagcagcggcgcccctcctcccagcggcggcagcccagccggctccccaacctctaccgaggagggcacctctgagtccgccacccccgagagcggccctggcacctccaccgagcccagcgagggcagcgcacccggcagccctgccggcagccccacctccacagaggagggaaccagcaccgagcccagcgaaggcagcgccccaggcaccagcaccgagcctagtgagggcggctctggcggcggcagcgcccaggagattaaacggatcaacaagatcagaagaagacttgtgaaagacagcaacaccaagaaggccggcaagacaggccccatgaaaaccctgctggttagagtgatgacacccgatctgagagagcggctggaaaacctgagaaagaagcctgaaaatatcccccagcccatcagcaatacatctagagccaacctgaataagctgctgaccgattacaccgaaatgaagaaggcgatcctgcatgtgtactgggaagagttccagaaggaccctgtgggcctgatgagccgggtggcccagcctgccagcaagaagatcgatcagaacaagctgaaacctgagatggacgagaagggcaacctgaccaccgccggctttgcctgctctcagtgtggccagcccctgttcgtgtacaagctggagcaggtgtctgagaagggcaaggcttacaccaactacttcggacggtgcaatgtggccgagcacgaaaagctgatcctgctggcccagctgaagcccgagaaggatagcgacgaagccgtgacatatagcctgggaaagtttgggcagagggccctggatttctacagcattcatgtgaccaaggagtccacccaccccgtgaagcccctggcccagatcgccggaaacagatacgcctccggacctgtgggaaaggccctgagcgacgcatgtatgggcacaatcgcctccttcctgtctaagtaccaggacatcatcatcgaacaccagaaggtggtgaagggcaaccagaagagactggagagcctgcgggagctggccggcaaggaaaacctggaataccctagcgtgaccctgccacctcagcctcacaccaaggagggcgttgatgcctacaacgaagtgatcgcccgggtgcgaatgtgggtgaacctgaacctgtggcagaagctgaagctaagcagagatgatgccaagcctctgctgagactgaagggattcccttcctttcctctggtcgagagacaggccaacgaagtggactggtgggacatggtgtgtaacgtgaagaagctgatcaacgagaaaaaggaggatggcaaggtgttttggcagaatctggctggctacaagagacaggaagccctgagaccatacctgagcagcgaggaagatcggaagaagggaaagaaattcgctcggtaccagctgggcgacctgctgctgcacctggaaaagaagcacggcgaggactggggaaaggtgtacgacgaggcctgggagcggattgacaagaaagtggaaggcctgagcaagcacatcaagctggaagaggaacggagaagcgaggacgcccagagcaaggccgccctgaccgactggctgcgggctaaggccagcttcgtgatcgagggcctgaaggaggccgacaaggacgagttctgcagatgcgagctgaagctgcagaagtggtacggggacctgcggggaaagcccttcgccatcgaagccgagaacagcatcctggacatcagcggcttcagcaagcagtacaactgtgccttcatctggcagaaggacggcgtgaagaagctgaacctgtacctgatcatcaactacttcaagggcggcaagctgcggttcaagaagatcaaacctgaagccttcgaagccaacagattctacaccgtgatcaacaaaaagagcggcgagatcgtgcccatggaggtgaacttcaacttcgacgaccccaacctgatcatcctgcctctggcctttggcaagagacagggcagagaattcatctggaacgacctgctgtccctggaaaccggcagcctgaagctggccaacggaagagtgatcgagaagacactgtacaacagaagaacccggcaggatgagcctgccctgttcgtggccctgaccttcgagcggcgggaggtcctggactcctccaatatcaaaccaatgaacctgatcggcgtggcaagaggcgaaaacatccccgccgtgatcgccctgaccgaccccgagggctgcccactgagccggtttaaggatagcctgggaaacccaacccacatcctgagaatcggcgagagctataaggagaagcagcggaccatccaggccaagaaggaggtggagcagcggagagccggcggctacagccggaagtacgccagcaaagccaagaatctggcagacgatatggtgagaaacaccgctagagatctgctgtactacgccgtgacccaggatgccatgctgatcttcgccaacctgagccggggcttcggccggcagggcaagcggaccttcatggccgagagacagtacacacggatggaggactggctgaccgccaagctggcctacgagggcctgagcaagacctacctgtccaagacactggcccagtacacctccaagacatgcagcaactgtgggtttaccatcaccagcgccgactacgacagggtgctggagaagctgaagaagacagcaacaggctggatgaccacaattaacggcaaggagctgaaggtggagggccagattacctactacaacagatacaagagacagaacgtagtcaaggacctgtccgtcgagctggatagactgagcgaagaatctgtgaacaacgacatctcctcctggacaaagggcagaagcggagaagctctgagcctcctgaagaaaagattctcccatagacccgtgcaggagaagttcgtgtgcctgaactgcggcttcgagacacacgcagccgagcaagccgccctgaacatcgccagatcctggctgttcctgcggagccaggagtacaagaaataccagacaaacaagacaaccggcaacaccgataagagagccttcgtcgagacctggcagtccttttaccggaagaagcttaaggaggtgtggaaacctgccgtgcggtctggcggatctggcggaggctccacaagcggcaaggccctgctgagcttcgaggacgtggccatgtacttcaccagggaggagtggaaccacctggactgggcccagaaggacctgtacagggacgtgatgctggagaactacatgaacatggtgctgctgggcttccagttccccaagcccgaggtgatctgccagctggagaactgggacgagccctggatcctggacctgcccagggccggcaacaggaaggccagcagcagcgcctgcaccagccccaagaaaaagagaaaagtctaagctgccttctgcggggcttgccttctggccatgcccttcttctctcccttgcacctgtacctcttggtctttgaataaagcctgagtaggaaggctagcaaaaaaaaaaaaaaaaaaaaaaaaaaaaaaaaaaaaaaaaaaaaaaaaaaaaaaaaaaaaaaaaaaaaaaaaaaaaaaaa

SEQ ID NO: 3214 - RNA, 5419 nt, synthetic construct
  source 1..5419: mol_type = other RNA
aggaaataagagagaaaagaagagtaagaagaaatataagagccaccatggcccctaagaagaagcgtaaagtgagccgggtgaacggcagcggcagcggcggcggcatgaaccacgaccaggagttcgacccccctaaggtgtaccctcccgtccccgccgagaagagaaagcccatccgggtcctgagcctgttcgatggcatcgccaccggtctgctggtgctgaaggacctgggcatccaggtggataggtacattgcctccgaggtgtgcgaggactccatcaccgtgggaatggtgcgtcatcagggcaagatcatgtacgtgggcgacgtgcggagcgtgacacagaagcatatccaggagtggggccctttcgacctggtgatcggcggcagcccttgcaatgacctgagcatcgtgaacccagcccggaagggcctgtacgagggaaccggcagactgttcttcgagttttacagactgctgcacgacgcccggcctaaggaaggcgacgaccggcccttcttttggctgttcgagaatgtggtggccatgggagtcagcgacaagcgggatattagccggttcctggagagcaaccccgtgatgatcgatgccaaggaagtgagcgccgcccaccgggccagatacttctggggcaatctgcctggcatgaacagacccctggccagcaccgtgaacgacaagctggagctgcaggagtgcctggagcacggccggatcgccaagttcagcaaggtgagaaccatcaccacccgaagcaacagcatcaaacaaggcaaggaccagcactttcctgtgttcatgaacgagaaggaggacatcctgtggtgtaccgagatggagagagtgttcgggttcccagtccactacacagatgtcagcaacatgtctagactggccagacagagactgctgggaagaagctggtccgtccctgtgatcagacacctgttcgcccctctgaaggagtacttcgcctgcgtgagcagcggcaacagcaacgccaacagccggggccccagcttctctagcggcctggtgccactgtccctgagagggagccacatgggccccatggagatctacaaaaccgtgagcgcctggaagcggcagcctgtgcgcgtgctgagcctgtttcggaatatcgataaagtcctgaaaagcctgggattcctggagagcggctctggctccggcggtggcaccctgaagtacgtggaggatgtgacaaacgtggtcagacgggatgtggagaagtggggccccttcgatctggtgtacggcagcacccaacccctgggcagctcttgtgaccggtgccctggctggtacatgtttcagttccaccggatcctgcagtacgccctgccgagacaggagtcccagcggccattcttttggattttcatggacaacttgctgctgaccgaggatgaccaggaaactaccactcggttcctgcagaccgaagccgtgaccctgcaggacgtgagaggccgggactaccagaacgccatgcgggtgtggtccaacatccctggactgaaaagcaagcacgcacctctgacccctaaagaagaggagtacctgcaggcccaggtgcggagcagaagcaagctggacgcccctaaggtggatctgctggtgaagaattgcctcctgcccctgagagagtacttcaagtatttcagccagaatagtctgcccctgggcggcccaagcagcggcgcccctcctcccagcggcggcagcccagccggctccccaacctctaccgaggagggcacctctgagtccgccacccccgagagcggccctggcacctccaccgagcccagcgagggcagcgcacccggcagccctgccggcagccccacctccacagaggagggaaccagcaccgagcccagcgaaggcagcgccccaggcaccagcaccgagcctagtgagggcggctctggcggcggcagcgcccaggagattaaacggatcaacaagatcagaagaagacttgtgaaagacagcaacaccaagaaggccggcaagacaggccccatgaaaaccctgctggttagagtgatgacacccgatctgagagagcggctggaaaacctgagaaagaagcctgaaaatatcccccagcccatcagcaatacatctagagccaacctgaataagctgctgaccgattacaccgaaatgaagaaggcgatcctgcatgtgtactgggaagagttccagaaggaccctgtgggcctgatgagccgggtggcccagcctgccagcaagaagatcgatcagaacaagctgaaacctgagatggacgagaagggcaacctgaccaccgccggctttgcctgctctcagtgtggccagcccctgttcgtgtacaagctggagcaggtgtctgagaagggcaaggcttacaccaactacttcggacggtgcaatgtggccgagcacgaaaagctgatcctgctggcccagctgaagcccgagaaggatagcgacgaagccgtgacatatagcctgggaaagtttgggcagagggccctggatttctacagcattcatgtgaccaaggagtccacccaccccgtgaagcccctggcccagatcgccggaaacagatacgcctccggacctgtgggaaaggccctgagcgacgcatgtatgggcacaatcgcctccttcctgtctaagtaccaggacatcatcatcgaacaccagaaggtggtgaagggcaaccagaagagactggagagcctgcgggagctggccggcaaggaaaacctggaataccctagcgtgaccctgccacctcagcctcacaccaaggagggcgttgatgcctacaacgaagtgatcgcccgggtgcgaatgtgggtgaacctgaacctgtggcagaagctgaagctaagcagagatgatgccaagcctctgctgagactgaagggattcccttcctttcctctggtcgagagacaggccaacgaagtggactggtgggacatggtgtgtaacgtgaagaagctgatcaacgagaaaaaggaggatggcaaggtgttttggcagaatctggctggctacaagagacaggaagccctgagaccatacctgagcagcgaggaagatcggaagaagggaaagaaattcgctcggtaccagctgggcgacctgctgctgcacctggaaaagaagcacggcgaggactggggaaaggtgtacgacgaggcctgggagcggattgacaagaaagtggaaggcctgagcaagcacatcaagctggaagaggaacggagaagcgaggacgcccagagcaaggccgccctgaccgactggctgcgggctaaggccagcttcgtgatcgagggcctgaaggaggccgacaaggacgagttctgcagatgcgagctgaagctgcagaagtggtacggggacctgcggggaaagcccttcgccatcgaagccgagaacagcatcctggacatcagcggcttcagcaagcagtacaactgtgccttcatctggcagaaggacggcgtgaagaagctgaacctgtacctgatcatcaactacttcaagggcggcaagctgcggttcaagaagatcaaacctgaagccttcgaagccaacagattctacaccgtgatcaacaaaaagagcggcgagatcgtgcccatggaggtgaacttcaacttcgacgaccccaacctgatcatcctgcctctggcctttggcaagagacagggcagagaattcatctggaacgacctgctgtccctggaaaccggcagcctgaagctggccaacggaagagtgatcgagaagacactgtacaacagaagaacccggcaggatgagcctgccctgttcgtggccctgaccttcgagcggcgggaggtcctggactcctccaatatcaaaccaatgaacctgatcggcgtggcaagaggcgaaaacatccccgccgtgatcgccctgaccgaccccgagggctgcccactgagccggtttaaggatagcctgggaaacccaacccacatcctgagaatcggcgagagctataaggagaagcagcggaccatccaggccaagaaggaggtggagcagcggagagccggcggctacagccggaagtacgccagcaaagccaagaatctggcagacgatatggtgagaaacaccgctagagatctgctgtactacgccgtgacccaggatgccatgctgatcttcgccaacctgagccggggcttcggccggcagggcaagcggaccttcatggccgagagacagtacacacggatggaggactggctgaccgccaagctggcctacgagggcctgagcaagacctacctgtccaagacactggcccagtacacctccaagacatgcagcaactgtgggtttaccatcaccagcgccgactacgacagggtgctggagaagctgaagaagacagcaacaggctggatgaccacaattaacggcaaggagctgaaggtggagggccagattacctactacaacagatacaagagacagaacgtagtcaaggacctgtccgtcgagctggatagactgagcgaagaatctgtgaacaacgacatctcctcctggacaaagggcagaagcggagaagctctgagcctcctgaagaaaagattctcccatagacccgtgcaggagaagttcgtgtgcctgaactgcggcttcgagacacacgcagccgagcaagccgccctgaacatcgccagatcctggctgttcctgcggagccaggagtacaagaaataccagacaaacaagacaaccggcaacaccgataagagagccttcgtcgagacctggcagtccttttaccggaagaagcttaaggaggtgtggaaacctgccgtgcggtctggcggatctggcggaggctccacaagcacccaggtgagcgtgaccttcgacgacgtggccgtgaccttcacccaggaggagtggggccacctggaccccgcccagaggaccctgtacagggaggtgatgctggagacctgcaggctgctggtgagcctgggctgccccgtgcccaggcccgagctgatctacaggctggagcacggccaggagctgtggaccgtgaagagggacctgagcaggagcacctgcgccgtggacgagggcaagaccagccccaagaaaaagagaaaagtctaagctgccttctgcggggcttgccttctggccatgcccttcttctctcccttgcacctgtacctcttggtctttgaataaagcctgagtaggaaggctagcaaaaaaaaaaaaaaaaaaaaaaaaaaaaaaaaaaaaaaaaaaaaaaaaaaaaaaaaaaaaaaaaaaaaaaaaaaaaaaaa

SEQ ID NO: 3215 - RNA, 5419 nt, synthetic construct
  source 1..5419: mol_type = other RNA
aggaaataagagagaaaagaagagtaagaagaaatataagagccaccatggcccctaagaagaagcgtaaagtgagccgggtgaacggcagcggcagcggcggcggcatgaaccacgaccaggagttcgacccccctaaggtgtaccctcccgtccccgccgagaagagaaagcccatccgggtcctgagcctgttcgatggcatcgccaccggtctgctggtgctgaaggacctgggcatccaggtggataggtacattgcctccgaggtgtgcgaggactccatcaccgtgggaatggtgcgtcatcagggcaagatcatgtacgtgggcgacgtgcggagcgtgacacagaagcatatccaggagtggggccctttcgacctggtgatcggcggcagcccttgcaatgacctgagcatcgtgaacccagcccggaagggcctgtacgagggaaccggcagactgttcttcgagttttacagactgctgcacgacgcccggcctaaggaaggcgacgaccggcccttcttttggctgttcgagaatgtggtggccatgggagtcagcgacaagcgggatattagccggttcctggagagcaaccccgtgatgatcgatgccaaggaagtgagcgccgcccaccgggccagatacttctggggcaatctgcctggcatgaacagacccctggccagcaccgtgaacgacaagctggagctgcaggagtgcctggagcacggccggatcgccaagttcagcaaggtgagaaccatcaccacccgaagcaacagcatcaaacaaggcaaggaccagcactttcctgtgttcatgaacgagaaggaggacatcctgtggtgtaccgagatggagagagtgttcgggttcccagtccactacacagatgtcagcaacatgtctagactggccagacagagactgctgggaagaagctggtccgtccctgtgatcagacacctgttcgcccctctgaaggagtacttcgcctgcgtgagcagcggcaacagcaacgccaacagccggggccccagcttctctagcggcctggtgccactgtccctgagagggagccacatgggccccatggagatctacaaaaccgtgagcgcctggaagcggcagcctgtgcgcgtgctgagcctgtttcggaatatcgataaagtcctgaaaagcctgggattcctggagagcggctctggctccggcggtggcaccctgaagtacgtggaggatgtgacaaacgtggtcagacgggatgtggagaagtggggccccttcgatctggtgtacggcagcacccaacccctgggcagctcttgtgaccggtgccctggctggtacatgtttcagttccaccggatcctgcagtacgccctgccgagacaggagtcccagcggccattcttttggattttcatggacaacttgctgctgaccgaggatgaccaggaaactaccactcggttcctgcagaccgaagccgtgaccctgcaggacgtgagaggccgggactaccagaacgccatgcgggtgtggtccaacatccctggactgaaaagcaagcacgcacctctgacccctaaagaagaggagtacctgcaggcccaggtgcggagcagaagcaagctggacgcccctaaggtggatctgctggtgaagaattgcctcctgcccctgagagagtacttcaagtatttcagccagaatagtctgcccctgggcggcccaagcagcggcgcccctcctcccagcggcggcagcccagccggctccccaacctctaccgaggagggcacctctgagtccgccacccccgagagcggccctggcacctccaccgagcccagcgagggcagcgcacccggcagccctgccggcagccccacctccacagaggagggaaccagcaccgagcccagcgaaggcagcgccccaggcaccagcaccgagcctagtgagggcggctctggcggcggcagcgcccaggagattaaacggatcaacaagatcagaagaagacttgtgaaagacagcaacaccaagaaggccggcaagacaggccccatgaaaaccctgctggttagagtgatgacacccgatctgagagagcggctggaaaacctgagaaagaagcctgaaaatatcccccagcccatcagcaatacatctagagccaacctgaataagctgctgaccgattacaccgaaatgaagaaggcgatcctgcatgtgtactgggaagagttccagaaggaccctgtgggcctgatgagccgggtggcccagcctgccagcaagaagatcgatcagaacaagctgaaacctgagatggacgagaagggcaacctgaccaccgccggctttgcctgctctcagtgtggccagcccctgttcgtgtacaagctggagcaggtgtctgagaagggcaaggcttacaccaactacttcggacggtgcaatgtggccgagcacgaaaagctgatcctgctggcccagctgaagcccgagaaggatagcgacgaagccgtgacatatagcctgggaaagtttgggcagagggccctggatttctacagcattcatgtgaccaaggagtccacccaccccgtgaagcccctggcccagatcgccggaaacagatacgcctccggacctgtgggaaaggccctgagcgacgcatgtatgggcacaatcgcctccttcctgtctaagtaccaggacatcatcatcgaacaccagaaggtggtgaagggcaaccagaagagactggagagcctgcgggagctggccggcaaggaaaacctggaataccctagcgtgaccctgccacctcagcctcacaccaaggagggcgttgatgcctacaacgaagtgatcgcccgggtgcgaatgtgggtgaacctgaacctgtggcagaagctgaagctaagcagagatgatgccaagcctctgctgagactgaagggattcccttcctttcctctggtcgagagacaggccaacgaagtggactggtgggacatggtgtgtaacgtgaagaagctgatcaacgagaaaaaggaggatggcaaggtgttttggcagaatctggctggctacaagagacaggaagccctgagaccatacctgagcagcgaggaagatcggaagaagggaaagaaattcgctcggtaccagctgggcgacctgctgctgcacctggaaaagaagcacggcgaggactggggaaaggtgtacgacgaggcctgggagcggattgacaagaaagtggaaggcctgagcaagcacatcaagctggaagaggaacggagaagcgaggacgcccagagcaaggccgccctgaccgactggctgcgggctaaggccagcttcgtgatcgagggcctgaaggaggccgacaaggacgagttctgcagatgcgagctgaagctgcagaagtggtacggggacctgcggggaaagcccttcgccatcgaagccgagaacagcatcctggacatcagcggcttcagcaagcagtacaactgtgccttcatctggcagaaggacggcgtgaagaagctgaacctgtacctgatcatcaactacttcaagggcggcaagctgcggttcaagaagatcaaacctgaagccttcgaagccaacagattctacaccgtgatcaacaaaaagagcggcgagatcgtgcccatggaggtgaacttcaacttcgacgaccccaacctgatcatcctgcctctggcctttggcaagagacagggcagagaattcatctggaacgacctgctgtccctggaaaccggcagcctgaagctggccaacggaagagtgatcgagaagacactgtacaacagaagaacccggcaggatgagcctgccctgttcgtggccctgaccttcgagcggcgggaggtcctggactcctccaatatcaaaccaatgaacctgatcggcgtggcaagaggcgaaaacatccccgccgtgatcgccctgaccgaccccgagggctgcccactgagccggtttaaggatagcctgggaaacccaacccacatcctgagaatcggcgagagctataaggagaagcagcggaccatccaggccaagaaggaggtggagcagcggagagccggcggctacagccggaagtacgccagcaaagccaagaatctggcagacgatatggtgagaaacaccgctagagatctgctgtactacgccgtgacccaggatgccatgctgatcttcgccaacctgagccggggcttcggccggcagggcaagcggaccttcatggccgagagacagtacacacggatggaggactggctgaccgccaagctggcctacgagggcctgagcaagacctacctgtccaagacactggcccagtacacctccaagacatgcagcaactgtgggtttaccatcaccagcgccgactacgacagggtgctggagaagctgaagaagacagcaacaggctggatgaccacaattaacggcaaggagctgaaggtggagggccagattacctactacaacagatacaagagacagaacgtagtcaaggacctgtccgtcgagctggatagactgagcgaagaatctgtgaacaacgacatctcctcctggacaaagggcagaagcggagaagctctgagcctcctgaagaaaagattctcccatagacccgtgcaggagaagttcgtgtgcctgaactgcggcttcgagacacacgcagccgagcaagccgccctgaacatcgccagatcctggctgttcctgcggagccaggagtacaagaaataccagacaaacaagacaaccggcaacaccgataagagagccttcgtcgagacctggcagtccttttaccggaagaagcttaaggaggtgtggaaacctgccgtgcggtctggcggatctggcggaggctccacaagctaccagggcctggtgagcttcgaggacgtggccgtgaacttcacctgggaggagtggcaggacctggacgccgcccagaggaccctgtacagggacgtgatgctggagaactacagcagcctggtgagcctgggccactgcatcaccaagcccgaggtgatcatcaagctggagcagggcgccgccccctggaccgtgaaggagacccccgaccagggcagccccgacgtgcagatcgtggacaccagccccaagaaaaagagaaaagtctaagctgccttctgcggggcttgccttctggccatgcccttcttctctcccttgcacctgtacctcttggtctttgaataaagcctgagtaggaaggctagcaaaaaaaaaaaaaaaaaaaaaaaaaaaaaaaaaaaaaaaaaaaaaaaaaaaaaaaaaaaaaaaaaaaaaaaaaaaaaaaa

SEQ ID NO: 3216 - RNA, 5419 nt, synthetic construct
  source 1..5419: mol_type = other RNA
aggaaataagagagaaaagaagagtaagaagaaatataagagccaccatggcccctaagaagaagcgtaaagtgagccgggtgaacggcagcggcagcggcggcggcatgaaccacgaccaggagttcgacccccctaaggtgtaccctcccgtccccgccgagaagagaaagcccatccgggtcctgagcctgttcgatggcatcgccaccggtctgctggtgctgaaggacctgggcatccaggtggataggtacattgcctccgaggtgtgcgaggactccatcaccgtgggaatggtgcgtcatcagggcaagatcatgtacgtgggcgacgtgcggagcgtgacacagaagcatatccaggagtggggccctttcgacctggtgatcggcggcagcccttgcaatgacctgagcatcgtgaacccagcccggaagggcctgtacgagggaaccggcagactgttcttcgagttttacagactgctgcacgacgcccggcctaaggaaggcgacgaccggcccttcttttggctgttcgagaatgtggtggccatgggagtcagcgacaagcgggatattagccggttcctggagagcaaccccgtgatgatcgatgccaaggaagtgagcgccgcccaccgggccagatacttctggggcaatctgcctggcatgaacagacccctggccagcaccgtgaacgacaagctggagctgcaggagtgcctggagcacggccggatcgccaagttcagcaaggtgagaaccatcaccacccgaagcaacagcatcaaacaaggcaaggaccagcactttcctgtgttcatgaacgagaaggaggacatcctgtggtgtaccgagatggagagagtgttcgggttcccagtccactacacagatgtcagcaacatgtctagactggccagacagagactgctgggaagaagctggtccgtccctgtgatcagacacctgttcgcccctctgaaggagtacttcgcctgcgtgagcagcggcaacagcaacgccaacagccggggccccagcttctctagcggcctggtgccactgtccctgagagggagccacatgggccccatggagatctacaaaaccgtgagcgcctggaagcggcagcctgtgcgcgtgctgagcctgtttcggaatatcgataaagtcctgaaaagcctgggattcctggagagcggctctggctccggcggtggcaccctgaagtacgtggaggatgtgacaaacgtggtcagacgggatgtggagaagtggggccccttcgatctggtgtacggcagcacccaacccctgggcagctcttgtgaccggtgccctggctggtacatgtttcagttccaccggatcctgcagtacgccctgccgagacaggagtcccagcggccattcttttggattttcatggacaacttgctgctgaccgaggatgaccaggaaactaccactcggttcctgcagaccgaagccgtgaccctgcaggacgtgagaggccgggactaccagaacgccatgcgggtgtggtccaacatccctggactgaaaagcaagcacgcacctctgacccctaaagaagaggagtacctgcaggcccaggtgcggagcagaagcaagctggacgcccctaaggtggatctgctggtgaagaattgcctcctgcccctgagagagtacttcaagtatttcagccagaatagtctgcccctgggcggcccaagcagcggcgcccctcctcccagcggcggcagcccagccggctccccaacctctaccgaggagggcacctctgagtccgccacccccgagagcggccctggcacctccaccgagcccagcgagggcagcgcacccggcagccctgccggcagccccacctccacagaggagggaaccagcaccgagcccagcgaaggcagcgccccaggcaccagcaccgagcctagtgagggcggctctggcggcggcagcgcccaggagattaaacggatcaacaagatcagaagaagacttgtgaaagacagcaacaccaagaaggccggcaagacaggccccatgaaaaccctgctggttagagtgatgacacccgatctgagagagcggctggaaaacctgagaaagaagcctgaaaatatcccccagcccatcagcaatacatctagagccaacctgaataagctgctgaccgattacaccgaaatgaagaaggcgatcctgcatgtgtactgggaagagttccagaaggaccctgtgggcctgatgagccgggtggcccagcctgccagcaagaagatcgatcagaacaagctgaaacctgagatggacgagaagggcaacctgaccaccgccggctttgcctgctctcagtgtggccagcccctgttcgtgtacaagctggagcaggtgtctgagaagggcaaggcttacaccaactacttcggacggtgcaatgtggccgagcacgaaaagctgatcctgctggcccagctgaagcccgagaaggatagcgacgaagccgtgacatatagcctgggaaagtttgggcagagggccctggatttctacagcattcatgtgaccaaggagtccacccaccccgtgaagcccctggcccagatcgccggaaacagatacgcctccggacctgtgggaaaggccctgagcgacgcatgtatgggcacaatcgcctccttcctgtctaagtaccaggacatcatcatcgaacaccagaaggtggtgaagggcaaccagaagagactggagagcctgcgggagctggccggcaaggaaaacctggaataccctagcgtgaccctgccacctcagcctcacaccaaggagggcgttgatgcctacaacgaagtgatcgcccgggtgcgaatgtgggtgaacctgaacctgtggcagaagctgaagctaagcagagatgatgccaagcctctgctgagactgaagggattcccttcctttcctctggtcgagagacaggccaacgaagtggactggtgggacatggtgtgtaacgtgaagaagctgatcaacgagaaaaaggaggatggcaaggtgttttggcagaatctggctggctacaagagacaggaagccctgagaccatacctgagcagcgaggaagatcggaagaagggaaagaaattcgctcggtaccagctgggcgacctgctgctgcacctggaaaagaagcacggcgaggactggggaaaggtgtacgacgaggcctgggagcggattgacaagaaagtggaaggcctgagcaagcacatcaagctggaagaggaacggagaagcgaggacgcccagagcaaggccgccctgaccgactggctgcgggctaaggccagcttcgtgatcgagggcctgaaggaggccgacaaggacgagttctgcagatgcgagctgaagctgcagaagtggtacggggacctgcggggaaagcccttcgccatcgaagccgagaacagcatcctggacatcagcggcttcagcaagcagtacaactgtgccttcatctggcagaaggacggcgtgaagaagctgaacctgtacctgatcatcaactacttcaagggcggcaagctgcggttcaagaagatcaaacctgaagccttcgaagccaacagattctacaccgtgatcaacaaaaagagcggcgagatcgtgcccatggaggtgaacttcaacttcgacgaccccaacctgatcatcctgcctctggcctttggcaagagacagggcagagaattcatctggaacgacctgctgtccctggaaaccggcagcctgaagctggccaacggaagagtgatcgagaagacactgtacaacagaagaacccggcaggatgagcctgccctgttcgtggccctgaccttcgagcggcgggaggtcctggactcctccaatatcaaaccaatgaacctgatcggcgtggcaagaggcgaaaacatccccgccgtgatcgccctgaccgaccccgagggctgcccactgagccggtttaaggatagcctgggaaacccaacccacatcctgagaatcggcgagagctataaggagaagcagcggaccatccaggccaagaaggaggtggagcagcggagagccggcggctacagccggaagtacgccagcaaagccaagaatctggcagacgatatggtgagaaacaccgctagagatctgctgtactacgccgtgacccaggatgccatgctgatcttcgccaacctgagccggggcttcggccggcagggcaagcggaccttcatggccgagagacagtacacacggatggaggactggctgaccgccaagctggcctacgagggcctgagcaagacctacctgtccaagacactggcccagtacacctccaagacatgcagcaactgtgggtttaccatcaccagcgccgactacgacagggtgctggagaagctgaagaagacagcaacaggctggatgaccacaattaacggcaaggagctgaaggtggagggccagattacctactacaacagatacaagagacagaacgtagtcaaggacctgtccgtcgagctggatagactgagcgaagaatctgtgaacaacgacatctcctcctggacaaagggcagaagcggagaagctctgagcctcctgaagaaaagattctcccatagacccgtgcaggagaagttcgtgtgcctgaactgcggcttcgagacacacgcagccgagcaagccgccctgaacatcgccagatcctggctgttcctgcggagccaggagtacaagaaataccagacaaacaagacaaccggcaacaccgataagagagccttcgtcgagacctggcagtccttttaccggaagaagcttaaggaggtgtggaaacctgccgtgcggtctggcggatctggcggaggctccacaagcccccaggacagcgtgaccttcgaggaggtggccgtgagcttcagcagggaggagtgggccctgctgaccgactggcagaagaacctgtacaaggacgtgatgagggacaactacgagatgctgaacagcctggacctggccgcccacaagcccgacatcatcctgaggatcgagaggggccaggagccctgcgtgggcaggctgcagaggagcaaggccagggagaggcccaaccacgtgttcaccagccccaagaaaaagagaaaagtctaagctgccttctgcggggcttgccttctggccatgcccttcttctctcccttgcacctgtacctcttggtctttgaataaagcctgagtaggaaggctagcaaaaaaaaaaaaaaaaaaaaaaaaaaaaaaaaaaaaaaaaaaaaaaaaaaaaaaaaaaaaaaaaaaaaaaaaaaaaaaaa

SEQ ID NO: 3217 - RNA, 5419 nt, synthetic construct
  source 1..5419: mol_type = other RNA
aggaaataagagagaaaagaagagtaagaagaaatataagagccaccatggcccctaagaagaagcgtaaagtgagccgggtgaacggcagcggcagcggcggcggcatgaaccacgaccaggagttcgacccccctaaggtgtaccctcccgtccccgccgagaagagaaagcccatccgggtcctgagcctgttcgatggcatcgccaccggtctgctggtgctgaaggacctgggcatccaggtggataggtacattgcctccgaggtgtgcgaggactccatcaccgtgggaatggtgcgtcatcagggcaagatcatgtacgtgggcgacgtgcggagcgtgacacagaagcatatccaggagtggggccctttcgacctggtgatcggcggcagcccttgcaatgacctgagcatcgtgaacccagcccggaagggcctgtacgagggaaccggcagactgttcttcgagttttacagactgctgcacgacgcccggcctaaggaaggcgacgaccggcccttcttttggctgttcgagaatgtggtggccatgggagtcagcgacaagcgggatattagccggttcctggagagcaaccccgtgatgatcgatgccaaggaagtgagcgccgcccaccgggccagatacttctggggcaatctgcctggcatgaacagacccctggccagcaccgtgaacgacaagctggagctgcaggagtgcctggagcacggccggatcgccaagttcagcaaggtgagaaccatcaccacccgaagcaacagcatcaaacaaggcaaggaccagcactttcctgtgttcatgaacgagaaggaggacatcctgtggtgtaccgagatggagagagtgttcgggttcccagtccactacacagatgtcagcaacatgtctagactggccagacagagactgctgggaagaagctggtccgtccctgtgatcagacacctgttcgcccctctgaaggagtacttcgcctgcgtgagcagcggcaacagcaacgccaacagccggggccccagcttctctagcggcctggtgccactgtccctgagagggagccacatgggccccatggagatctacaaaaccgtgagcgcctggaagcggcagcctgtgcgcgtgctgagcctgtttcggaatatcgataaagtcctgaaaagcctgggattcctggagagcggctctggctccggcggtggcaccctgaagtacgtggaggatgtgacaaacgtggtcagacgggatgtggagaagtggggccccttcgatctggtgtacggcagcacccaacccctgggcagctcttgtgaccggtgccctggctggtacatgtttcagttccaccggatcctgcagtacgccctgccgagacaggagtcccagcggccattcttttggattttcatggacaacttgctgctgaccgaggatgaccaggaaactaccactcggttcctgcagaccgaagccgtgaccctgcaggacgtgagaggccgggactaccagaacgccatgcgggtgtggtccaacatccctggactgaaaagcaagcacgcacctctgacccctaaagaagaggagtacctgcaggcccaggtgcggagcagaagcaagctggacgcccctaaggtggatctgctggtgaagaattgcctcctgcccctgagagagtacttcaagtatttcagccagaatagtctgcccctgggcggcccaagcagcggcgcccctcctcccagcggcggcagcccagccggctccccaacctctaccgaggagggcacctctgagtccgccacccccgagagcggccctggcacctccaccgagcccagcgagggcagcgcacccggcagccctgccggcagccccacctccacagaggagggaaccagcaccgagcccagcgaaggcagcgccccaggcaccagcaccgagcctagtgagggcggctctggcggcggcagcgcccaggagattaaacggatcaacaagatcagaagaagacttgtgaaagacagcaacaccaagaaggccggcaagacaggccccatgaaaaccctgctggttagagtgatgacacccgatctgagagagcggctggaaaacctgagaaagaagcctgaaaatatcccccagcccatcagcaatacatctagagccaacctgaataagctgctgaccgattacaccgaaatgaagaaggcgatcctgcatgtgtactgggaagagttccagaaggaccctgtgggcctgatgagccgggtggcccagcctgccagcaagaagatcgatcagaacaagctgaaacctgagatggacgagaagggcaacctgaccaccgccggctttgcctgctctcagtgtggccagcccctgttcgtgtacaagctggagcaggtgtctgagaagggcaaggcttacaccaactacttcggacggtgcaatgtggccgagcacgaaaagctgatcctgctggcccagctgaagcccgagaaggatagcgacgaagccgtgacatatagcctgggaaagtttgggcagagggccctggatttctacagcattcatgtgaccaaggagtccacccaccccgtgaagcccctggcccagatcgccggaaacagatacgcctccggacctgtgggaaaggccctgagcgacgcatgtatgggcacaatcgcctccttcctgtctaagtaccaggacatcatcatcgaacaccagaaggtggtgaagggcaaccagaagagactggagagcctgcgggagctggccggcaaggaaaacctggaataccctagcgtgaccctgccacctcagcctcacaccaaggagggcgttgatgcctacaacgaagtgatcgcccgggtgcgaatgtgggtgaacctgaacctgtggcagaagctgaagctaagcagagatgatgccaagcctctgctgagactgaagggattcccttcctttcctctggtcgagagacaggccaacgaagtggactggtgggacatggtgtgtaacgtgaagaagctgatcaacgagaaaaaggaggatggcaaggtgttttggcagaatctggctggctacaagagacaggaagccctgagaccatacctgagcagcgaggaagatcggaagaagggaaagaaattcgctcggtaccagctgggcgacctgctgctgcacctggaaaagaagcacggcgaggactggggaaaggtgtacgacgaggcctgggagcggattgacaagaaagtggaaggcctgagcaagcacatcaagctggaagaggaacggagaagcgaggacgcccagagcaaggccgccctgaccgactggctgcgggctaaggccagcttcgtgatcgagggcctgaaggaggccgacaaggacgagttctgcagatgcgagctgaagctgcagaagtggtacggggacctgcggggaaagcccttcgccatcgaagccgagaacagcatcctggacatcagcggcttcagcaagcagtacaactgtgccttcatctggcagaaggacggcgtgaagaagctgaacctgtacctgatcatcaactacttcaagggcggcaagctgcggttcaagaagatcaaacctgaagccttcgaagccaacagattctacaccgtgatcaacaaaaagagcggcgagatcgtgcccatggaggtgaacttcaacttcgacgaccccaacctgatcatcctgcctctggcctttggcaagagacagggcagagaattcatctggaacgacctgctgtccctggaaaccggcagcctgaagctggccaacggaagagtgatcgagaagacactgtacaacagaagaacccggcaggatgagcctgccctgttcgtggccctgaccttcgagcggcgggaggtcctggactcctccaatatcaaaccaatgaacctgatcggcgtggcaagaggcgaaaacatccccgccgtgatcgccctgaccgaccccgagggctgcccactgagccggtttaaggatagcctgggaaacccaacccacatcctgagaatcggcgagagctataaggagaagcagcggaccatccaggccaagaaggaggtggagcagcggagagccggcggctacagccggaagtacgccagcaaagccaagaatctggcagacgatatggtgagaaacaccgctagagatctgctgtactacgccgtgacccaggatgccatgctgatcttcgccaacctgagccggggcttcggccggcagggcaagcggaccttcatggccgagagacagtacacacggatggaggactggctgaccgccaagctggcctacgagggcctgagcaagacctacctgtccaagacactggcccagtacacctccaagacatgcagcaactgtgggtttaccatcaccagcgccgactacgacagggtgctggagaagctgaagaagacagcaacaggctggatgaccacaattaacggcaaggagctgaaggtggagggccagattacctactacaacagatacaagagacagaacgtagtcaaggacctgtccgtcgagctggatagactgagcgaagaatctgtgaacaacgacatctcctcctggacaaagggcagaagcggagaagctctgagcctcctgaagaaaagattctcccatagacccgtgcaggagaagttcgtgtgcctgaactgcggcttcgagacacacgcagccgagcaagccgccctgaacatcgccagatcctggctgttcctgcggagccaggagtacaagaaataccagacaaacaagacaaccggcaacaccgataagagagccttcgtcgagacctggcagtccttttaccggaagaagcttaaggaggtgtggaaacctgccgtgcggtctggcggatctggcggaggctccacaagcaggatgaagagcgtgaccttcgaggacgtggccgtgtacttcacccagaccgagtgggacagcctgagcaccgcccagagggccctgtacagggacgtgatgctggagaactacggcaacgtggccagcctgggcttccccctgctgaagcccgccgtgatcagccagctggagggcggcggcgagctggagggccccagccccctggccagcggcgccggcaccggcccccagggcctgtggaccagccccaagaaaaagagaaaagtctaagctgccttctgcggggcttgccttctggccatgcccttcttctctcccttgcacctgtacctcttggtctttgaataaagcctgagtaggaaggctagcaaaaaaaaaaaaaaaaaaaaaaaaaaaaaaaaaaaaaaaaaaaaaaaaaaaaaaaaaaaaaaaaaaaaaaaaaaaaaaaa

SEQ ID NO: 3218 - RNA, 5419 nt, synthetic construct
  source 1..5419: mol_type = other RNA
aggaaataagagagaaaagaagagtaagaagaaatataagagccaccatggcccctaagaagaagcgtaaagtgagccgggtgaacggcagcggcagcggcggcggcatgaaccacgaccaggagttcgacccccctaaggtgtaccctcccgtccccgccgagaagagaaagcccatccgggtcctgagcctgttcgatggcatcgccaccggtctgctggtgctgaaggacctgggcatccaggtggataggtacattgcctccgaggtgtgcgaggactccatcaccgtgggaatggtgcgtcatcagggcaagatcatgtacgtgggcgacgtgcggagcgtgacacagaagcatatccaggagtggggccctttcgacctggtgatcggcggcagcccttgcaatgacctgagcatcgtgaacccagcccggaagggcctgtacgagggaaccggcagactgttcttcgagttttacagactgctgcacgacgcccggcctaaggaaggcgacgaccggcccttcttttggctgttcgagaatgtggtggccatgggagtcagcgacaagcgggatattagccggttcctggagagcaaccccgtgatgatcgatgccaaggaagtgagcgccgcccaccgggccagatacttctggggcaatctgcctggcatgaacagacccctggccagcaccgtgaacgacaagctggagctgcaggagtgcctggagcacggccggatcgccaagttcagcaaggtgagaaccatcaccacccgaagcaacagcatcaaacaaggcaaggaccagcactttcctgtgttcatgaacgagaaggaggacatcctgtggtgtaccgagatggagagagtgttcgggttcccagtccactacacagatgtcagcaacatgtctagactggccagacagagactgctgggaagaagctggtccgtccctgtgatcagacacctgttcgcccctctgaaggagtacttcgcctgcgtgagcagcggcaacagcaacgccaacagccggggccccagcttctctagcggcctggtgccactgtccctgagagggagccacatgggccccatggagatctacaaaaccgtgagcgcctggaagcggcagcctgtgcgcgtgctgagcctgtttcggaatatcgataaagtcctgaaaagcctgggattcctggagagcggctctggctccggcggtggcaccctgaagtacgtggaggatgtgacaaacgtggtcagacgggatgtggagaagtggggccccttcgatctggtgtacggcagcacccaacccctgggcagctcttgtgaccggtgccctggctggtacatgtttcagttccaccggatcctgcagtacgccctgccgagacaggagtcccagcggccattcttttggattttcatggacaacttgctgctgaccgaggatgaccaggaaactaccactcggttcctgcagaccgaagccgtgaccctgcaggacgtgagaggccgggactaccagaacgccatgcgggtgtggtccaacatccctggactgaaaagcaagcacgcacctctgacccctaaagaagaggagtacctgcaggcccaggtgcggagcagaagcaagctggacgcccctaaggtggatctgctggtgaagaattgcctcctgcccctgagagagtacttcaagtatttcagccagaatagtctgcccctgggcggcccaagcagcggcgcccctcctcccagcggcggcagcccagccggctccccaacctctaccgaggagggcacctctgagtccgccacccccgagagcggccctggcacctccaccgagcccagcgagggcagcgcacccggcagccctgccggcagccccacctccacagaggagggaaccagcaccgagcccagcgaaggcagcgccccaggcaccagcaccgagcctagtgagggcggctctggcggcggcagcgcccaggagattaaacggatcaacaagatcagaagaagacttgtgaaagacagcaacaccaagaaggccggcaagacaggccccatgaaaaccctgctggttagagtgatgacacccgatctgagagagcggctggaaaacctgagaaagaagcctgaaaatatcccccagcccatcagcaatacatctagagccaacctgaataagctgctgaccgattacaccgaaatgaagaaggcgatcctgcatgtgtactgggaagagttccagaaggaccctgtgggcctgatgagccgggtggcccagcctgccagcaagaagatcgatcagaacaagctgaaacctgagatggacgagaagggcaacctgaccaccgccggctttgcctgctctcagtgtggccagcccctgttcgtgtacaagctggagcaggtgtctgagaagggcaaggcttacaccaactacttcggacggtgcaatgtggccgagcacgaaaagctgatcctgctggcccagctgaagcccgagaaggatagcgacgaagccgtgacatatagcctgggaaagtttgggcagagggccctggatttctacagcattcatgtgaccaaggagtccacccaccccgtgaagcccctggcccagatcgccggaaacagatacgcctccggacctgtgggaaaggccctgagcgacgcatgtatgggcacaatcgcctccttcctgtctaagtaccaggacatcatcatcgaacaccagaaggtggtgaagggcaaccagaagagactggagagcctgcgggagctggccggcaaggaaaacctggaataccctagcgtgaccctgccacctcagcctcacaccaaggagggcgttgatgcctacaacgaagtgatcgcccgggtgcgaatgtgggtgaacctgaacctgtggcagaagctgaagctaagcagagatgatgccaagcctctgctgagactgaagggattcccttcctttcctctggtcgagagacaggccaacgaagtggactggtgggacatggtgtgtaacgtgaagaagctgatcaacgagaaaaaggaggatggcaaggtgttttggcagaatctggctggctacaagagacaggaagccctgagaccatacctgagcagcgaggaagatcggaagaagggaaagaaattcgctcggtaccagctgggcgacctgctgctgcacctggaaaagaagcacggcgaggactggggaaaggtgtacgacgaggcctgggagcggattgacaagaaagtggaaggcctgagcaagcacatcaagctggaagaggaacggagaagcgaggacgcccagagcaaggccgccctgaccgactggctgcgggctaaggccagcttcgtgatcgagggcctgaaggaggccgacaaggacgagttctgcagatgcgagctgaagctgcagaagtggtacggggacctgcggggaaagcccttcgccatcgaagccgagaacagcatcctggacatcagcggcttcagcaagcagtacaactgtgccttcatctggcagaaggacggcgtgaagaagctgaacctgtacctgatcatcaactacttcaagggcggcaagctgcggttcaagaagatcaaacctgaagccttcgaagccaacagattctacaccgtgatcaacaaaaagagcggcgagatcgtgcccatggaggtgaacttcaacttcgacgaccccaacctgatcatcctgcctctggcctttggcaagagacagggcagagaattcatctggaacgacctgctgtccctggaaaccggcagcctgaagctggccaacggaagagtgatcgagaagacactgtacaacagaagaacccggcaggatgagcctgccctgttcgtggccctgaccttcgagcggcgggaggtcctggactcctccaatatcaaaccaatgaacctgatcggcgtggcaagaggcgaaaacatccccgccgtgatcgccctgaccgaccccgagggctgcccactgagccggtttaaggatagcctgggaaacccaacccacatcctgagaatcggcgagagctataaggagaagcagcggaccatccaggccaagaaggaggtggagcagcggagagccggcggctacagccggaagtacgccagcaaagccaagaatctggcagacgatatggtgagaaacaccgctagagatctgctgtactacgccgtgacccaggatgccatgctgatcttcgccaacctgagccggggcttcggccggcagggcaagcggaccttcatggccgagagacagtacacacggatggaggactggctgaccgccaagctggcctacgagggcctgagcaagacctacctgtccaagacactggcccagtacacctccaagacatgcagcaactgtgggtttaccatcaccagcgccgactacgacagggtgctggagaagctgaagaagacagcaacaggctggatgaccacaattaacggcaaggagctgaaggtggagggccagattacctactacaacagatacaagagacagaacgtagtcaaggacctgtccgtcgagctggatagactgagcgaagaatctgtgaacaacgacatctcctcctggacaaagggcagaagcggagaagctctgagcctcctgaagaaaagattctcccatagacccgtgcaggagaagttcgtgtgcctgaactgcggcttcgagacacacgcagccgagcaagccgccctgaacatcgccagatcctggctgttcctgcggagccaggagtacaagaaataccagacaaacaagacaaccggcaacaccgataagagagccttcgtcgagacctggcagtccttttaccggaagaagcttaaggaggtgtggaaacctgccgtgcggtctggcggatctggcggaggctccacaagcatccagggcagcctgaccttcaaggacgtggccgtggacttcacccaggaggagtggtgcctgctggaccacagccagaaggagctgtacctggaggtgatgctggagaacgtgcagaacctgctgagcgtgggcctgcccgtgcccagggagtactgcaccagctacttccagcaggagaaggccaggtggctgctggagcagaagtgccccaggagcagcagccccgaggccgagaccaacaccagccccaagaaaaagagaaaagtctaagctgccttctgcggggcttgccttctggccatgcccttcttctctcccttgcacctgtacctcttggtctttgaataaagcctgagtaggaaggctagcaaaaaaaaaaaaaaaaaaaaaaaaaaaaaaaaaaaaaaaaaaaaaaaaaaaaaaaaaaaaaaaaaaaaaaaaaaaaaaaa

SEQ ID NO: 3219 - RNA, 5419 nt, synthetic construct
  source 1..5419: mol_type = other RNA
aggaaataagagagaaaagaagagtaagaagaaatataagagccaccatggcccctaagaagaagcgtaaagtgagccgggtgaacggcagcggcagcggcggcggcatgaaccacgaccaggagttcgacccccctaaggtgtaccctcccgtccccgccgagaagagaaagcccatccgggtcctgagcctgttcgatggcatcgccaccggtctgctggtgctgaaggacctgggcatccaggtggataggtacattgcctccgaggtgtgcgaggactccatcaccgtgggaatggtgcgtcatcagggcaagatcatgtacgtgggcgacgtgcggagcgtgacacagaagcatatccaggagtggggccctttcgacctggtgatcggcggcagcccttgcaatgacctgagcatcgtgaacccagcccggaagggcctgtacgagggaaccggcagactgttcttcgagttttacagactgctgcacgacgcccggcctaaggaaggcgacgaccggcccttcttttggctgttcgagaatgtggtggccatgggagtcagcgacaagcgggatattagccggttcctggagagcaaccccgtgatgatcgatgccaaggaagtgagcgccgcccaccgggccagatacttctggggcaatctgcctggcatgaacagacccctggccagcaccgtgaacgacaagctggagctgcaggagtgcctggagcacggccggatcgccaagttcagcaaggtgagaaccatcaccacccgaagcaacagcatcaaacaaggcaaggaccagcactttcctgtgttcatgaacgagaaggaggacatcctgtggtgtaccgagatggagagagtgttcgggttcccagtccactacacagatgtcagcaacatgtctagactggccagacagagactgctgggaagaagctggtccgtccctgtgatcagacacctgttcgcccctctgaaggagtacttcgcctgcgtgagcagcggcaacagcaacgccaacagccggggccccagcttctctagcggcctggtgccactgtccctgagagggagccacatgggccccatggagatctacaaaaccgtgagcgcctggaagcggcagcctgtgcgcgtgctgagcctgtttcggaatatcgataaagtcctgaaaagcctgggattcctggagagcggctctggctccggcggtggcaccctgaagtacgtggaggatgtgacaaacgtggtcagacgggatgtggagaagtggggccccttcgatctggtgtacggcagcacccaacccctgggcagctcttgtgaccggtgccctggctggtacatgtttcagttccaccggatcctgcagtacgccctgccgagacaggagtcccagcggccattcttttggattttcatggacaacttgctgctgaccgaggatgaccaggaaactaccactcggttcctgcagaccgaagccgtgaccctgcaggacgtgagaggccgggactaccagaacgccatgcgggtgtggtccaacatccctggactgaaaagcaagcacgcacctctgacccctaaagaagaggagtacctgcaggcccaggtgcggagcagaagcaagctggacgcccctaaggtggatctgctggtgaagaattgcctcctgcccctgagagagtacttcaagtatttcagccagaatagtctgcccctgggcggcccaagcagcggcgcccctcctcccagcggcggcagcccagccggctccccaacctctaccgaggagggcacctctgagtccgccacccccgagagcggccctggcacctccaccgagcccagcgagggcagcgcacccggcagccctgccggcagccccacctccacagaggagggaaccagcaccgagcccagcgaaggcagcgccccaggcaccagcaccgagcctagtgagggcggctctggcggcggcagcgcccaggagattaaacggatcaacaagatcagaagaagacttgtgaaagacagcaacaccaagaaggccggcaagacaggccccatgaaaaccctgctggttagagtgatgacacccgatctgagagagcggctggaaaacctgagaaagaagcctgaaaatatcccccagcccatcagcaatacatctagagccaacctgaataagctgctgaccgattacaccgaaatgaagaaggcgatcctgcatgtgtactgggaagagttccagaaggaccctgtgggcctgatgagccgggtggcccagcctgccagcaagaagatcgatcagaacaagctgaaacctgagatggacgagaagggcaacctgaccaccgccggctttgcctgctctcagtgtggccagcccctgttcgtgtacaagctggagcaggtgtctgagaagggcaaggcttacaccaactacttcggacggtgcaatgtggccgagcacgaaaagctgatcctgctggcccagctgaagcccgagaaggatagcgacgaagccgtgacatatagcctgggaaagtttgggcagagggccctggatttctacagcattcatgtgaccaaggagtccacccaccccgtgaagcccctggcccagatcgccggaaacagatacgcctccggacctgtgggaaaggccctgagcgacgcatgtatgggcacaatcgcctccttcctgtctaagtaccaggacatcatcatcgaacaccagaaggtggtgaagggcaaccagaagagactggagagcctgcgggagctggccggcaaggaaaacctggaataccctagcgtgaccctgccacctcagcctcacaccaaggagggcgttgatgcctacaacgaagtgatcgcccgggtgcgaatgtgggtgaacctgaacctgtggcagaagctgaagctaagcagagatgatgccaagcctctgctgagactgaagggattcccttcctttcctctggtcgagagacaggccaacgaagtggactggtgggacatggtgtgtaacgtgaagaagctgatcaacgagaaaaaggaggatggcaaggtgttttggcagaatctggctggctacaagagacaggaagccctgagaccatacctgagcagcgaggaagatcggaagaagggaaagaaattcgctcggtaccagctgggcgacctgctgctgcacctggaaaagaagcacggcgaggactggggaaaggtgtacgacgaggcctgggagcggattgacaagaaagtggaaggcctgagcaagcacatcaagctggaagaggaacggagaagcgaggacgcccagagcaaggccgccctgaccgactggctgcgggctaaggccagcttcgtgatcgagggcctgaaggaggccgacaaggacgagttctgcagatgcgagctgaagctgcagaagtggtacggggacctgcggggaaagcccttcgccatcgaagccgagaacagcatcctggacatcagcggcttcagcaagcagtacaactgtgccttcatctggcagaaggacggcgtgaagaagctgaacctgtacctgatcatcaactacttcaagggcggcaagctgcggttcaagaagatcaaacctgaagccttcgaagccaacagattctacaccgtgatcaacaaaaagagcggcgagatcgtgcccatggaggtgaacttcaacttcgacgaccccaacctgatcatcctgcctctggcctttggcaagagacagggcagagaattcatctggaacgacctgctgtccctggaaaccggcagcctgaagctggccaacggaagagtgatcgagaagacactgtacaacagaagaacccggcaggatgagcctgccctgttcgtggccctgaccttcgagcggcgggaggtcctggactcctccaatatcaaaccaatgaacctgatcggcgtggcaagaggcgaaaacatccccgccgtgatcgccctgaccgaccccgagggctgcccactgagccggtttaaggatagcctgggaaacccaacccacatcctgagaatcggcgagagctataaggagaagcagcggaccatccaggccaagaaggaggtggagcagcggagagccggcggctacagccggaagtacgccagcaaagccaagaatctggcagacgatatggtgagaaacaccgctagagatctgctgtactacgccgtgacccaggatgccatgctgatcttcgccaacctgagccggggcttcggccggcagggcaagcggaccttcatggccgagagacagtacacacggatggaggactggctgaccgccaagctggcctacgagggcctgagcaagacctacctgtccaagacactggcccagtacacctccaagacatgcagcaactgtgggtttaccatcaccagcgccgactacgacagggtgctggagaagctgaagaagacagcaacaggctggatgaccacaattaacggcaaggagctgaaggtggagggccagattacctactacaacagatacaagagacagaacgtagtcaaggacctgtccgtcgagctggatagactgagcgaagaatctgtgaacaacgacatctcctcctggacaaagggcagaagcggagaagctctgagcctcctgaagaaaagattctcccatagacccgtgcaggagaagttcgtgtgcctgaactgcggcttcgagacacacgcagccgagcaagccgccctgaacatcgccagatcctggctgttcctgcggagccaggagtacaagaaataccagacaaacaagacaaccggcaacaccgataagagagccttcgtcgagacctggcagtccttttaccggaagaagcttaaggaggtgtggaaacctgccgtgcggtctggcggatctggcggaggctccacaagcggcaccgtggtgttcagcgacgtgagcgtggacttcagccaggaggagtgggagtgcctggaccccgtgcagagggacctgtacagggaggtgatgctggagaactacagcaacctggtgagcgtgggcgccggcccctacatccccaagccccaggtgatcagcctgctggagcagggcaaggagccctggatggtgggcagggagctgaccaggggcctgtgcagcgacctggagagcatgaccagccccaagaaaaagagaaaagtctaagctgccttctgcggggcttgccttctggccatgcccttcttctctcccttgcacctgtacctcttggtctttgaataaagcctgagtaggaaggctagcaaaaaaaaaaaaaaaaaaaaaaaaaaaaaaaaaaaaaaaaaaaaaaaaaaaaaaaaaaaaaaaaaaaaaaaaaaaaaaaa

SEQ ID NO: 3220 - RNA, 5419 nt, synthetic construct
  source 1..5419: mol_type = other RNA
aggaaataagagagaaaagaagagtaagaagaaatataagagccaccatggcccctaagaagaagcgtaaagtgagccgggtgaacggcagcggcagcggcggcggcatgaaccacgaccaggagttcgacccccctaaggtgtaccctcccgtccccgccgagaagagaaagcccatccgggtcctgagcctgttcgatggcatcgccaccggtctgctggtgctgaaggacctgggcatccaggtggataggtacattgcctccgaggtgtgcgaggactccatcaccgtgggaatggtgcgtcatcagggcaagatcatgtacgtgggcgacgtgcggagcgtgacacagaagcatatccaggagtggggccctttcgacctggtgatcggcggcagcccttgcaatgacctgagcatcgtgaacccagcccggaagggcctgtacgagggaaccggcagactgttcttcgagttttacagactgctgcacgacgcccggcctaaggaaggcgacgaccggcccttcttttggctgttcgagaatgtggtggccatgggagtcagcgacaagcgggatattagccggttcctggagagcaaccccgtgatgatcgatgccaaggaagtgagcgccgcccaccgggccagatacttctggggcaatctgcctggcatgaacagacccctggccagcaccgtgaacgacaagctggagctgcaggagtgcctggagcacggccggatcgccaagttcagcaaggtgagaaccatcaccacccgaagcaacagcatcaaacaaggcaaggaccagcactttcctgtgttcatgaacgagaaggaggacatcctgtggtgtaccgagatggagagagtgttcgggttcccagtccactacacagatgtcagcaacatgtctagactggccagacagagactgctgggaagaagctggtccgtccctgtgatcagacacctgttcgcccctctgaaggagtacttcgcctgcgtgagcagcggcaacagcaacgccaacagccggggccccagcttctctagcggcctggtgccactgtccctgagagggagccacatgggccccatggagatctacaaaaccgtgagcgcctggaagcggcagcctgtgcgcgtgctgagcctgtttcggaatatcgataaagtcctgaaaagcctgggattcctggagagcggctctggctccggcggtggcaccctgaagtacgtggaggatgtgacaaacgtggtcagacgggatgtggagaagtggggccccttcgatctggtgtacggcagcacccaacccctgggcagctcttgtgaccggtgccctggctggtacatgtttcagttccaccggatcctgcagtacgccctgccgagacaggagtcccagcggccattcttttggattttcatggacaacttgctgctgaccgaggatgaccaggaaactaccactcggttcctgcagaccgaagccgtgaccctgcaggacgtgagaggccgggactaccagaacgccatgcgggtgtggtccaacatccctggactgaaaagcaagcacgcacctctgacccctaaagaagaggagtacctgcaggcccaggtgcggagcagaagcaagctggacgcccctaaggtggatctgctggtgaagaattgcctcctgcccctgagagagtacttcaagtatttcagccagaatagtctgcccctgggcggcccaagcagcggcgcccctcctcccagcggcggcagcccagccggctccccaacctctaccgaggagggcacctctgagtccgccacccccgagagcggccctggcacctccaccgagcccagcgagggcagcgcacccggcagccctgccggcagccccacctccacagaggagggaaccagcaccgagcccagcgaaggcagcgccccaggcaccagcaccgagcctagtgagggcggctctggcggcggcagcgcccaggagattaaacggatcaacaagatcagaagaagacttgtgaaagacagcaacaccaagaaggccggcaagacaggccccatgaaaaccctgctggttagagtgatgacacccgatctgagagagcggctggaaaacctgagaaagaagcctgaaaatatcccccagcccatcagcaatacatctagagccaacctgaataagctgctgaccgattacaccgaaatgaagaaggcgatcctgcatgtgtactgggaagagttccagaaggaccctgtgggcctgatgagccgggtggcccagcctgccagcaagaagatcgatcagaacaagctgaaacctgagatggacgagaagggcaacctgaccaccgccggctttgcctgctctcagtgtggccagcccctgttcgtgtacaagctggagcaggtgtctgagaagggcaaggcttacaccaactacttcggacggtgcaatgtggccgagcacgaaaagctgatcctgctggcccagctgaagcccgagaaggatagcgacgaagccgtgacatatagcctgggaaagtttgggcagagggccctggatttctacagcattcatgtgaccaaggagtccacccaccccgtgaagcccctggcccagatcgccggaaacagatacgcctccggacctgtgggaaaggccctgagcgacgcatgtatgggcacaatcgcctccttcctgtctaagtaccaggacatcatcatcgaacaccagaaggtggtgaagggcaaccagaagagactggagagcctgcgggagctggccggcaaggaaaacctggaataccctagcgtgaccctgccacctcagcctcacaccaaggagggcgttgatgcctacaacgaagtgatcgcccgggtgcgaatgtgggtgaacctgaacctgtggcagaagctgaagctaagcagagatgatgccaagcctctgctgagactgaagggattcccttcctttcctctggtcgagagacaggccaacgaagtggactggtgggacatggtgtgtaacgtgaagaagctgatcaacgagaaaaaggaggatggcaaggtgttttggcagaatctggctggctacaagagacaggaagccctgagaccatacctgagcagcgaggaagatcggaagaagggaaagaaattcgctcggtaccagctgggcgacctgctgctgcacctggaaaagaagcacggcgaggactggggaaaggtgtacgacgaggcctgggagcggattgacaagaaagtggaaggcctgagcaagcacatcaagctggaagaggaacggagaagcgaggacgcccagagcaaggccgccctgaccgactggctgcgggctaaggccagcttcgtgatcgagggcctgaaggaggccgacaaggacgagttctgcagatgcgagctgaagctgcagaagtggtacggggacctgcggggaaagcccttcgccatcgaagccgagaacagcatcctggacatcagcggcttcagcaagcagtacaactgtgccttcatctggcagaaggacggcgtgaagaagctgaacctgtacctgatcatcaactacttcaagggcggcaagctgcggttcaagaagatcaaacctgaagccttcgaagccaacagattctacaccgtgatcaacaaaaagagcggcgagatcgtgcccatggaggtgaacttcaacttcgacgaccccaacctgatcatcctgcctctggcctttggcaagagacagggcagagaattcatctggaacgacctgctgtccctggaaaccggcagcctgaagctggccaacggaagagtgatcgagaagacactgtacaacagaagaacccggcaggatgagcctgccctgttcgtggccctgaccttcgagcggcgggaggtcctggactcctccaatatcaaaccaatgaacctgatcggcgtggcaagaggcgaaaacatccccgccgtgatcgccctgaccgaccccgagggctgcccactgagccggtttaaggatagcctgggaaacccaacccacatcctgagaatcggcgagagctataaggagaagcagcggaccatccaggccaagaaggaggtggagcagcggagagccggcggctacagccggaagtacgccagcaaagccaagaatctggcagacgatatggtgagaaacaccgctagagatctgctgtactacgccgtgacccaggatgccatgctgatcttcgccaacctgagccggggcttcggccggcagggcaagcggaccttcatggccgagagacagtacacacggatggaggactggctgaccgccaagctggcctacgagggcctgagcaagacctacctgtccaagacactggcccagtacacctccaagacatgcagcaactgtgggtttaccatcaccagcgccgactacgacagggtgctggagaagctgaagaagacagcaacaggctggatgaccacaattaacggcaaggagctgaaggtggagggccagattacctactacaacagatacaagagacagaacgtagtcaaggacctgtccgtcgagctggatagactgagcgaagaatctgtgaacaacgacatctcctcctggacaaagggcagaagcggagaagctctgagcctcctgaagaaaagattctcccatagacccgtgcaggagaagttcgtgtgcctgaactgcggcttcgagacacacgcagccgagcaagccgccctgaacatcgccagatcctggctgttcctgcggagccaggagtacaagaaataccagacaaacaagacaaccggcaacaccgataagagagccttcgtcgagacctggcagtccttttaccggaagaagcttaaggaggtgtggaaacctgccgtgcggtctggcggatctggcggaggctccacaagcgagatgggcctgctgaccttcagggacatcgccatcgagttcagcctggaggagtggcagtgcctggactgcgcccagaggaacctgtacagggacgtgatgctggagaactacaggaacctggtgagcctgggcatcgccgtgagcaagcccgacctgatcacctgcctggagcagaacaaggagagccagaacatcaagaggaacgagatggtggccaagcaccccgtgaccaggagccacaccagccccaagaaaaagagaaaagtctaagctgccttctgcggggcttgccttctggccatgcccttcttctctcccttgcacctgtacctcttggtctttgaataaagcctgagtaggaaggctagcaaaaaaaaaaaaaaaaaaaaaaaaaaaaaaaaaaaaaaaaaaaaaaaaaaaaaaaaaaaaaaaaaaaaaaaaaaaaaaaa

SEQ ID NO: 3221 - RNA, 5419 nt, synthetic construct
  source 1..5419: mol_type = other RNA
aggaaataagagagaaaagaagagtaagaagaaatataagagccaccatggcccctaagaagaagcgtaaagtgagccgggtgaacggcagcggcagcggcggcggcatgaaccacgaccaggagttcgacccccctaaggtgtaccctcccgtccccgccgagaagagaaagcccatccgggtcctgagcctgttcgatggcatcgccaccggtctgctggtgctgaaggacctgggcatccaggtggataggtacattgcctccgaggtgtgcgaggactccatcaccgtgggaatggtgcgtcatcagggcaagatcatgtacgtgggcgacgtgcggagcgtgacacagaagcatatccaggagtggggccctttcgacctggtgatcggcggcagcccttgcaatgacctgagcatcgtgaacccagcccggaagggcctgtacgagggaaccggcagactgttcttcgagttttacagactgctgcacgacgcccggcctaaggaaggcgacgaccggcccttcttttggctgttcgagaatgtggtggccatgggagtcagcgacaagcgggatattagccggttcctggagagcaaccccgtgatgatcgatgccaaggaagtgagcgccgcccaccgggccagatacttctggggcaatctgcctggcatgaacagacccctggccagcaccgtgaacgacaagctggagctgcaggagtgcctggagcacggccggatcgccaagttcagcaaggtgagaaccatcaccacccgaagcaacagcatcaaacaaggcaaggaccagcactttcctgtgttcatgaacgagaaggaggacatcctgtggtgtaccgagatggagagagtgttcgggttcccagtccactacacagatgtcagcaacatgtctagactggccagacagagactgctgggaagaagctggtccgtccctgtgatcagacacctgttcgcccctctgaaggagtacttcgcctgcgtgagcagcggcaacagcaacgccaacagccggggccccagcttctctagcggcctggtgccactgtccctgagagggagccacatgggccccatggagatctacaaaaccgtgagcgcctggaagcggcagcctgtgcgcgtgctgagcctgtttcggaatatcgataaagtcctgaaaagcctgggattcctggagagcggctctggctccggcggtggcaccctgaagtacgtggaggatgtgacaaacgtggtcagacgggatgtggagaagtggggccccttcgatctggtgtacggcagcacccaacccctgggcagctcttgtgaccggtgccctggctggtacatgtttcagttccaccggatcctgcagtacgccctgccgagacaggagtcccagcggccattcttttggattttcatggacaacttgctgctgaccgaggatgaccaggaaactaccactcggttcctgcagaccgaagccgtgaccctgcaggacgtgagaggccgggactaccagaacgccatgcgggtgtggtccaacatccctggactgaaaagcaagcacgcacctctgacccctaaagaagaggagtacctgcaggcccaggtgcggagcagaagcaagctggacgcccctaaggtggatctgctggtgaagaattgcctcctgcccctgagagagtacttcaagtatttcagccagaatagtctgcccctgggcggcccaagcagcggcgcccctcctcccagcggcggcagcccagccggctccccaacctctaccgaggagggcacctctgagtccgccacccccgagagcggccctggcacctccaccgagcccagcgagggcagcgcacccggcagccctgccggcagccccacctccacagaggagggaaccagcaccgagcccagcgaaggcagcgccccaggcaccagcaccgagcctagtgagggcggctctggcggcggcagcgcccaggagattaaacggatcaacaagatcagaagaagacttgtgaaagacagcaacaccaagaaggccggcaagacaggccccatgaaaaccctgctggttagagtgatgacacccgatctgagagagcggctggaaaacctgagaaagaagcctgaaaatatcccccagcccatcagcaatacatctagagccaacctgaataagctgctgaccgattacaccgaaatgaagaaggcgatcctgcatgtgtactgggaagagttccagaaggaccctgtgggcctgatgagccgggtggcccagcctgccagcaagaagatcgatcagaacaagctgaaacctgagatggacgagaagggcaacctgaccaccgccggctttgcctgctctcagtgtggccagcccctgttcgtgtacaagctggagcaggtgtctgagaagggcaaggcttacaccaactacttcggacggtgcaatgtggccgagcacgaaaagctgatcctgctggcccagctgaagcccgagaaggatagcgacgaagccgtgacatatagcctgggaaagtttgggcagagggccctggatttctacagcattcatgtgaccaaggagtccacccaccccgtgaagcccctggcccagatcgccggaaacagatacgcctccggacctgtgggaaaggccctgagcgacgcatgtatgggcacaatcgcctccttcctgtctaagtaccaggacatcatcatcgaacaccagaaggtggtgaagggcaaccagaagagactggagagcctgcgggagctggccggcaaggaaaacctggaataccctagcgtgaccctgccacctcagcctcacaccaaggagggcgttgatgcctacaacgaagtgatcgcccgggtgcgaatgtgggtgaacctgaacctgtggcagaagctgaagctaagcagagatgatgccaagcctctgctgagactgaagggattcccttcctttcctctggtcgagagacaggccaacgaagtggactggtgggacatggtgtgtaacgtgaagaagctgatcaacgagaaaaaggaggatggcaaggtgttttggcagaatctggctggctacaagagacaggaagccctgagaccatacctgagcagcgaggaagatcggaagaagggaaagaaattcgctcggtaccagctgggcgacctgctgctgcacctggaaaagaagcacggcgaggactggggaaaggtgtacgacgaggcctgggagcggattgacaagaaagtggaaggcctgagcaagcacatcaagctggaagaggaacggagaagcgaggacgcccagagcaaggccgccctgaccgactggctgcgggctaaggccagcttcgtgatcgagggcctgaaggaggccgacaaggacgagttctgcagatgcgagctgaagctgcagaagtggtacggggacctgcggggaaagcccttcgccatcgaagccgagaacagcatcctggacatcagcggcttcagcaagcagtacaactgtgccttcatctggcagaaggacggcgtgaagaagctgaacctgtacctgatcatcaactacttcaagggcggcaagctgcggttcaagaagatcaaacctgaagccttcgaagccaacagattctacaccgtgatcaacaaaaagagcggcgagatcgtgcccatggaggtgaacttcaacttcgacgaccccaacctgatcatcctgcctctggcctttggcaagagacagggcagagaattcatctggaacgacctgctgtccctggaaaccggcagcctgaagctggccaacggaagagtgatcgagaagacactgtacaacagaagaacccggcaggatgagcctgccctgttcgtggccctgaccttcgagcggcgggaggtcctggactcctccaatatcaaaccaatgaacctgatcggcgtggcaagaggcgaaaacatccccgccgtgatcgccctgaccgaccccgagggctgcccactgagccggtttaaggatagcctgggaaacccaacccacatcctgagaatcggcgagagctataaggagaagcagcggaccatccaggccaagaaggaggtggagcagcggagagccggcggctacagccggaagtacgccagcaaagccaagaatctggcagacgatatggtgagaaacaccgctagagatctgctgtactacgccgtgacccaggatgccatgctgatcttcgccaacctgagccggggcttcggccggcagggcaagcggaccttcatggccgagagacagtacacacggatggaggactggctgaccgccaagctggcctacgagggcctgagcaagacctacctgtccaagacactggcccagtacacctccaagacatgcagcaactgtgggtttaccatcaccagcgccgactacgacagggtgctggagaagctgaagaagacagcaacaggctggatgaccacaattaacggcaaggagctgaaggtggagggccagattacctactacaacagatacaagagacagaacgtagtcaaggacctgtccgtcgagctggatagactgagcgaagaatctgtgaacaacgacatctcctcctggacaaagggcagaagcggagaagctctgagcctcctgaagaaaagattctcccatagacccgtgcaggagaagttcgtgtgcctgaactgcggcttcgagacacacgcagccgagcaagccgccctgaacatcgccagatcctggctgttcctgcggagccaggagtacaagaaataccagacaaacaagacaaccggcaacaccgataagagagccttcgtcgagacctggcagtccttttaccggaagaagcttaaggaggtgtggaaacctgccgtgcggtctggcggatctggcggaggctccacaagcaccagcgcccccgtgaccttcggcgacctggccatctacttcagccaggaggagtgggagtggctgagccccgtgcagaaggccctgtacgaggacgtgatgctggagaactaccagaccctggccagcctgggcctgagcttcaggaggcccaacgtgatcaccctgctggagaagggcaaggccccctggatggtggagcccgtgaggaggaggaggggcctggacagcggcagcaagtgcaccagccccaagaaaaagagaaaagtctaagctgccttctgcggggcttgccttctggccatgcccttcttctctcccttgcacctgtacctcttggtctttgaataaagcctgagtaggaaggctagcaaaaaaaaaaaaaaaaaaaaaaaaaaaaaaaaaaaaaaaaaaaaaaaaaaaaaaaaaaaaaaaaaaaaaaaaaaaaaaaa

SEQ ID NO: 3222 - RNA, 5419 nt, synthetic construct
  source 1..5419: mol_type = other RNA
aggaaataagagagaaaagaagagtaagaagaaatataagagccaccatggcccctaagaagaagcgtaaagtgagccgggtgaacggcagcggcagcggcggcggcatgaaccacgaccaggagttcgacccccctaaggtgtaccctcccgtccccgccgagaagagaaagcccatccgggtcctgagcctgttcgatggcatcgccaccggtctgctggtgctgaaggacctgggcatccaggtggataggtacattgcctccgaggtgtgcgaggactccatcaccgtgggaatggtgcgtcatcagggcaagatcatgtacgtgggcgacgtgcggagcgtgacacagaagcatatccaggagtggggccctttcgacctggtgatcggcggcagcccttgcaatgacctgagcatcgtgaacccagcccggaagggcctgtacgagggaaccggcagactgttcttcgagttttacagactgctgcacgacgcccggcctaaggaaggcgacgaccggcccttcttttggctgttcgagaatgtggtggccatgggagtcagcgacaagcgggatattagccggttcctggagagcaaccccgtgatgatcgatgccaaggaagtgagcgccgcccaccgggccagatacttctggggcaatctgcctggcatgaacagacccctggccagcaccgtgaacgacaagctggagctgcaggagtgcctggagcacggccggatcgccaagttcagcaaggtgagaaccatcaccacccgaagcaacagcatcaaacaaggcaaggaccagcactttcctgtgttcatgaacgagaaggaggacatcctgtggtgtaccgagatggagagagtgttcgggttcccagtccactacacagatgtcagcaacatgtctagactggccagacagagactgctgggaagaagctggtccgtccctgtgatcagacacctgttcgcccctctgaaggagtacttcgcctgcgtgagcagcggcaacagcaacgccaacagccggggccccagcttctctagcggcctggtgccactgtccctgagagggagccacatgggccccatggagatctacaaaaccgtgagcgcctggaagcggcagcctgtgcgcgtgctgagcctgtttcggaatatcgataaagtcctgaaaagcctgggattcctggagagcggctctggctccggcggtggcaccctgaagtacgtggaggatgtgacaaacgtggtcagacgggatgtggagaagtggggccccttcgatctggtgtacggcagcacccaacccctgggcagctcttgtgaccggtgccctggctggtacatgtttcagttccaccggatcctgcagtacgccctgccgagacaggagtcccagcggccattcttttggattttcatggacaacttgctgctgaccgaggatgaccaggaaactaccactcggttcctgcagaccgaagccgtgaccctgcaggacgtgagaggccgggactaccagaacgccatgcgggtgtggtccaacatccctggactgaaaagcaagcacgcacctctgacccctaaagaagaggagtacctgcaggcccaggtgcggagcagaagcaagctggacgcccctaaggtggatctgctggtgaagaattgcctcctgcccctgagagagtacttcaagtatttcagccagaatagtctgcccctgggcggcccaagcagcggcgcccctcctcccagcggcggcagcccagccggctccccaacctctaccgaggagggcacctctgagtccgccacccccgagagcggccctggcacctccaccgagcccagcgagggcagcgcacccggcagccctgccggcagccccacctccacagaggagggaaccagcaccgagcccagcgaaggcagcgccccaggcaccagcaccgagcctagtgagggcggctctggcggcggcagcgcccaggagattaaacggatcaacaagatcagaagaagacttgtgaaagacagcaacaccaagaaggccggcaagacaggccccatgaaaaccctgctggttagagtgatgacacccgatctgagagagcggctggaaaacctgagaaagaagcctgaaaatatcccccagcccatcagcaatacatctagagccaacctgaataagctgctgaccgattacaccgaaatgaagaaggcgatcctgcatgtgtactgggaagagttccagaaggaccctgtgggcctgatgagccgggtggcccagcctgccagcaagaagatcgatcagaacaagctgaaacctgagatggacgagaagggcaacctgaccaccgccggctttgcctgctctcagtgtggccagcccctgttcgtgtacaagctggagcaggtgtctgagaagggcaaggcttacaccaactacttcggacggtgcaatgtggccgagcacgaaaagctgatcctgctggcccagctgaagcccgagaaggatagcgacgaagccgtgacatatagcctgggaaagtttgggcagagggccctggatttctacagcattcatgtgaccaaggagtccacccaccccgtgaagcccctggcccagatcgccggaaacagatacgcctccggacctgtgggaaaggccctgagcgacgcatgtatgggcacaatcgcctccttcctgtctaagtaccaggacatcatcatcgaacaccagaaggtggtgaagggcaaccagaagagactggagagcctgcgggagctggccggcaaggaaaacctggaataccctagcgtgaccctgccacctcagcctcacaccaaggagggcgttgatgcctacaacgaagtgatcgcccgggtgcgaatgtgggtgaacctgaacctgtggcagaagctgaagctaagcagagatgatgccaagcctctgctgagactgaagggattcccttcctttcctctggtcgagagacaggccaacgaagtggactggtgggacatggtgtgtaacgtgaagaagctgatcaacgagaaaaaggaggatggcaaggtgttttggcagaatctggctggctacaagagacaggaagccctgagaccatacctgagcagcgaggaagatcggaagaagggaaagaaattcgctcggtaccagctgggcgacctgctgctgcacctggaaaagaagcacggcgaggactggggaaaggtgtacgacgaggcctgggagcggattgacaagaaagtggaaggcctgagcaagcacatcaagctggaagaggaacggagaagcgaggacgcccagagcaaggccgccctgaccgactggctgcgggctaaggccagcttcgtgatcgagggcctgaaggaggccgacaaggacgagttctgcagatgcgagctgaagctgcagaagtggtacggggacctgcggggaaagcccttcgccatcgaagccgagaacagcatcctggacatcagcggcttcagcaagcagtacaactgtgccttcatctggcagaaggacggcgtgaagaagctgaacctgtacctgatcatcaactacttcaagggcggcaagctgcggttcaagaagatcaaacctgaagccttcgaagccaacagattctacaccgtgatcaacaaaaagagcggcgagatcgtgcccatggaggtgaacttcaacttcgacgaccccaacctgatcatcctgcctctggcctttggcaagagacagggcagagaattcatctggaacgacctgctgtccctggaaaccggcagcctgaagctggccaacggaagagtgatcgagaagacactgtacaacagaagaacccggcaggatgagcctgccctgttcgtggccctgaccttcgagcggcgggaggtcctggactcctccaatatcaaaccaatgaacctgatcggcgtggcaagaggcgaaaacatccccgccgtgatcgccctgaccgaccccgagggctgcccactgagccggtttaaggatagcctgggaaacccaacccacatcctgagaatcggcgagagctataaggagaagcagcggaccatccaggccaagaaggaggtggagcagcggagagccggcggctacagccggaagtacgccagcaaagccaagaatctggcagacgatatggtgagaaacaccgctagagatctgctgtactacgccgtgacccaggatgccatgctgatcttcgccaacctgagccggggcttcggccggcagggcaagcggaccttcatggccgagagacagtacacacggatggaggactggctgaccgccaagctggcctacgagggcctgagcaagacctacctgtccaagacactggcccagtacacctccaagacatgcagcaactgtgggtttaccatcaccagcgccgactacgacagggtgctggagaagctgaagaagacagcaacaggctggatgaccacaattaacggcaaggagctgaaggtggagggccagattacctactacaacagatacaagagacagaacgtagtcaaggacctgtccgtcgagctggatagactgagcgaagaatctgtgaacaacgacatctcctcctggacaaagggcagaagcggagaagctctgagcctcctgaagaaaagattctcccatagacccgtgcaggagaagttcgtgtgcctgaactgcggcttcgagacacacgcagccgagcaagccgccctgaacatcgccagatcctggctgttcctgcggagccaggagtacaagaaataccagacaaacaagacaaccggcaacaccgataagagagccttcgtcgagacctggcagtccttttaccggaagaagcttaaggaggtgtggaaacctgccgtgcggtctggcggatctggcggaggctccacaagcgacagcgtgaccttcgaggacgtggccatcagcttcaccgtggaggagtgggccctgctggaccccagccagaagaagctgcacagggacgtgatggaggagaccttcaggaacctggccgccatcggcaggacccaggacgaccagcacatcgacaacgaccacaggtacagcaggaggaaccagaggaacgaggtggtggagaggctgctggagaggaacaagagcagcgagtgcaaggagaccagccccaagaaaaagagaaaagtctaagctgccttctgcggggcttgccttctggccatgcccttcttctctcccttgcacctgtacctcttggtctttgaataaagcctgagtaggaaggctagcaaaaaaaaaaaaaaaaaaaaaaaaaaaaaaaaaaaaaaaaaaaaaaaaaaaaaaaaaaaaaaaaaaaaaaaaaaaaaaaa

SEQ ID NO: 3223 - RNA, 5419 nt, synthetic construct
  source 1..5419: mol_type = other RNA
aggaaataagagagaaaagaagagtaagaagaaatataagagccaccatggcccctaagaagaagcgtaaagtgagccgggtgaacggcagcggcagcggcggcggcatgaaccacgaccaggagttcgacccccctaaggtgtaccctcccgtccccgccgagaagagaaagcccatccgggtcctgagcctgttcgatggcatcgccaccggtctgctggtgctgaaggacctgggcatccaggtggataggtacattgcctccgaggtgtgcgaggactccatcaccgtgggaatggtgcgtcatcagggcaagatcatgtacgtgggcgacgtgcggagcgtgacacagaagcatatccaggagtggggccctttcgacctggtgatcggcggcagcccttgcaatgacctgagcatcgtgaacccagcccggaagggcctgtacgagggaaccggcagactgttcttcgagttttacagactgctgcacgacgcccggcctaaggaaggcgacgaccggcccttcttttggctgttcgagaatgtggtggccatgggagtcagcgacaagcgggatattagccggttcctggagagcaaccccgtgatgatcgatgccaaggaagtgagcgccgcccaccgggccagatacttctggggcaatctgcctggcatgaacagacccctggccagcaccgtgaacgacaagctggagctgcaggagtgcctggagcacggccggatcgccaagttcagcaaggtgagaaccatcaccacccgaagcaacagcatcaaacaaggcaaggaccagcactttcctgtgttcatgaacgagaaggaggacatcctgtggtgtaccgagatggagagagtgttcgggttcccagtccactacacagatgtcagcaacatgtctagactggccagacagagactgctgggaagaagctggtccgtccctgtgatcagacacctgttcgcccctctgaaggagtacttcgcctgcgtgagcagcggcaacagcaacgccaacagccggggccccagcttctctagcggcctggtgccactgtccctgagagggagccacatgggccccatggagatctacaaaaccgtgagcgcctggaagcggcagcctgtgcgcgtgctgagcctgtttcggaatatcgataaagtcctgaaaagcctgggattcctggagagcggctctggctccggcggtggcaccctgaagtacgtggaggatgtgacaaacgtggtcagacgggatgtggagaagtggggccccttcgatctggtgtacggcagcacccaacccctgggcagctcttgtgaccggtgccctggctggtacatgtttcagttccaccggatcctgcagtacgccctgccgagacaggagtcccagcggccattcttttggattttcatggacaacttgctgctgaccgaggatgaccaggaaactaccactcggttcctgcagaccgaagccgtgaccctgcaggacgtgagaggccgggactaccagaacgccatgcgggtgtggtccaacatccctggactgaaaagcaagcacgcacctctgacccctaaagaagaggagtacctgcaggcccaggtgcggagcagaagcaagctggacgcccctaaggtggatctgctggtgaagaattgcctcctgcccctgagagagtacttcaagtatttcagccagaatagtctgcccctgggcggcccaagcagcggcgcccctcctcccagcggcggcagcccagccggctccccaacctctaccgaggagggcacctctgagtccgccacccccgagagcggccctggcacctccaccgagcccagcgagggcagcgcacccggcagccctgccggcagccccacctccacagaggagggaaccagcaccgagcccagcgaaggcagcgccccaggcaccagcaccgagcctagtgagggcggctctggcggcggcagcgcccaggagattaaacggatcaacaagatcagaagaagacttgtgaaagacagcaacaccaagaaggccggcaagacaggccccatgaaaaccctgctggttagagtgatgacacccgatctgagagagcggctggaaaacctgagaaagaagcctgaaaatatcccccagcccatcagcaatacatctagagccaacctgaataagctgctgaccgattacaccgaaatgaagaaggcgatcctgcatgtgtactgggaagagttccagaaggaccctgtgggcctgatgagccgggtggcccagcctgccagcaagaagatcgatcagaacaagctgaaacctgagatggacgagaagggcaacctgaccaccgccggctttgcctgctctcagtgtggccagcccctgttcgtgtacaagctggagcaggtgtctgagaagggcaaggcttacaccaactacttcggacggtgcaatgtggccgagcacgaaaagctgatcctgctggcccagctgaagcccgagaaggatagcgacgaagccgtgacatatagcctgggaaagtttgggcagagggccctggatttctacagcattcatgtgaccaaggagtccacccaccccgtgaagcccctggcccagatcgccggaaacagatacgcctccggacctgtgggaaaggccctgagcgacgcatgtatgggcacaatcgcctccttcctgtctaagtaccaggacatcatcatcgaacaccagaaggtggtgaagggcaaccagaagagactggagagcctgcgggagctggccggcaaggaaaacctggaataccctagcgtgaccctgccacctcagcctcacaccaaggagggcgttgatgcctacaacgaagtgatcgcccgggtgcgaatgtgggtgaacctgaacctgtggcagaagctgaagctaagcagagatgatgccaagcctctgctgagactgaagggattcccttcctttcctctggtcgagagacaggccaacgaagtggactggtgggacatggtgtgtaacgtgaagaagctgatcaacgagaaaaaggaggatggcaaggtgttttggcagaatctggctggctacaagagacaggaagccctgagaccatacctgagcagcgaggaagatcggaagaagggaaagaaattcgctcggtaccagctgggcgacctgctgctgcacctggaaaagaagcacggcgaggactggggaaaggtgtacgacgaggcctgggagcggattgacaagaaagtggaaggcctgagcaagcacatcaagctggaagaggaacggagaagcgaggacgcccagagcaaggccgccctgaccgactggctgcgggctaaggccagcttcgtgatcgagggcctgaaggaggccgacaaggacgagttctgcagatgcgagctgaagctgcagaagtggtacggggacctgcggggaaagcccttcgccatcgaagccgagaacagcatcctggacatcagcggcttcagcaagcagtacaactgtgccttcatctggcagaaggacggcgtgaagaagctgaacctgtacctgatcatcaactacttcaagggcggcaagctgcggttcaagaagatcaaacctgaagccttcgaagccaacagattctacaccgtgatcaacaaaaagagcggcgagatcgtgcccatggaggtgaacttcaacttcgacgaccccaacctgatcatcctgcctctggcctttggcaagagacagggcagagaattcatctggaacgacctgctgtccctggaaaccggcagcctgaagctggccaacggaagagtgatcgagaagacactgtacaacagaagaacccggcaggatgagcctgccctgttcgtggccctgaccttcgagcggcgggaggtcctggactcctccaatatcaaaccaatgaacctgatcggcgtggcaagaggcgaaaacatccccgccgtgatcgccctgaccgaccccgagggctgcccactgagccggtttaaggatagcctgggaaacccaacccacatcctgagaatcggcgagagctataaggagaagcagcggaccatccaggccaagaaggaggtggagcagcggagagccggcggctacagccggaagtacgccagcaaagccaagaatctggcagacgatatggtgagaaacaccgctagagatctgctgtactacgccgtgacccaggatgccatgctgatcttcgccaacctgagccggggcttcggccggcagggcaagcggaccttcatggccgagagacagtacacacggatggaggactggctgaccgccaagctggcctacgagggcctgagcaagacctacctgtccaagacactggcccagtacacctccaagacatgcagcaactgtgggtttaccatcaccagcgccgactacgacagggtgctggagaagctgaagaagacagcaacaggctggatgaccacaattaacggcaaggagctgaaggtggagggccagattacctactacaacagatacaagagacagaacgtagtcaaggacctgtccgtcgagctggatagactgagcgaagaatctgtgaacaacgacatctcctcctggacaaagggcagaagcggagaagctctgagcctcctgaagaaaagattctcccatagacccgtgcaggagaagttcgtgtgcctgaactgcggcttcgagacacacgcagccgagcaagccgccctgaacatcgccagatcctggctgttcctgcggagccaggagtacaagaaataccagacaaacaagacaaccggcaacaccgataagagagccttcgtcgagacctggcagtccttttaccggaagaagcttaaggaggtgtggaaacctgccgtgcggtctggcggatctggcggaggctccacaagcggcgagaacctggagagcagggtgaccctgggcagccccgccgccgagagccaggagctgctgaccttcaaggacgtgagcgtggacttcacccaggaggagtggggccagctggcccccgcccacaggaacctgtacagggaggtgatgctggagaactacggcaacctggtgagcgtgggctaccagctgagcaagcccggcctgatcagccagctggagaagggcgaggagccctggctgaccagccccaagaaaaagagaaaagtctaagctgccttctgcggggcttgccttctggccatgcccttcttctctcccttgcacctgtacctcttggtctttgaataaagcctgagtaggaaggctagcaaaaaaaaaaaaaaaaaaaaaaaaaaaaaaaaaaaaaaaaaaaaaaaaaaaaaaaaaaaaaaaaaaaaaaaaaaaaaaaa

SEQ ID NO: 3224 - RNA, 5419 nt, synthetic construct
  source 1..5419: mol_type = other RNA
aggaaataagagagaaaagaagagtaagaagaaatataagagccaccatggcccctaagaagaagcgtaaagtgagccgggtgaacggcagcggcagcggcggcggcatgaaccacgaccaggagttcgacccccctaaggtgtaccctcccgtccccgccgagaagagaaagcccatccgggtcctgagcctgttcgatggcatcgccaccggtctgctggtgctgaaggacctgggcatccaggtggataggtacattgcctccgaggtgtgcgaggactccatcaccgtgggaatggtgcgtcatcagggcaagatcatgtacgtgggcgacgtgcggagcgtgacacagaagcatatccaggagtggggccctttcgacctggtgatcggcggcagcccttgcaatgacctgagcatcgtgaacccagcccggaagggcctgtacgagggaaccggcagactgttcttcgagttttacagactgctgcacgacgcccggcctaaggaaggcgacgaccggcccttcttttggctgttcgagaatgtggtggccatgggagtcagcgacaagcgggatattagccggttcctggagagcaaccccgtgatgatcgatgccaaggaagtgagcgccgcccaccgggccagatacttctggggcaatctgcctggcatgaacagacccctggccagcaccgtgaacgacaagctggagctgcaggagtgcctggagcacggccggatcgccaagttcagcaaggtgagaaccatcaccacccgaagcaacagcatcaaacaaggcaaggaccagcactttcctgtgttcatgaacgagaaggaggacatcctgtggtgtaccgagatggagagagtgttcgggttcccagtccactacacagatgtcagcaacatgtctagactggccagacagagactgctgggaagaagctggtccgtccctgtgatcagacacctgttcgcccctctgaaggagtacttcgcctgcgtgagcagcggcaacagcaacgccaacagccggggccccagcttctctagcggcctggtgccactgtccctgagagggagccacatgggccccatggagatctacaaaaccgtgagcgcctggaagcggcagcctgtgcgcgtgctgagcctgtttcggaatatcgataaagtcctgaaaagcctgggattcctggagagcggctctggctccggcggtggcaccctgaagtacgtggaggatgtgacaaacgtggtcagacgggatgtggagaagtggggccccttcgatctggtgtacggcagcacccaacccctgggcagctcttgtgaccggtgccctggctggtacatgtttcagttccaccggatcctgcagtacgccctgccgagacaggagtcccagcggccattcttttggattttcatggacaacttgctgctgaccgaggatgaccaggaaactaccactcggttcctgcagaccgaagccgtgaccctgcaggacgtgagaggccgggactaccagaacgccatgcgggtgtggtccaacatccctggactgaaaagcaagcacgcacctctgacccctaaagaagaggagtacctgcaggcccaggtgcggagcagaagcaagctggacgcccctaaggtggatctgctggtgaagaattgcctcctgcccctgagagagtacttcaagtatttcagccagaatagtctgcccctgggcggcccaagcagcggcgcccctcctcccagcggcggcagcccagccggctccccaacctctaccgaggagggcacctctgagtccgccacccccgagagcggccctggcacctccaccgagcccagcgagggcagcgcacccggcagccctgccggcagccccacctccacagaggagggaaccagcaccgagcccagcgaaggcagcgccccaggcaccagcaccgagcctagtgagggcggctctggcggcggcagcgcccaggagattaaacggatcaacaagatcagaagaagacttgtgaaagacagcaacaccaagaaggccggcaagacaggccccatgaaaaccctgctggttagagtgatgacacccgatctgagagagcggctggaaaacctgagaaagaagcctgaaaatatcccccagcccatcagcaatacatctagagccaacctgaataagctgctgaccgattacaccgaaatgaagaaggcgatcctgcatgtgtactgggaagagttccagaaggaccctgtgggcctgatgagccgggtggcccagcctgccagcaagaagatcgatcagaacaagctgaaacctgagatggacgagaagggcaacctgaccaccgccggctttgcctgctctcagtgtggccagcccctgttcgtgtacaagctggagcaggtgtctgagaagggcaaggcttacaccaactacttcggacggtgcaatgtggccgagcacgaaaagctgatcctgctggcccagctgaagcccgagaaggatagcgacgaagccgtgacatatagcctgggaaagtttgggcagagggccctggatttctacagcattcatgtgaccaaggagtccacccaccccgtgaagcccctggcccagatcgccggaaacagatacgcctccggacctgtgggaaaggccctgagcgacgcatgtatgggcacaatcgcctccttcctgtctaagtaccaggacatcatcatcgaacaccagaaggtggtgaagggcaaccagaagagactggagagcctgcgggagctggccggcaaggaaaacctggaataccctagcgtgaccctgccacctcagcctcacaccaaggagggcgttgatgcctacaacgaagtgatcgcccgggtgcgaatgtgggtgaacctgaacctgtggcagaagctgaagctaagcagagatgatgccaagcctctgctgagactgaagggattcccttcctttcctctggtcgagagacaggccaacgaagtggactggtgggacatggtgtgtaacgtgaagaagctgatcaacgagaaaaaggaggatggcaaggtgttttggcagaatctggctggctacaagagacaggaagccctgagaccatacctgagcagcgaggaagatcggaagaagggaaagaaattcgctcggtaccagctgggcgacctgctgctgcacctggaaaagaagcacggcgaggactggggaaaggtgtacgacgaggcctgggagcggattgacaagaaagtggaaggcctgagcaagcacatcaagctggaagaggaacggagaagcgaggacgcccagagcaaggccgccctgaccgactggctgcgggctaaggccagcttcgtgatcgagggcctgaaggaggccgacaaggacgagttctgcagatgcgagctgaagctgcagaagtggtacggggacctgcggggaaagcccttcgccatcgaagccgagaacagcatcctggacatcagcggcttcagcaagcagtacaactgtgccttcatctggcagaaggacggcgtgaagaagctgaacctgtacctgatcatcaactacttcaagggcggcaagctgcggttcaagaagatcaaacctgaagccttcgaagccaacagattctacaccgtgatcaacaaaaagagcggcgagatcgtgcccatggaggtgaacttcaacttcgacgaccccaacctgatcatcctgcctctggcctttggcaagagacagggcagagaattcatctggaacgacctgctgtccctggaaaccggcagcctgaagctggccaacggaagagtgatcgagaagacactgtacaacagaagaacccggcaggatgagcctgccctgttcgtggccctgaccttcgagcggcgggaggtcctggactcctccaatatcaaaccaatgaacctgatcggcgtggcaagaggcgaaaacatccccgccgtgatcgccctgaccgaccccgagggctgcccactgagccggtttaaggatagcctgggaaacccaacccacatcctgagaatcggcgagagctataaggagaagcagcggaccatccaggccaagaaggaggtggagcagcggagagccggcggctacagccggaagtacgccagcaaagccaagaatctggcagacgatatggtgagaaacaccgctagagatctgctgtactacgccgtgacccaggatgccatgctgatcttcgccaacctgagccggggcttcggccggcagggcaagcggaccttcatggccgagagacagtacacacggatggaggactggctgaccgccaagctggcctacgagggcctgagcaagacctacctgtccaagacactggcccagtacacctccaagacatgcagcaactgtgggtttaccatcaccagcgccgactacgacagggtgctggagaagctgaagaagacagcaacaggctggatgaccacaattaacggcaaggagctgaaggtggagggccagattacctactacaacagatacaagagacagaacgtagtcaaggacctgtccgtcgagctggatagactgagcgaagaatctgtgaacaacgacatctcctcctggacaaagggcagaagcggagaagctctgagcctcctgaagaaaagattctcccatagacccgtgcaggagaagttcgtgtgcctgaactgcggcttcgagacacacgcagccgagcaagccgccctgaacatcgccagatcctggctgttcctgcggagccaggagtacaagaaataccagacaaacaagacaaccggcaacaccgataagagagccttcgtcgagacctggcagtccttttaccggaagaagcttaaggaggtgtggaaacctgccgtgcggtctggcggatctggcggaggctccacaagcccccaggccagcgtgaccttcgaggacgtggccgtgtacctgacccaggaggagtggggccacctggagcccgcccagaggggcctgtacagggacgtgatgctggagaactacggcaacgtggtgagcctgggcttccccgtgagcaagcccgacgtgatcctgcagctggagctgaggggcgagccctggttcctggacatgcagggcaccgagggcagggagatcctgagggactgcgagaccagccccaagaaaaagagaaaagtctaagctgccttctgcggggcttgccttctggccatgcccttcttctctcccttgcacctgtacctcttggtctttgaataaagcctgagtaggaaggctagcaaaaaaaaaaaaaaaaaaaaaaaaaaaaaaaaaaaaaaaaaaaaaaaaaaaaaaaaaaaaaaaaaaaaaaaaaaaaaaaa

SEQ ID NO: 3225 - RNA, 5419 nt, synthetic construct
  source 1..5419: mol_type = other RNA
aggaaataagagagaaaagaagagtaagaagaaatataagagccaccatggcccctaagaagaagcgtaaagtgagccgggtgaacggcagcggcagcggcggcggcatgaaccacgaccaggagttcgacccccctaaggtgtaccctcccgtccccgccgagaagagaaagcccatccgggtcctgagcctgttcgatggcatcgccaccggtctgctggtgctgaaggacctgggcatccaggtggataggtacattgcctccgaggtgtgcgaggactccatcaccgtgggaatggtgcgtcatcagggcaagatcatgtacgtgggcgacgtgcggagcgtgacacagaagcatatccaggagtggggccctttcgacctggtgatcggcggcagcccttgcaatgacctgagcatcgtgaacccagcccggaagggcctgtacgagggaaccggcagactgttcttcgagttttacagactgctgcacgacgcccggcctaaggaaggcgacgaccggcccttcttttggctgttcgagaatgtggtggccatgggagtcagcgacaagcgggatattagccggttcctggagagcaaccccgtgatgatcgatgccaaggaagtgagcgccgcccaccgggccagatacttctggggcaatctgcctggcatgaacagacccctggccagcaccgtgaacgacaagctggagctgcaggagtgcctggagcacggccggatcgccaagttcagcaaggtgagaaccatcaccacccgaagcaacagcatcaaacaaggcaaggaccagcactttcctgtgttcatgaacgagaaggaggacatcctgtggtgtaccgagatggagagagtgttcgggttcccagtccactacacagatgtcagcaacatgtctagactggccagacagagactgctgggaagaagctggtccgtccctgtgatcagacacctgttcgcccctctgaaggagtacttcgcctgcgtgagcagcggcaacagcaacgccaacagccggggccccagcttctctagcggcctggtgccactgtccctgagagggagccacatgggccccatggagatctacaaaaccgtgagcgcctggaagcggcagcctgtgcgcgtgctgagcctgtttcggaatatcgataaagtcctgaaaagcctgggattcctggagagcggctctggctccggcggtggcaccctgaagtacgtggaggatgtgacaaacgtggtcagacgggatgtggagaagtggggccccttcgatctggtgtacggcagcacccaacccctgggcagctcttgtgaccggtgccctggctggtacatgtttcagttccaccggatcctgcagtacgccctgccgagacaggagtcccagcggccattcttttggattttcatggacaacttgctgctgaccgaggatgaccaggaaactaccactcggttcctgcagaccgaagccgtgaccctgcaggacgtgagaggccgggactaccagaacgccatgcgggtgtggtccaacatccctggactgaaaagcaagcacgcacctctgacccctaaagaagaggagtacctgcaggcccaggtgcggagcagaagcaagctggacgcccctaaggtggatctgctggtgaagaattgcctcctgcccctgagagagtacttcaagtatttcagccagaatagtctgcccctgggcggcccaagcagcggcgcccctcctcccagcggcggcagcccagccggctccccaacctctaccgaggagggcacctctgagtccgccacccccgagagcggccctggcacctccaccgagcccagcgagggcagcgcacccggcagccctgccggcagccccacctccacagaggagggaaccagcaccgagcccagcgaaggcagcgccccaggcaccagcaccgagcctagtgagggcggctctggcggcggcagcgcccaggagattaaacggatcaacaagatcagaagaagacttgtgaaagacagcaacaccaagaaggccggcaagacaggccccatgaaaaccctgctggttagagtgatgacacccgatctgagagagcggctggaaaacctgagaaagaagcctgaaaatatcccccagcccatcagcaatacatctagagccaacctgaataagctgctgaccgattacaccgaaatgaagaaggcgatcctgcatgtgtactgggaagagttccagaaggaccctgtgggcctgatgagccgggtggcccagcctgccagcaagaagatcgatcagaacaagctgaaacctgagatggacgagaagggcaacctgaccaccgccggctttgcctgctctcagtgtggccagcccctgttcgtgtacaagctggagcaggtgtctgagaagggcaaggcttacaccaactacttcggacggtgcaatgtggccgagcacgaaaagctgatcctgctggcccagctgaagcccgagaaggatagcgacgaagccgtgacatatagcctgggaaagtttgggcagagggccctggatttctacagcattcatgtgaccaaggagtccacccaccccgtgaagcccctggcccagatcgccggaaacagatacgcctccggacctgtgggaaaggccctgagcgacgcatgtatgggcacaatcgcctccttcctgtctaagtaccaggacatcatcatcgaacaccagaaggtggtgaagggcaaccagaagagactggagagcctgcgggagctggccggcaaggaaaacctggaataccctagcgtgaccctgccacctcagcctcacaccaaggagggcgttgatgcctacaacgaagtgatcgcccgggtgcgaatgtgggtgaacctgaacctgtggcagaagctgaagctaagcagagatgatgccaagcctctgctgagactgaagggattcccttcctttcctctggtcgagagacaggccaacgaagtggactggtgggacatggtgtgtaacgtgaagaagctgatcaacgagaaaaaggaggatggcaaggtgttttggcagaatctggctggctacaagagacaggaagccctgagaccatacctgagcagcgaggaagatcggaagaagggaaagaaattcgctcggtaccagctgggcgacctgctgctgcacctggaaaagaagcacggcgaggactggggaaaggtgtacgacgaggcctgggagcggattgacaagaaagtggaaggcctgagcaagcacatcaagctggaagaggaacggagaagcgaggacgcccagagcaaggccgccctgaccgactggctgcgggctaaggccagcttcgtgatcgagggcctgaaggaggccgacaaggacgagttctgcagatgcgagctgaagctgcagaagtggtacggggacctgcggggaaagcccttcgccatcgaagccgagaacagcatcctggacatcagcggcttcagcaagcagtacaactgtgccttcatctggcagaaggacggcgtgaagaagctgaacctgtacctgatcatcaactacttcaagggcggcaagctgcggttcaagaagatcaaacctgaagccttcgaagccaacagattctacaccgtgatcaacaaaaagagcggcgagatcgtgcccatggaggtgaacttcaacttcgacgaccccaacctgatcatcctgcctctggcctttggcaagagacagggcagagaattcatctggaacgacctgctgtccctggaaaccggcagcctgaagctggccaacggaagagtgatcgagaagacactgtacaacagaagaacccggcaggatgagcctgccctgttcgtggccctgaccttcgagcggcgggaggtcctggactcctccaatatcaaaccaatgaacctgatcggcgtggcaagaggcgaaaacatccccgccgtgatcgccctgaccgaccccgagggctgcccactgagccggtttaaggatagcctgggaaacccaacccacatcctgagaatcggcgagagctataaggagaagcagcggaccatccaggccaagaaggaggtggagcagcggagagccggcggctacagccggaagtacgccagcaaagccaagaatctggcagacgatatggtgagaaacaccgctagagatctgctgtactacgccgtgacccaggatgccatgctgatcttcgccaacctgagccggggcttcggccggcagggcaagcggaccttcatggccgagagacagtacacacggatggaggactggctgaccgccaagctggcctacgagggcctgagcaagacctacctgtccaagacactggcccagtacacctccaagacatgcagcaactgtgggtttaccatcaccagcgccgactacgacagggtgctggagaagctgaagaagacagcaacaggctggatgaccacaattaacggcaaggagctgaaggtggagggccagattacctactacaacagatacaagagacagaacgtagtcaaggacctgtccgtcgagctggatagactgagcgaagaatctgtgaacaacgacatctcctcctggacaaagggcagaagcggagaagctctgagcctcctgaagaaaagattctcccatagacccgtgcaggagaagttcgtgtgcctgaactgcggcttcgagacacacgcagccgagcaagccgccctgaacatcgccagatcctggctgttcctgcggagccaggagtacaagaaataccagacaaacaagacaaccggcaacaccgataagagagccttcgtcgagacctggcagtccttttaccggaagaagcttaaggaggtgtggaaacctgccgtgcggtctggcggatctggcggaggctccacaagcgaggccctgcccgtggtgttcgaggacgtggccgtgtacttcaccagggaggagtggggcgccctggacaagaggcagaaggagatgtacagggacgtgatgaggatgaactacgagctgctggccagcctgggccccgccgccgccaagcccgacctgatcagcaagctggagaggagggccgccccctggatcaaggacccccacggcctgaagtggggcaagggcaggccccccggcaagaccagccccaagaaaaagagaaaagtctaagctgccttctgcggggcttgccttctggccatgcccttcttctctcccttgcacctgtacctcttggtctttgaataaagcctgagtaggaaggctagcaaaaaaaaaaaaaaaaaaaaaaaaaaaaaaaaaaaaaaaaaaaaaaaaaaaaaaaaaaaaaaaaaaaaaaaaaaaaaaaa

SEQ ID NO: 3226 - RNA, 5446 nt, synthetic construct
  source 1..5446: mol_type = other RNA
aggaaataagagagaaaagaagagtaagaagaaatataagagccaccatggcccctaagaagaagcgtaaagtgagccgggtgaacggcagcggcagcggcggcggcatgaaccacgaccaggagttcgacccccctaaggtgtaccctcccgtccccgccgagaagagaaagcccatccgggtcctgagcctgttcgatggcatcgccaccggtctgctggtgctgaaggacctgggcatccaggtggataggtacattgcctccgaggtgtgcgaggactccatcaccgtgggaatggtgcgtcatcagggcaagatcatgtacgtgggcgacgtgcggagcgtgacacagaagcatatccaggagtggggccctttcgacctggtgatcggcggcagcccttgcaatgacctgagcatcgtgaacccagcccggaagggcctgtacgagggaaccggcagactgttcttcgagttttacagactgctgcacgacgcccggcctaaggaaggcgacgaccggcccttcttttggctgttcgagaatgtggtggccatgggagtcagcgacaagcgggatattagccggttcctggagagcaaccccgtgatgatcgatgccaaggaagtgagcgccgcccaccgggccagatacttctggggcaatctgcctggcatgaacagacccctggccagcaccgtgaacgacaagctggagctgcaggagtgcctggagcacggccggatcgccaagttcagcaaggtgagaaccatcaccacccgaagcaacagcatcaaacaaggcaaggaccagcactttcctgtgttcatgaacgagaaggaggacatcctgtggtgtaccgagatggagagagtgttcgggttcccagtccactacacagatgtcagcaacatgtctagactggccagacagagactgctgggaagaagctggtccgtccctgtgatcagacacctgttcgcccctctgaaggagtacttcgcctgcgtgagcagcggcaacagcaacgccaacagccggggccccagcttctctagcggcctggtgccactgtccctgagagggagccacatgggccccatggagatctacaaaaccgtgagcgcctggaagcggcagcctgtgcgcgtgctgagcctgtttcggaatatcgataaagtcctgaaaagcctgggattcctggagagcggctctggctccggcggtggcaccctgaagtacgtggaggatgtgacaaacgtggtcagacgggatgtggagaagtggggccccttcgatctggtgtacggcagcacccaacccctgggcagctcttgtgaccggtgccctggctggtacatgtttcagttccaccggatcctgcagtacgccctgccgagacaggagtcccagcggccattcttttggattttcatggacaacttgctgctgaccgaggatgaccaggaaactaccactcggttcctgcagaccgaagccgtgaccctgcaggacgtgagaggccgggactaccagaacgccatgcgggtgtggtccaacatccctggactgaaaagcaagcacgcacctctgacccctaaagaagaggagtacctgcaggcccaggtgcggagcagaagcaagctggacgcccctaaggtggatctgctggtgaagaattgcctcctgcccctgagagagtacttcaagtatttcagccagaatagtctgcccctgggcggcccaagcagcggcgcccctcctcccagcggcggcagcccagccggctccccaacctctaccgaggagggcacctctgagtccgccacccccgagagcggccctggcacctccaccgagcccagcgagggcagcgcacccggcagccctgccggcagccccacctccacagaggagggaaccagcaccgagcccagcgaaggcagcgccccaggcaccagcaccgagcctagtgagggcggctctggcggcggcagcgcccaggagattaaacggatcaacaagatcagaagaagacttgtgaaagacagcaacaccaagaaggccggcaagacaggccccatgaaaaccctgctggttagagtgatgacacccgatctgagagagcggctggaaaacctgagaaagaagcctgaaaatatcccccagcccatcagcaatacatctagagccaacctgaataagctgctgaccgattacaccgaaatgaagaaggcgatcctgcatgtgtactgggaagagttccagaaggaccctgtgggcctgatgagccgggtggcccagcctgccagcaagaagatcgatcagaacaagctgaaacctgagatggacgagaagggcaacctgaccaccgccggctttgcctgctctcagtgtggccagcccctgttcgtgtacaagctggagcaggtgtctgagaagggcaaggcttacaccaactacttcggacggtgcaatgtggccgagcacgaaaagctgatcctgctggcccagctgaagcccgagaaggatagcgacgaagccgtgacatatagcctgggaaagtttgggcagagggccctggatttctacagcattcatgtgaccaaggagtccacccaccccgtgaagcccctggcccagatcgccggaaacagatacgcctccggacctgtgggaaaggccctgagcgacgcatgtatgggcacaatcgcctccttcctgtctaagtaccaggacatcatcatcgaacaccagaaggtggtgaagggcaaccagaagagactggagagcctgcgggagctggccggcaaggaaaacctggaataccctagcgtgaccctgccacctcagcctcacaccaaggagggcgttgatgcctacaacgaagtgatcgcccgggtgcgaatgtgggtgaacctgaacctgtggcagaagctgaagctaagcagagatgatgccaagcctctgctgagactgaagggattcccttcctttcctctggtcgagagacaggccaacgaagtggactggtgggacatggtgtgtaacgtgaagaagctgatcaacgagaaaaaggaggatggcaaggtgttttggcagaatctggctggctacaagagacaggaagccctgagaccatacctgagcagcgaggaagatcggaagaagggaaagaaattcgctcggtaccagctgggcgacctgctgctgcacctggaaaagaagcacggcgaggactggggaaaggtgtacgacgaggcctgggagcggattgacaagaaagtggaaggcctgagcaagcacatcaagctggaagaggaacggagaagcgaggacgcccagagcaaggccgccctgaccgactggctgcgggctaaggccagcttcgtgatcgagggcctgaaggaggccgacaaggacgagttctgcagatgcgagctgaagctgcagaagtggtacggggacctgcggggaaagcccttcgccatcgaagccgagaacagcatcctggacatcagcggcttcagcaagcagtacaactgtgccttcatctggcagaaggacggcgtgaagaagctgaacctgtacctgatcatcaactacttcaagggcggcaagctgcggttcaagaagatcaaacctgaagccttcgaagccaacagattctacaccgtgatcaacaaaaagagcggcgagatcgtgcccatggaggtgaacttcaacttcgacgaccccaacctgatcatcctgcctctggcctttggcaagagacagggcagagaattcatctggaacgacctgctgtccctggaaaccggcagcctgaagctggccaacggaagagtgatcgagaagacactgtacaacagaagaacccggcaggatgagcctgccctgttcgtggccctgaccttcgagcggcgggaggtcctggactcctccaatatcaaaccaatgaacctgatcggcgtggcaagaggcgaaaacatccccgccgtgatcgccctgaccgaccccgagggctgcccactgagccggtttaaggatagcctgggaaacccaacccacatcctgagaatcggcgagagctataaggagaagcagcggaccatccaggccaagaaggaggtggagcagcggagagccggcggctacagccggaagtacgccagcaaagccaagaatctggcagacgatatggtgagaaacaccgctagagatctgctgtactacgccgtgacccaggatgccatgctgatcttcgccaacctgagccggggcttcggccggcagggcaagcggaccttcatggccgagagacagtacacacggatggaggactggctgaccgccaagctggcctacgagggcctgagcaagacctacctgtccaagacactggcccagtacacctccaagacatgcagcaactgtgggtttaccatcaccagcgccgactacgacagggtgctggagaagctgaagaagacagcaacaggctggatgaccacaattaacggcaaggagctgaaggtggagggccagattacctactacaacagatacaagagacagaacgtagtcaaggacctgtccgtcgagctggatagactgagcgaagaatctgtgaacaacgacatctcctcctggacaaagggcagaagcggagaagctctgagcctcctgaagaaaagattctcccatagacccgtgcaggagaagttcgtgtgcctgaactgcggcttcgagacacacgcagccgagcaagccgccctgaacatcgccagatcctggctgttcctgcggagccaggagtacaagaaataccagacaaacaagacaaccggcaacaccgataagagagccttcgtcgagacctggcagtccttttaccggaagaagcttaaggaggtgtggaaacctgccgtgcggtctggcggatctggcggaggctccacaagcgtggccttcagggacgtgatcgtggacttcacccaggaggagtggcagcagctgaagcccgcccagaaggacctgtacagggacgtgatgatggagatctactggaacctggtgagcctggacctggagaccgagggcgacatgaacgagcccgaccccgagaaggacagctgggaggacaggaccagcatcgtggtggtggagggcctgatgaggaacggcgcccagggctacgcctgcgagaaggccggcatccagggctgcagggtgaccagccccaagaaaaagagaaaagtctaagctgccttctgcggggcttgccttctggccatgcccttcttctctcccttgcacctgtacctcttggtctttgaataaagcctgagtaggaaggctagcaaaaaaaaaaaaaaaaaaaaaaaaaaaaaaaaaaaaaaaaaaaaaaaaaaaaaaaaaaaaaaaaaaaaaaaaaaaaaaaa

SEQ ID NO: 3227 - RNA, 5419 nt, synthetic construct
  source 1..5419: mol_type = other RNA
aggaaataagagagaaaagaagagtaagaagaaatataagagccaccatggcccctaagaagaagcgtaaagtgagccgggtgaacggcagcggcagcggcggcggcatgaaccacgaccaggagttcgacccccctaaggtgtaccctcccgtccccgccgagaagagaaagcccatccgggtcctgagcctgttcgatggcatcgccaccggtctgctggtgctgaaggacctgggcatccaggtggataggtacattgcctccgaggtgtgcgaggactccatcaccgtgggaatggtgcgtcatcagggcaagatcatgtacgtgggcgacgtgcggagcgtgacacagaagcatatccaggagtggggccctttcgacctggtgatcggcggcagcccttgcaatgacctgagcatcgtgaacccagcccggaagggcctgtacgagggaaccggcagactgttcttcgagttttacagactgctgcacgacgcccggcctaaggaaggcgacgaccggcccttcttttggctgttcgagaatgtggtggccatgggagtcagcgacaagcgggatattagccggttcctggagagcaaccccgtgatgatcgatgccaaggaagtgagcgccgcccaccgggccagatacttctggggcaatctgcctggcatgaacagacccctggccagcaccgtgaacgacaagctggagctgcaggagtgcctggagcacggccggatcgccaagttcagcaaggtgagaaccatcaccacccgaagcaacagcatcaaacaaggcaaggaccagcactttcctgtgttcatgaacgagaaggaggacatcctgtggtgtaccgagatggagagagtgttcgggttcccagtccactacacagatgtcagcaacatgtctagactggccagacagagactgctgggaagaagctggtccgtccctgtgatcagacacctgttcgcccctctgaaggagtacttcgcctgcgtgagcagcggcaacagcaacgccaacagccggggccccagcttctctagcggcctggtgccactgtccctgagagggagccacatgggccccatggagatctacaaaaccgtgagcgcctggaagcggcagcctgtgcgcgtgctgagcctgtttcggaatatcgataaagtcctgaaaagcctgggattcctggagagcggctctggctccggcggtggcaccctgaagtacgtggaggatgtgacaaacgtggtcagacgggatgtggagaagtggggccccttcgatctggtgtacggcagcacccaacccctgggcagctcttgtgaccggtgccctggctggtacatgtttcagttccaccggatcctgcagtacgccctgccgagacaggagtcccagcggccattcttttggattttcatggacaacttgctgctgaccgaggatgaccaggaaactaccactcggttcctgcagaccgaagccgtgaccctgcaggacgtgagaggccgggactaccagaacgccatgcgggtgtggtccaacatccctggactgaaaagcaagcacgcacctctgacccctaaagaagaggagtacctgcaggcccaggtgcggagcagaagcaagctggacgcccctaaggtggatctgctggtgaagaattgcctcctgcccctgagagagtacttcaagtatttcagccagaatagtctgcccctgggcggcccaagcagcggcgcccctcctcccagcggcggcagcccagccggctccccaacctctaccgaggagggcacctctgagtccgccacccccgagagcggccctggcacctccaccgagcccagcgagggcagcgcacccggcagccctgccggcagccccacctccacagaggagggaaccagcaccgagcccagcgaaggcagcgccccaggcaccagcaccgagcctagtgagggcggctctggcggcggcagcgcccaggagattaaacggatcaacaagatcagaagaagacttgtgaaagacagcaacaccaagaaggccggcaagacaggccccatgaaaaccctgctggttagagtgatgacacccgatctgagagagcggctggaaaacctgagaaagaagcctgaaaatatcccccagcccatcagcaatacatctagagccaacctgaataagctgctgaccgattacaccgaaatgaagaaggcgatcctgcatgtgtactgggaagagttccagaaggaccctgtgggcctgatgagccgggtggcccagcctgccagcaagaagatcgatcagaacaagctgaaacctgagatggacgagaagggcaacctgaccaccgccggctttgcctgctctcagtgtggccagcccctgttcgtgtacaagctggagcaggtgtctgagaagggcaaggcttacaccaactacttcggacggtgcaatgtggccgagcacgaaaagctgatcctgctggcccagctgaagcccgagaaggatagcgacgaagccgtgacatatagcctgggaaagtttgggcagagggccctggatttctacagcattcatgtgaccaaggagtccacccaccccgtgaagcccctggcccagatcgccggaaacagatacgcctccggacctgtgggaaaggccctgagcgacgcatgtatgggcacaatcgcctccttcctgtctaagtaccaggacatcatcatcgaacaccagaaggtggtgaagggcaaccagaagagactggagagcctgcgggagctggccggcaaggaaaacctggaataccctagcgtgaccctgccacctcagcctcacaccaaggagggcgttgatgcctacaacgaagtgatcgcccgggtgcgaatgtgggtgaacctgaacctgtggcagaagctgaagctaagcagagatgatgccaagcctctgctgagactgaagggattcccttcctttcctctggtcgagagacaggccaacgaagtggactggtgggacatggtgtgtaacgtgaagaagctgatcaacgagaaaaaggaggatggcaaggtgttttggcagaatctggctggctacaagagacaggaagccctgagaccatacctgagcagcgaggaagatcggaagaagggaaagaaattcgctcggtaccagctgggcgacctgctgctgcacctggaaaagaagcacggcgaggactggggaaaggtgtacgacgaggcctgggagcggattgacaagaaagtggaaggcctgagcaagcacatcaagctggaagaggaacggagaagcgaggacgcccagagcaaggccgccctgaccgactggctgcgggctaaggccagcttcgtgatcgagggcctgaaggaggccgacaaggacgagttctgcagatgcgagctgaagctgcagaagtggtacggggacctgcggggaaagcccttcgccatcgaagccgagaacagcatcctggacatcagcggcttcagcaagcagtacaactgtgccttcatctggcagaaggacggcgtgaagaagctgaacctgtacctgatcatcaactacttcaagggcggcaagctgcggttcaagaagatcaaacctgaagccttcgaagccaacagattctacaccgtgatcaacaaaaagagcggcgagatcgtgcccatggaggtgaacttcaacttcgacgaccccaacctgatcatcctgcctctggcctttggcaagagacagggcagagaattcatctggaacgacctgctgtccctggaaaccggcagcctgaagctggccaacggaagagtgatcgagaagacactgtacaacagaagaacccggcaggatgagcctgccctgttcgtggccctgaccttcgagcggcgggaggtcctggactcctccaatatcaaaccaatgaacctgatcggcgtggcaagaggcgaaaacatccccgccgtgatcgccctgaccgaccccgagggctgcccactgagccggtttaaggatagcctgggaaacccaacccacatcctgagaatcggcgagagctataaggagaagcagcggaccatccaggccaagaaggaggtggagcagcggagagccggcggctacagccggaagtacgccagcaaagccaagaatctggcagacgatatggtgagaaacaccgctagagatctgctgtactacgccgtgacccaggatgccatgctgatcttcgccaacctgagccggggcttcggccggcagggcaagcggaccttcatggccgagagacagtacacacggatggaggactggctgaccgccaagctggcctacgagggcctgagcaagacctacctgtccaagacactggcccagtacacctccaagacatgcagcaactgtgggtttaccatcaccagcgccgactacgacagggtgctggagaagctgaagaagacagcaacaggctggatgaccacaattaacggcaaggagctgaaggtggagggccagattacctactacaacagatacaagagacagaacgtagtcaaggacctgtccgtcgagctggatagactgagcgaagaatctgtgaacaacgacatctcctcctggacaaagggcagaagcggagaagctctgagcctcctgaagaaaagattctcccatagacccgtgcaggagaagttcgtgtgcctgaactgcggcttcgagacacacgcagccgagcaagccgccctgaacatcgccagatcctggctgttcctgcggagccaggagtacaagaaataccagacaaacaagacaaccggcaacaccgataagagagccttcgtcgagacctggcagtccttttaccggaagaagcttaaggaggtgtggaaacctgccgtgcggtctggcggatctggcggaggctccacaagcggcccctggaccctgctgaccttcagggacgtggccatcgagttcagccaggaggagtggggctgcctgaaccacagccagagggagctgtacagggacgtgatgctggagacctacggccacctgctgttcctgggcctggtgagcaagcccgacctggtgatcctgctggagcagaagaaggagctgtggggcgtgaagaggaaggagaccgtgggctgccagttcgagggccacgtgaccaccagccccaagaaaaagagaaaagtctaagctgccttctgcggggcttgccttctggccatgcccttcttctctcccttgcacctgtacctcttggtctttgaataaagcctgagtaggaaggctagcaaaaaaaaaaaaaaaaaaaaaaaaaaaaaaaaaaaaaaaaaaaaaaaaaaaaaaaaaaaaaaaaaaaaaaaaaaaaaaaa

SEQ ID NO: 3228 - RNA, 5419 nt, synthetic construct
  source 1..5419: mol_type = other RNA
aggaaataagagagaaaagaagagtaagaagaaatataagagccaccatggcccctaagaagaagcgtaaagtgagccgggtgaacggcagcggcagcggcggcggcatgaaccacgaccaggagttcgacccccctaaggtgtaccctcccgtccccgccgagaagagaaagcccatccgggtcctgagcctgttcgatggcatcgccaccggtctgctggtgctgaaggacctgggcatccaggtggataggtacattgcctccgaggtgtgcgaggactccatcaccgtgggaatggtgcgtcatcagggcaagatcatgtacgtgggcgacgtgcggagcgtgacacagaagcatatccaggagtggggccctttcgacctggtgatcggcggcagcccttgcaatgacctgagcatcgtgaacccagcccggaagggcctgtacgagggaaccggcagactgttcttcgagttttacagactgctgcacgacgcccggcctaaggaaggcgacgaccggcccttcttttggctgttcgagaatgtggtggccatgggagtcagcgacaagcgggatattagccggttcctggagagcaaccccgtgatgatcgatgccaaggaagtgagcgccgcccaccgggccagatacttctggggcaatctgcctggcatgaacagacccctggccagcaccgtgaacgacaagctggagctgcaggagtgcctggagcacggccggatcgccaagttcagcaaggtgagaaccatcaccacccgaagcaacagcatcaaacaaggcaaggaccagcactttcctgtgttcatgaacgagaaggaggacatcctgtggtgtaccgagatggagagagtgttcgggttcccagtccactacacagatgtcagcaacatgtctagactggccagacagagactgctgggaagaagctggtccgtccctgtgatcagacacctgttcgcccctctgaaggagtacttcgcctgcgtgagcagcggcaacagcaacgccaacagccggggccccagcttctctagcggcctggtgccactgtccctgagagggagccacatgggccccatggagatctacaaaaccgtgagcgcctggaagcggcagcctgtgcgcgtgctgagcctgtttcggaatatcgataaagtcctgaaaagcctgggattcctggagagcggctctggctccggcggtggcaccctgaagtacgtggaggatgtgacaaacgtggtcagacgggatgtggagaagtggggccccttcgatctggtgtacggcagcacccaacccctgggcagctcttgtgaccggtgccctggctggtacatgtttcagttccaccggatcctgcagtacgccctgccgagacaggagtcccagcggccattcttttggattttcatggacaacttgctgctgaccgaggatgaccaggaaactaccactcggttcctgcagaccgaagccgtgaccctgcaggacgtgagaggccgggactaccagaacgccatgcgggtgtggtccaacatccctggactgaaaagcaagcacgcacctctgacccctaaagaagaggagtacctgcaggcccaggtgcggagcagaagcaagctggacgcccctaaggtggatctgctggtgaagaattgcctcctgcccctgagagagtacttcaagtatttcagccagaatagtctgcccctgggcggcccaagcagcggcgcccctcctcccagcggcggcagcccagccggctccccaacctctaccgaggagggcacctctgagtccgccacccccgagagcggccctggcacctccaccgagcccagcgagggcagcgcacccggcagccctgccggcagccccacctccacagaggagggaaccagcaccgagcccagcgaaggcagcgccccaggcaccagcaccgagcctagtgagggcggctctggcggcggcagcgcccaggagattaaacggatcaacaagatcagaagaagacttgtgaaagacagcaacaccaagaaggccggcaagacaggccccatgaaaaccctgctggttagagtgatgacacccgatctgagagagcggctggaaaacctgagaaagaagcctgaaaatatcccccagcccatcagcaatacatctagagccaacctgaataagctgctgaccgattacaccgaaatgaagaaggcgatcctgcatgtgtactgggaagagttccagaaggaccctgtgggcctgatgagccgggtggcccagcctgccagcaagaagatcgatcagaacaagctgaaacctgagatggacgagaagggcaacctgaccaccgccggctttgcctgctctcagtgtggccagcccctgttcgtgtacaagctggagcaggtgtctgagaagggcaaggcttacaccaactacttcggacggtgcaatgtggccgagcacgaaaagctgatcctgctggcccagctgaagcccgagaaggatagcgacgaagccgtgacatatagcctgggaaagtttgggcagagggccctggatttctacagcattcatgtgaccaaggagtccacccaccccgtgaagcccctggcccagatcgccggaaacagatacgcctccggacctgtgggaaaggccctgagcgacgcatgtatgggcacaatcgcctccttcctgtctaagtaccaggacatcatcatcgaacaccagaaggtggtgaagggcaaccagaagagactggagagcctgcgggagctggccggcaaggaaaacctggaataccctagcgtgaccctgccacctcagcctcacaccaaggagggcgttgatgcctacaacgaagtgatcgcccgggtgcgaatgtgggtgaacctgaacctgtggcagaagctgaagctaagcagagatgatgccaagcctctgctgagactgaagggattcccttcctttcctctggtcgagagacaggccaacgaagtggactggtgggacatggtgtgtaacgtgaagaagctgatcaacgagaaaaaggaggatggcaaggtgttttggcagaatctggctggctacaagagacaggaagccctgagaccatacctgagcagcgaggaagatcggaagaagggaaagaaattcgctcggtaccagctgggcgacctgctgctgcacctggaaaagaagcacggcgaggactggggaaaggtgtacgacgaggcctgggagcggattgacaagaaagtggaaggcctgagcaagcacatcaagctggaagaggaacggagaagcgaggacgcccagagcaaggccgccctgaccgactggctgcgggctaaggccagcttcgtgatcgagggcctgaaggaggccgacaaggacgagttctgcagatgcgagctgaagctgcagaagtggtacggggacctgcggggaaagcccttcgccatcgaagccgagaacagcatcctggacatcagcggcttcagcaagcagtacaactgtgccttcatctggcagaaggacggcgtgaagaagctgaacctgtacctgatcatcaactacttcaagggcggcaagctgcggttcaagaagatcaaacctgaagccttcgaagccaacagattctacaccgtgatcaacaaaaagagcggcgagatcgtgcccatggaggtgaacttcaacttcgacgaccccaacctgatcatcctgcctctggcctttggcaagagacagggcagagaattcatctggaacgacctgctgtccctggaaaccggcagcctgaagctggccaacggaagagtgatcgagaagacactgtacaacagaagaacccggcaggatgagcctgccctgttcgtggccctgaccttcgagcggcgggaggtcctggactcctccaatatcaaaccaatgaacctgatcggcgtggcaagaggcgaaaacatccccgccgtgatcgccctgaccgaccccgagggctgcccactgagccggtttaaggatagcctgggaaacccaacccacatcctgagaatcggcgagagctataaggagaagcagcggaccatccaggccaagaaggaggtggagcagcggagagccggcggctacagccggaagtacgccagcaaagccaagaatctggcagacgatatggtgagaaacaccgctagagatctgctgtactacgccgtgacccaggatgccatgctgatcttcgccaacctgagccggggcttcggccggcagggcaagcggaccttcatggccgagagacagtacacacggatggaggactggctgaccgccaagctggcctacgagggcctgagcaagacctacctgtccaagacactggcccagtacacctccaagacatgcagcaactgtgggtttaccatcaccagcgccgactacgacagggtgctggagaagctgaagaagacagcaacaggctggatgaccacaattaacggcaaggagctgaaggtggagggccagattacctactacaacagatacaagagacagaacgtagtcaaggacctgtccgtcgagctggatagactgagcgaagaatctgtgaacaacgacatctcctcctggacaaagggcagaagcggagaagctctgagcctcctgaagaaaagattctcccatagacccgtgcaggagaagttcgtgtgcctgaactgcggcttcgagacacacgcagccgagcaagccgccctgaacatcgccagatcctggctgttcctgcggagccaggagtacaagaaataccagacaaacaagacaaccggcaacaccgataagagagccttcgtcgagacctggcagtccttttaccggaagaagcttaaggaggtgtggaaacctgccgtgcggtctggcggatctggcggaggctccacaagcagcaaggcccccgtgaccttcggcgacctggtgatctacttcagccaggaggagtgggagtggctgagccccatccagaaggacctgtacgaggaggtgatgctggagaactaccacaccctggtgagcctgggcctggtgagcaggaggcccaacatcatcaccctgctggagaagggcaaggccccctggatggtggagcccagcaggaggaggaggggccccgagagcggcagcaagaggaccagccccaagaaaaagagaaaagtctaagctgccttctgcggggcttgccttctggccatgcccttcttctctcccttgcacctgtacctcttggtctttgaataaagcctgagtaggaaggctagcaaaaaaaaaaaaaaaaaaaaaaaaaaaaaaaaaaaaaaaaaaaaaaaaaaaaaaaaaaaaaaaaaaaaaaaaaaaaaaaa

SEQ ID NO: 3229 - RNA, 5419 nt, synthetic construct
  source 1..5419: mol_type = other RNA
aggaaataagagagaaaagaagagtaagaagaaatataagagccaccatggcccctaagaagaagcgtaaagtgagccgggtgaacggcagcggcagcggcggcggcatgaaccacgaccaggagttcgacccccctaaggtgtaccctcccgtccccgccgagaagagaaagcccatccgggtcctgagcctgttcgatggcatcgccaccggtctgctggtgctgaaggacctgggcatccaggtggataggtacattgcctccgaggtgtgcgaggactccatcaccgtgggaatggtgcgtcatcagggcaagatcatgtacgtgggcgacgtgcggagcgtgacacagaagcatatccaggagtggggccctttcgacctggtgatcggcggcagcccttgcaatgacctgagcatcgtgaacccagcccggaagggcctgtacgagggaaccggcagactgttcttcgagttttacagactgctgcacgacgcccggcctaaggaaggcgacgaccggcccttcttttggctgttcgagaatgtggtggccatgggagtcagcgacaagcgggatattagccggttcctggagagcaaccccgtgatgatcgatgccaaggaagtgagcgccgcccaccgggccagatacttctggggcaatctgcctggcatgaacagacccctggccagcaccgtgaacgacaagctggagctgcaggagtgcctggagcacggccggatcgccaagttcagcaaggtgagaaccatcaccacccgaagcaacagcatcaaacaaggcaaggaccagcactttcctgtgttcatgaacgagaaggaggacatcctgtggtgtaccgagatggagagagtgttcgggttcccagtccactacacagatgtcagcaacatgtctagactggccagacagagactgctgggaagaagctggtccgtccctgtgatcagacacctgttcgcccctctgaaggagtacttcgcctgcgtgagcagcggcaacagcaacgccaacagccggggccccagcttctctagcggcctggtgccactgtccctgagagggagccacatgggccccatggagatctacaaaaccgtgagcgcctggaagcggcagcctgtgcgcgtgctgagcctgtttcggaatatcgataaagtcctgaaaagcctgggattcctggagagcggctctggctccggcggtggcaccctgaagtacgtggaggatgtgacaaacgtggtcagacgggatgtggagaagtggggccccttcgatctggtgtacggcagcacccaacccctgggcagctcttgtgaccggtgccctggctggtacatgtttcagttccaccggatcctgcagtacgccctgccgagacaggagtcccagcggccattcttttggattttcatggacaacttgctgctgaccgaggatgaccaggaaactaccactcggttcctgcagaccgaagccgtgaccctgcaggacgtgagaggccgggactaccagaacgccatgcgggtgtggtccaacatccctggactgaaaagcaagcacgcacctctgacccctaaagaagaggagtacctgcaggcccaggtgcggagcagaagcaagctggacgcccctaaggtggatctgctggtgaagaattgcctcctgcccctgagagagtacttcaagtatttcagccagaatagtctgcccctgggcggcccaagcagcggcgcccctcctcccagcggcggcagcccagccggctccccaacctctaccgaggagggcacctctgagtccgccacccccgagagcggccctggcacctccaccgagcccagcgagggcagcgcacccggcagccctgccggcagccccacctccacagaggagggaaccagcaccgagcccagcgaaggcagcgccccaggcaccagcaccgagcctagtgagggcggctctggcggcggcagcgcccaggagattaaacggatcaacaagatcagaagaagacttgtgaaagacagcaacaccaagaaggccggcaagacaggccccatgaaaaccctgctggttagagtgatgacacccgatctgagagagcggctggaaaacctgagaaagaagcctgaaaatatcccccagcccatcagcaatacatctagagccaacctgaataagctgctgaccgattacaccgaaatgaagaaggcgatcctgcatgtgtactgggaagagttccagaaggaccctgtgggcctgatgagccgggtggcccagcctgccagcaagaagatcgatcagaacaagctgaaacctgagatggacgagaagggcaacctgaccaccgccggctttgcctgctctcagtgtggccagcccctgttcgtgtacaagctggagcaggtgtctgagaagggcaaggcttacaccaactacttcggacggtgcaatgtggccgagcacgaaaagctgatcctgctggcccagctgaagcccgagaaggatagcgacgaagccgtgacatatagcctgggaaagtttgggcagagggccctggatttctacagcattcatgtgaccaaggagtccacccaccccgtgaagcccctggcccagatcgccggaaacagatacgcctccggacctgtgggaaaggccctgagcgacgcatgtatgggcacaatcgcctccttcctgtctaagtaccaggacatcatcatcgaacaccagaaggtggtgaagggcaaccagaagagactggagagcctgcgggagctggccggcaaggaaaacctggaataccctagcgtgaccctgccacctcagcctcacaccaaggagggcgttgatgcctacaacgaagtgatcgcccgggtgcgaatgtgggtgaacctgaacctgtggcagaagctgaagctaagcagagatgatgccaagcctctgctgagactgaagggattcccttcctttcctctggtcgagagacaggccaacgaagtggactggtgggacatggtgtgtaacgtgaagaagctgatcaacgagaaaaaggaggatggcaaggtgttttggcagaatctggctggctacaagagacaggaagccctgagaccatacctgagcagcgaggaagatcggaagaagggaaagaaattcgctcggtaccagctgggcgacctgctgctgcacctggaaaagaagcacggcgaggactggggaaaggtgtacgacgaggcctgggagcggattgacaagaaagtggaaggcctgagcaagcacatcaagctggaagaggaacggagaagcgaggacgcccagagcaaggccgccctgaccgactggctgcgggctaaggccagcttcgtgatcgagggcctgaaggaggccgacaaggacgagttctgcagatgcgagctgaagctgcagaagtggtacggggacctgcggggaaagcccttcgccatcgaagccgagaacagcatcctggacatcagcggcttcagcaagcagtacaactgtgccttcatctggcagaaggacggcgtgaagaagctgaacctgtacctgatcatcaactacttcaagggcggcaagctgcggttcaagaagatcaaacctgaagccttcgaagccaacagattctacaccgtgatcaacaaaaagagcggcgagatcgtgcccatggaggtgaacttcaacttcgacgaccccaacctgatcatcctgcctctggcctttggcaagagacagggcagagaattcatctggaacgacctgctgtccctggaaaccggcagcctgaagctggccaacggaagagtgatcgagaagacactgtacaacagaagaacccggcaggatgagcctgccctgttcgtggccctgaccttcgagcggcgggaggtcctggactcctccaatatcaaaccaatgaacctgatcggcgtggcaagaggcgaaaacatccccgccgtgatcgccctgaccgaccccgagggctgcccactgagccggtttaaggatagcctgggaaacccaacccacatcctgagaatcggcgagagctataaggagaagcagcggaccatccaggccaagaaggaggtggagcagcggagagccggcggctacagccggaagtacgccagcaaagccaagaatctggcagacgatatggtgagaaacaccgctagagatctgctgtactacgccgtgacccaggatgccatgctgatcttcgccaacctgagccggggcttcggccggcagggcaagcggaccttcatggccgagagacagtacacacggatggaggactggctgaccgccaagctggcctacgagggcctgagcaagacctacctgtccaagacactggcccagtacacctccaagacatgcagcaactgtgggtttaccatcaccagcgccgactacgacagggtgctggagaagctgaagaagacagcaacaggctggatgaccacaattaacggcaaggagctgaaggtggagggccagattacctactacaacagatacaagagacagaacgtagtcaaggacctgtccgtcgagctggatagactgagcgaagaatctgtgaacaacgacatctcctcctggacaaagggcagaagcggagaagctctgagcctcctgaagaaaagattctcccatagacccgtgcaggagaagttcgtgtgcctgaactgcggcttcgagacacacgcagccgagcaagccgccctgaacatcgccagatcctggctgttcctgcggagccaggagtacaagaaataccagacaaacaagacaaccggcaacaccgataagagagccttcgtcgagacctggcagtccttttaccggaagaagcttaaggaggtgtggaaacctgccgtgcggtctggcggatctggcggaggctccacaagcgagcccgtgagcttcgaggaggtggccgtgtacttcagcagggaggagtgggccctgctggaccccgcccagagggccctgtactgggacgtgatgctggagacctacgagtgcgtggccagcctggcccccctgcccggccccaagcccatggtgatcagcctgctggaggagggcgaggagccctggatccccgacgtgggcagccccgaggccgtggccggcgacgtgagccccggcgagaccagccccaagaaaaagagaaaagtctaagctgccttctgcggggcttgccttctggccatgcccttcttctctcccttgcacctgtacctcttggtctttgaataaagcctgagtaggaaggctagcaaaaaaaaaaaaaaaaaaaaaaaaaaaaaaaaaaaaaaaaaaaaaaaaaaaaaaaaaaaaaaaaaaaaaaaaaaaaaaaa

SEQ ID NO: 3230 - RNA, 5419 nt, synthetic construct
  source 1..5419: mol_type = other RNA
aggaaataagagagaaaagaagagtaagaagaaatataagagccaccatggcccctaagaagaagcgtaaagtgagccgggtgaacggcagcggcagcggcggcggcatgaaccacgaccaggagttcgacccccctaaggtgtaccctcccgtccccgccgagaagagaaagcccatccgggtcctgagcctgttcgatggcatcgccaccggtctgctggtgctgaaggacctgggcatccaggtggataggtacattgcctccgaggtgtgcgaggactccatcaccgtgggaatggtgcgtcatcagggcaagatcatgtacgtgggcgacgtgcggagcgtgacacagaagcatatccaggagtggggccctttcgacctggtgatcggcggcagcccttgcaatgacctgagcatcgtgaacccagcccggaagggcctgtacgagggaaccggcagactgttcttcgagttttacagactgctgcacgacgcccggcctaaggaaggcgacgaccggcccttcttttggctgttcgagaatgtggtggccatgggagtcagcgacaagcgggatattagccggttcctggagagcaaccccgtgatgatcgatgccaaggaagtgagcgccgcccaccgggccagatacttctggggcaatctgcctggcatgaacagacccctggccagcaccgtgaacgacaagctggagctgcaggagtgcctggagcacggccggatcgccaagttcagcaaggtgagaaccatcaccacccgaagcaacagcatcaaacaaggcaaggaccagcactttcctgtgttcatgaacgagaaggaggacatcctgtggtgtaccgagatggagagagtgttcgggttcccagtccactacacagatgtcagcaacatgtctagactggccagacagagactgctgggaagaagctggtccgtccctgtgatcagacacctgttcgcccctctgaaggagtacttcgcctgcgtgagcagcggcaacagcaacgccaacagccggggccccagcttctctagcggcctggtgccactgtccctgagagggagccacatgggccccatggagatctacaaaaccgtgagcgcctggaagcggcagcctgtgcgcgtgctgagcctgtttcggaatatcgataaagtcctgaaaagcctgggattcctggagagcggctctggctccggcggtggcaccctgaagtacgtggaggatgtgacaaacgtggtcagacgggatgtggagaagtggggccccttcgatctggtgtacggcagcacccaacccctgggcagctcttgtgaccggtgccctggctggtacatgtttcagttccaccggatcctgcagtacgccctgccgagacaggagtcccagcggccattcttttggattttcatggacaacttgctgctgaccgaggatgaccaggaaactaccactcggttcctgcagaccgaagccgtgaccctgcaggacgtgagaggccgggactaccagaacgccatgcgggtgtggtccaacatccctggactgaaaagcaagcacgcacctctgacccctaaagaagaggagtacctgcaggcccaggtgcggagcagaagcaagctggacgcccctaaggtggatctgctggtgaagaattgcctcctgcccctgagagagtacttcaagtatttcagccagaatagtctgcccctgggcggcccaagcagcggcgcccctcctcccagcggcggcagcccagccggctccccaacctctaccgaggagggcacctctgagtccgccacccccgagagcggccctggcacctccaccgagcccagcgagggcagcgcacccggcagccctgccggcagccccacctccacagaggagggaaccagcaccgagcccagcgaaggcagcgccccaggcaccagcaccgagcctagtgagggcggctctggcggcggcagcgcccaggagattaaacggatcaacaagatcagaagaagacttgtgaaagacagcaacaccaagaaggccggcaagacaggccccatgaaaaccctgctggttagagtgatgacacccgatctgagagagcggctggaaaacctgagaaagaagcctgaaaatatcccccagcccatcagcaatacatctagagccaacctgaataagctgctgaccgattacaccgaaatgaagaaggcgatcctgcatgtgtactgggaagagttccagaaggaccctgtgggcctgatgagccgggtggcccagcctgccagcaagaagatcgatcagaacaagctgaaacctgagatggacgagaagggcaacctgaccaccgccggctttgcctgctctcagtgtggccagcccctgttcgtgtacaagctggagcaggtgtctgagaagggcaaggcttacaccaactacttcggacggtgcaatgtggccgagcacgaaaagctgatcctgctggcccagctgaagcccgagaaggatagcgacgaagccgtgacatatagcctgggaaagtttgggcagagggccctggatttctacagcattcatgtgaccaaggagtccacccaccccgtgaagcccctggcccagatcgccggaaacagatacgcctccggacctgtgggaaaggccctgagcgacgcatgtatgggcacaatcgcctccttcctgtctaagtaccaggacatcatcatcgaacaccagaaggtggtgaagggcaaccagaagagactggagagcctgcgggagctggccggcaaggaaaacctggaataccctagcgtgaccctgccacctcagcctcacaccaaggagggcgttgatgcctacaacgaagtgatcgcccgggtgcgaatgtgggtgaacctgaacctgtggcagaagctgaagctaagcagagatgatgccaagcctctgctgagactgaagggattcccttcctttcctctggtcgagagacaggccaacgaagtggactggtgggacatggtgtgtaacgtgaagaagctgatcaacgagaaaaaggaggatggcaaggtgttttggcagaatctggctggctacaagagacaggaagccctgagaccatacctgagcagcgaggaagatcggaagaagggaaagaaattcgctcggtaccagctgggcgacctgctgctgcacctggaaaagaagcacggcgaggactggggaaaggtgtacgacgaggcctgggagcggattgacaagaaagtggaaggcctgagcaagcacatcaagctggaagaggaacggagaagcgaggacgcccagagcaaggccgccctgaccgactggctgcgggctaaggccagcttcgtgatcgagggcctgaaggaggccgacaaggacgagttctgcagatgcgagctgaagctgcagaagtggtacggggacctgcggggaaagcccttcgccatcgaagccgagaacagcatcctggacatcagcggcttcagcaagcagtacaactgtgccttcatctggcagaaggacggcgtgaagaagctgaacctgtacctgatcatcaactacttcaagggcggcaagctgcggttcaagaagatcaaacctgaagccttcgaagccaacagattctacaccgtgatcaacaaaaagagcggcgagatcgtgcccatggaggtgaacttcaacttcgacgaccccaacctgatcatcctgcctctggcctttggcaagagacagggcagagaattcatctggaacgacctgctgtccctggaaaccggcagcctgaagctggccaacggaagagtgatcgagaagacactgtacaacagaagaacccggcaggatgagcctgccctgttcgtggccctgaccttcgagcggcgggaggtcctggactcctccaatatcaaaccaatgaacctgatcggcgtggcaagaggcgaaaacatccccgccgtgatcgccctgaccgaccccgagggctgcccactgagccggtttaaggatagcctgggaaacccaacccacatcctgagaatcggcgagagctataaggagaagcagcggaccatccaggccaagaaggaggtggagcagcggagagccggcggctacagccggaagtacgccagcaaagccaagaatctggcagacgatatggtgagaaacaccgctagagatctgctgtactacgccgtgacccaggatgccatgctgatcttcgccaacctgagccggggcttcggccggcagggcaagcggaccttcatggccgagagacagtacacacggatggaggactggctgaccgccaagctggcctacgagggcctgagcaagacctacctgtccaagacactggcccagtacacctccaagacatgcagcaactgtgggtttaccatcaccagcgccgactacgacagggtgctggagaagctgaagaagacagcaacaggctggatgaccacaattaacggcaaggagctgaaggtggagggccagattacctactacaacagatacaagagacagaacgtagtcaaggacctgtccgtcgagctggatagactgagcgaagaatctgtgaacaacgacatctcctcctggacaaagggcagaagcggagaagctctgagcctcctgaagaaaagattctcccatagacccgtgcaggagaagttcgtgtgcctgaactgcggcttcgagacacacgcagccgagcaagccgccctgaacatcgccagatcctggctgttcctgcggagccaggagtacaagaaataccagacaaacaagacaaccggcaacaccgataagagagccttcgtcgagacctggcagtccttttaccggaagaagcttaaggaggtgtggaaacctgccgtgcggtctggcggatctggcggaggctccacaagcgcccagggcagcctgaccctgaaggacgtggccgtggacttcacctgggaggagtggcagctgctggaccccgaccagaaggacctgtacagggacgtgatgctggagaactacagcaacctggtgagcgtgggctaccaggtgaacaagcccgacatcctgagcatgctggagcagggcgagcccccctggaccctggaggacgaggtgcacagccacccccaccccgagaccgacaaggtgaccagccccaagaaaaagagaaaagtctaagctgccttctgcggggcttgccttctggccatgcccttcttctctcccttgcacctgtacctcttggtctttgaataaagcctgagtaggaaggctagcaaaaaaaaaaaaaaaaaaaaaaaaaaaaaaaaaaaaaaaaaaaaaaaaaaaaaaaaaaaaaaaaaaaaaaaaaaaaaaaa

SEQ ID NO: 3231 - RNA, 5419 nt, synthetic construct
  source 1..5419: mol_type = other RNA
aggaaataagagagaaaagaagagtaagaagaaatataagagccaccatggcccctaagaagaagcgtaaagtgagccgggtgaacggcagcggcagcggcggcggcatgaaccacgaccaggagttcgacccccctaaggtgtaccctcccgtccccgccgagaagagaaagcccatccgggtcctgagcctgttcgatggcatcgccaccggtctgctggtgctgaaggacctgggcatccaggtggataggtacattgcctccgaggtgtgcgaggactccatcaccgtgggaatggtgcgtcatcagggcaagatcatgtacgtgggcgacgtgcggagcgtgacacagaagcatatccaggagtggggccctttcgacctggtgatcggcggcagcccttgcaatgacctgagcatcgtgaacccagcccggaagggcctgtacgagggaaccggcagactgttcttcgagttttacagactgctgcacgacgcccggcctaaggaaggcgacgaccggcccttcttttggctgttcgagaatgtggtggccatgggagtcagcgacaagcgggatattagccggttcctggagagcaaccccgtgatgatcgatgccaaggaagtgagcgccgcccaccgggccagatacttctggggcaatctgcctggcatgaacagacccctggccagcaccgtgaacgacaagctggagctgcaggagtgcctggagcacggccggatcgccaagttcagcaaggtgagaaccatcaccacccgaagcaacagcatcaaacaaggcaaggaccagcactttcctgtgttcatgaacgagaaggaggacatcctgtggtgtaccgagatggagagagtgttcgggttcccagtccactacacagatgtcagcaacatgtctagactggccagacagagactgctgggaagaagctggtccgtccctgtgatcagacacctgttcgcccctctgaaggagtacttcgcctgcgtgagcagcggcaacagcaacgccaacagccggggccccagcttctctagcggcctggtgccactgtccctgagagggagccacatgggccccatggagatctacaaaaccgtgagcgcctggaagcggcagcctgtgcgcgtgctgagcctgtttcggaatatcgataaagtcctgaaaagcctgggattcctggagagcggctctggctccggcggtggcaccctgaagtacgtggaggatgtgacaaacgtggtcagacgggatgtggagaagtggggccccttcgatctggtgtacggcagcacccaacccctgggcagctcttgtgaccggtgccctggctggtacatgtttcagttccaccggatcctgcagtacgccctgccgagacaggagtcccagcggccattcttttggattttcatggacaacttgctgctgaccgaggatgaccaggaaactaccactcggttcctgcagaccgaagccgtgaccctgcaggacgtgagaggccgggactaccagaacgccatgcgggtgtggtccaacatccctggactgaaaagcaagcacgcacctctgacccctaaagaagaggagtacctgcaggcccaggtgcggagcagaagcaagctggacgcccctaaggtggatctgctggtgaagaattgcctcctgcccctgagagagtacttcaagtatttcagccagaatagtctgcccctgggcggcccaagcagcggcgcccctcctcccagcggcggcagcccagccggctccccaacctctaccgaggagggcacctctgagtccgccacccccgagagcggccctggcacctccaccgagcccagcgagggcagcgcacccggcagccctgccggcagccccacctccacagaggagggaaccagcaccgagcccagcgaaggcagcgccccaggcaccagcaccgagcctagtgagggcggctctggcggcggcagcgcccaggagattaaacggatcaacaagatcagaagaagacttgtgaaagacagcaacaccaagaaggccggcaagacaggccccatgaaaaccctgctggttagagtgatgacacccgatctgagagagcggctggaaaacctgagaaagaagcctgaaaatatcccccagcccatcagcaatacatctagagccaacctgaataagctgctgaccgattacaccgaaatgaagaaggcgatcctgcatgtgtactgggaagagttccagaaggaccctgtgggcctgatgagccgggtggcccagcctgccagcaagaagatcgatcagaacaagctgaaacctgagatggacgagaagggcaacctgaccaccgccggctttgcctgctctcagtgtggccagcccctgttcgtgtacaagctggagcaggtgtctgagaagggcaaggcttacaccaactacttcggacggtgcaatgtggccgagcacgaaaagctgatcctgctggcccagctgaagcccgagaaggatagcgacgaagccgtgacatatagcctgggaaagtttgggcagagggccctggatttctacagcattcatgtgaccaaggagtccacccaccccgtgaagcccctggcccagatcgccggaaacagatacgcctccggacctgtgggaaaggccctgagcgacgcatgtatgggcacaatcgcctccttcctgtctaagtaccaggacatcatcatcgaacaccagaaggtggtgaagggcaaccagaagagactggagagcctgcgggagctggccggcaaggaaaacctggaataccctagcgtgaccctgccacctcagcctcacaccaaggagggcgttgatgcctacaacgaagtgatcgcccgggtgcgaatgtgggtgaacctgaacctgtggcagaagctgaagctaagcagagatgatgccaagcctctgctgagactgaagggattcccttcctttcctctggtcgagagacaggccaacgaagtggactggtgggacatggtgtgtaacgtgaagaagctgatcaacgagaaaaaggaggatggcaaggtgttttggcagaatctggctggctacaagagacaggaagccctgagaccatacctgagcagcgaggaagatcggaagaagggaaagaaattcgctcggtaccagctgggcgacctgctgctgcacctggaaaagaagcacggcgaggactggggaaaggtgtacgacgaggcctgggagcggattgacaagaaagtggaaggcctgagcaagcacatcaagctggaagaggaacggagaagcgaggacgcccagagcaaggccgccctgaccgactggctgcgggctaaggccagcttcgtgatcgagggcctgaaggaggccgacaaggacgagttctgcagatgcgagctgaagctgcagaagtggtacggggacctgcggggaaagcccttcgccatcgaagccgagaacagcatcctggacatcagcggcttcagcaagcagtacaactgtgccttcatctggcagaaggacggcgtgaagaagctgaacctgtacctgatcatcaactacttcaagggcggcaagctgcggttcaagaagatcaaacctgaagccttcgaagccaacagattctacaccgtgatcaacaaaaagagcggcgagatcgtgcccatggaggtgaacttcaacttcgacgaccccaacctgatcatcctgcctctggcctttggcaagagacagggcagagaattcatctggaacgacctgctgtccctggaaaccggcagcctgaagctggccaacggaagagtgatcgagaagacactgtacaacagaagaacccggcaggatgagcctgccctgttcgtggccctgaccttcgagcggcgggaggtcctggactcctccaatatcaaaccaatgaacctgatcggcgtggcaagaggcgaaaacatccccgccgtgatcgccctgaccgaccccgagggctgcccactgagccggtttaaggatagcctgggaaacccaacccacatcctgagaatcggcgagagctataaggagaagcagcggaccatccaggccaagaaggaggtggagcagcggagagccggcggctacagccggaagtacgccagcaaagccaagaatctggcagacgatatggtgagaaacaccgctagagatctgctgtactacgccgtgacccaggatgccatgctgatcttcgccaacctgagccggggcttcggccggcagggcaagcggaccttcatggccgagagacagtacacacggatggaggactggctgaccgccaagctggcctacgagggcctgagcaagacctacctgtccaagacactggcccagtacacctccaagacatgcagcaactgtgggtttaccatcaccagcgccgactacgacagggtgctggagaagctgaagaagacagcaacaggctggatgaccacaattaacggcaaggagctgaaggtggagggccagattacctactacaacagatacaagagacagaacgtagtcaaggacctgtccgtcgagctggatagactgagcgaagaatctgtgaacaacgacatctcctcctggacaaagggcagaagcggagaagctctgagcctcctgaagaaaagattctcccatagacccgtgcaggagaagttcgtgtgcctgaactgcggcttcgagacacacgcagccgagcaagccgccctgaacatcgccagatcctggctgttcctgcggagccaggagtacaagaaataccagacaaacaagacaaccggcaacaccgataagagagccttcgtcgagacctggcagtccttttaccggaagaagcttaaggaggtgtggaaacctgccgtgcggtctggcggatctggcggaggctccacaagcatgttccaggacagcgtggccttcgaggacgtggccgtgaccttcacccaggaggagtgggccctgctggaccccagccagaagaccctgtacagggacgtgatgcaggagaacttcaggaacctggccagcgtgggcaagaagtggaaggcccagaacatctacgtggagtacaagaacctgaggaggaacctgaggaacctgatgggcaagaggctgttcgagagcaaggaggaccaccagaccagccccaagaaaaagagaaaagtctaagctgccttctgcggggcttgccttctggccatgcccttcttctctcccttgcacctgtacctcttggtctttgaataaagcctgagtaggaaggctagcaaaaaaaaaaaaaaaaaaaaaaaaaaaaaaaaaaaaaaaaaaaaaaaaaaaaaaaaaaaaaaaaaaaaaaaaaaaaaaaa

SEQ ID NO: 3232 - RNA, 5419 nt, synthetic construct
  source 1..5419: mol_type = other RNA
aggaaataagagagaaaagaagagtaagaagaaatataagagccaccatggcccctaagaagaagcgtaaagtgagccgggtgaacggcagcggcagcggcggcggcatgaaccacgaccaggagttcgacccccctaaggtgtaccctcccgtccccgccgagaagagaaagcccatccgggtcctgagcctgttcgatggcatcgccaccggtctgctggtgctgaaggacctgggcatccaggtggataggtacattgcctccgaggtgtgcgaggactccatcaccgtgggaatggtgcgtcatcagggcaagatcatgtacgtgggcgacgtgcggagcgtgacacagaagcatatccaggagtggggccctttcgacctggtgatcggcggcagcccttgcaatgacctgagcatcgtgaacccagcccggaagggcctgtacgagggaaccggcagactgttcttcgagttttacagactgctgcacgacgcccggcctaaggaaggcgacgaccggcccttcttttggctgttcgagaatgtggtggccatgggagtcagcgacaagcgggatattagccggttcctggagagcaaccccgtgatgatcgatgccaaggaagtgagcgccgcccaccgggccagatacttctggggcaatctgcctggcatgaacagacccctggccagcaccgtgaacgacaagctggagctgcaggagtgcctggagcacggccggatcgccaagttcagcaaggtgagaaccatcaccacccgaagcaacagcatcaaacaaggcaaggaccagcactttcctgtgttcatgaacgagaaggaggacatcctgtggtgtaccgagatggagagagtgttcgggttcccagtccactacacagatgtcagcaacatgtctagactggccagacagagactgctgggaagaagctggtccgtccctgtgatcagacacctgttcgcccctctgaaggagtacttcgcctgcgtgagcagcggcaacagcaacgccaacagccggggccccagcttctctagcggcctggtgccactgtccctgagagggagccacatgggccccatggagatctacaaaaccgtgagcgcctggaagcggcagcctgtgcgcgtgctgagcctgtttcggaatatcgataaagtcctgaaaagcctgggattcctggagagcggctctggctccggcggtggcaccctgaagtacgtggaggatgtgacaaacgtggtcagacgggatgtggagaagtggggccccttcgatctggtgtacggcagcacccaacccctgggcagctcttgtgaccggtgccctggctggtacatgtttcagttccaccggatcctgcagtacgccctgccgagacaggagtcccagcggccattcttttggattttcatggacaacttgctgctgaccgaggatgaccaggaaactaccactcggttcctgcagaccgaagccgtgaccctgcaggacgtgagaggccgggactaccagaacgccatgcgggtgtggtccaacatccctggactgaaaagcaagcacgcacctctgacccctaaagaagaggagtacctgcaggcccaggtgcggagcagaagcaagctggacgcccctaaggtggatctgctggtgaagaattgcctcctgcccctgagagagtacttcaagtatttcagccagaatagtctgcccctgggcggcccaagcagcggcgcccctcctcccagcggcggcagcccagccggctccccaacctctaccgaggagggcacctctgagtccgccacccccgagagcggccctggcacctccaccgagcccagcgagggcagcgcacccggcagccctgccggcagccccacctccacagaggagggaaccagcaccgagcccagcgaaggcagcgccccaggcaccagcaccgagcctagtgagggcggctctggcggcggcagcgcccaggagattaaacggatcaacaagatcagaagaagacttgtgaaagacagcaacaccaagaaggccggcaagacaggccccatgaaaaccctgctggttagagtgatgacacccgatctgagagagcggctggaaaacctgagaaagaagcctgaaaatatcccccagcccatcagcaatacatctagagccaacctgaataagctgctgaccgattacaccgaaatgaagaaggcgatcctgcatgtgtactgggaagagttccagaaggaccctgtgggcctgatgagccgggtggcccagcctgccagcaagaagatcgatcagaacaagctgaaacctgagatggacgagaagggcaacctgaccaccgccggctttgcctgctctcagtgtggccagcccctgttcgtgtacaagctggagcaggtgtctgagaagggcaaggcttacaccaactacttcggacggtgcaatgtggccgagcacgaaaagctgatcctgctggcccagctgaagcccgagaaggatagcgacgaagccgtgacatatagcctgggaaagtttgggcagagggccctggatttctacagcattcatgtgaccaaggagtccacccaccccgtgaagcccctggcccagatcgccggaaacagatacgcctccggacctgtgggaaaggccctgagcgacgcatgtatgggcacaatcgcctccttcctgtctaagtaccaggacatcatcatcgaacaccagaaggtggtgaagggcaaccagaagagactggagagcctgcgggagctggccggcaaggaaaacctggaataccctagcgtgaccctgccacctcagcctcacaccaaggagggcgttgatgcctacaacgaagtgatcgcccgggtgcgaatgtgggtgaacctgaacctgtggcagaagctgaagctaagcagagatgatgccaagcctctgctgagactgaagggattcccttcctttcctctggtcgagagacaggccaacgaagtggactggtgggacatggtgtgtaacgtgaagaagctgatcaacgagaaaaaggaggatggcaaggtgttttggcagaatctggctggctacaagagacaggaagccctgagaccatacctgagcagcgaggaagatcggaagaagggaaagaaattcgctcggtaccagctgggcgacctgctgctgcacctggaaaagaagcacggcgaggactggggaaaggtgtacgacgaggcctgggagcggattgacaagaaagtggaaggcctgagcaagcacatcaagctggaagaggaacggagaagcgaggacgcccagagcaaggccgccctgaccgactggctgcgggctaaggccagcttcgtgatcgagggcctgaaggaggccgacaaggacgagttctgcagatgcgagctgaagctgcagaagtggtacggggacctgcggggaaagcccttcgccatcgaagccgagaacagcatcctggacatcagcggcttcagcaagcagtacaactgtgccttcatctggcagaaggacggcgtgaagaagctgaacctgtacctgatcatcaactacttcaagggcggcaagctgcggttcaagaagatcaaacctgaagccttcgaagccaacagattctacaccgtgatcaacaaaaagagcggcgagatcgtgcccatggaggtgaacttcaacttcgacgaccccaacctgatcatcctgcctctggcctttggcaagagacagggcagagaattcatctggaacgacctgctgtccctggaaaccggcagcctgaagctggccaacggaagagtgatcgagaagacactgtacaacagaagaacccggcaggatgagcctgccctgttcgtggccctgaccttcgagcggcgggaggtcctggactcctccaatatcaaaccaatgaacctgatcggcgtggcaagaggcgaaaacatccccgccgtgatcgccctgaccgaccccgagggctgcccactgagccggtttaaggatagcctgggaaacccaacccacatcctgagaatcggcgagagctataaggagaagcagcggaccatccaggccaagaaggaggtggagcagcggagagccggcggctacagccggaagtacgccagcaaagccaagaatctggcagacgatatggtgagaaacaccgctagagatctgctgtactacgccgtgacccaggatgccatgctgatcttcgccaacctgagccggggcttcggccggcagggcaagcggaccttcatggccgagagacagtacacacggatggaggactggctgaccgccaagctggcctacgagggcctgagcaagacctacctgtccaagacactggcccagtacacctccaagacatgcagcaactgtgggtttaccatcaccagcgccgactacgacagggtgctggagaagctgaagaagacagcaacaggctggatgaccacaattaacggcaaggagctgaaggtggagggccagattacctactacaacagatacaagagacagaacgtagtcaaggacctgtccgtcgagctggatagactgagcgaagaatctgtgaacaacgacatctcctcctggacaaagggcagaagcggagaagctctgagcctcctgaagaaaagattctcccatagacccgtgcaggagaagttcgtgtgcctgaactgcggcttcgagacacacgcagccgagcaagccgccctgaacatcgccagatcctggctgttcctgcggagccaggagtacaagaaataccagacaaacaagacaaccggcaacaccgataagagagccttcgtcgagacctggcagtccttttaccggaagaagcttaaggaggtgtggaaacctgccgtgcggtctggcggatctggcggaggctccacaagcttcctgctgggcctgctgaccttcagggacgtggccatcgagttcagccaggaggagtggggctgcctgaaccacacccagagggagctgtacagggacgtgatgctggagaactacggccacctgctgttcctgggcctgatcgtgagcaagcccgacctggtgagcttcctggagcagaagaaggagccctgggacgtgaagaggaagaagaccgtggccatccacaggggcaggtgggagaccagccccaagaaaaagagaaaagtctaagctgccttctgcggggcttgccttctggccatgcccttcttctctcccttgcacctgtacctcttggtctttgaataaagcctgagtaggaaggctagcaaaaaaaaaaaaaaaaaaaaaaaaaaaaaaaaaaaaaaaaaaaaaaaaaaaaaaaaaaaaaaaaaaaaaaaaaaaaaaaa

SEQ ID NO: 3233 - RNA, 5419 nt, synthetic construct
  source 1..5419: mol_type = other RNA
aggaaataagagagaaaagaagagtaagaagaaatataagagccaccatggcccctaagaagaagcgtaaagtgagccgggtgaacggcagcggcagcggcggcggcatgaaccacgaccaggagttcgacccccctaaggtgtaccctcccgtccccgccgagaagagaaagcccatccgggtcctgagcctgttcgatggcatcgccaccggtctgctggtgctgaaggacctgggcatccaggtggataggtacattgcctccgaggtgtgcgaggactccatcaccgtgggaatggtgcgtcatcagggcaagatcatgtacgtgggcgacgtgcggagcgtgacacagaagcatatccaggagtggggccctttcgacctggtgatcggcggcagcccttgcaatgacctgagcatcgtgaacccagcccggaagggcctgtacgagggaaccggcagactgttcttcgagttttacagactgctgcacgacgcccggcctaaggaaggcgacgaccggcccttcttttggctgttcgagaatgtggtggccatgggagtcagcgacaagcgggatattagccggttcctggagagcaaccccgtgatgatcgatgccaaggaagtgagcgccgcccaccgggccagatacttctggggcaatctgcctggcatgaacagacccctggccagcaccgtgaacgacaagctggagctgcaggagtgcctggagcacggccggatcgccaagttcagcaaggtgagaaccatcaccacccgaagcaacagcatcaaacaaggcaaggaccagcactttcctgtgttcatgaacgagaaggaggacatcctgtggtgtaccgagatggagagagtgttcgggttcccagtccactacacagatgtcagcaacatgtctagactggccagacagagactgctgggaagaagctggtccgtccctgtgatcagacacctgttcgcccctctgaaggagtacttcgcctgcgtgagcagcggcaacagcaacgccaacagccggggccccagcttctctagcggcctggtgccactgtccctgagagggagccacatgggccccatggagatctacaaaaccgtgagcgcctggaagcggcagcctgtgcgcgtgctgagcctgtttcggaatatcgataaagtcctgaaaagcctgggattcctggagagcggctctggctccggcggtggcaccctgaagtacgtggaggatgtgacaaacgtggtcagacgggatgtggagaagtggggccccttcgatctggtgtacggcagcacccaacccctgggcagctcttgtgaccggtgccctggctggtacatgtttcagttccaccggatcctgcagtacgccctgccgagacaggagtcccagcggccattcttttggattttcatggacaacttgctgctgaccgaggatgaccaggaaactaccactcggttcctgcagaccgaagccgtgaccctgcaggacgtgagaggccgggactaccagaacgccatgcgggtgtggtccaacatccctggactgaaaagcaagcacgcacctctgacccctaaagaagaggagtacctgcaggcccaggtgcggagcagaagcaagctggacgcccctaaggtggatctgctggtgaagaattgcctcctgcccctgagagagtacttcaagtatttcagccagaatagtctgcccctgggcggcccaagcagcggcgcccctcctcccagcggcggcagcccagccggctccccaacctctaccgaggagggcacctctgagtccgccacccccgagagcggccctggcacctccaccgagcccagcgagggcagcgcacccggcagccctgccggcagccccacctccacagaggagggaaccagcaccgagcccagcgaaggcagcgccccaggcaccagcaccgagcctagtgagggcggctctggcggcggcagcgcccaggagattaaacggatcaacaagatcagaagaagacttgtgaaagacagcaacaccaagaaggccggcaagacaggccccatgaaaaccctgctggttagagtgatgacacccgatctgagagagcggctggaaaacctgagaaagaagcctgaaaatatcccccagcccatcagcaatacatctagagccaacctgaataagctgctgaccgattacaccgaaatgaagaaggcgatcctgcatgtgtactgggaagagttccagaaggaccctgtgggcctgatgagccgggtggcccagcctgccagcaagaagatcgatcagaacaagctgaaacctgagatggacgagaagggcaacctgaccaccgccggctttgcctgctctcagtgtggccagcccctgttcgtgtacaagctggagcaggtgtctgagaagggcaaggcttacaccaactacttcggacggtgcaatgtggccgagcacgaaaagctgatcctgctggcccagctgaagcccgagaaggatagcgacgaagccgtgacatatagcctgggaaagtttgggcagagggccctggatttctacagcattcatgtgaccaaggagtccacccaccccgtgaagcccctggcccagatcgccggaaacagatacgcctccggacctgtgggaaaggccctgagcgacgcatgtatgggcacaatcgcctccttcctgtctaagtaccaggacatcatcatcgaacaccagaaggtggtgaagggcaaccagaagagactggagagcctgcgggagctggccggcaaggaaaacctggaataccctagcgtgaccctgccacctcagcctcacaccaaggagggcgttgatgcctacaacgaagtgatcgcccgggtgcgaatgtgggtgaacctgaacctgtggcagaagctgaagctaagcagagatgatgccaagcctctgctgagactgaagggattcccttcctttcctctggtcgagagacaggccaacgaagtggactggtgggacatggtgtgtaacgtgaagaagctgatcaacgagaaaaaggaggatggcaaggtgttttggcagaatctggctggctacaagagacaggaagccctgagaccatacctgagcagcgaggaagatcggaagaagggaaagaaattcgctcggtaccagctgggcgacctgctgctgcacctggaaaagaagcacggcgaggactggggaaaggtgtacgacgaggcctgggagcggattgacaagaaagtggaaggcctgagcaagcacatcaagctggaagaggaacggagaagcgaggacgcccagagcaaggccgccctgaccgactggctgcgggctaaggccagcttcgtgatcgagggcctgaaggaggccgacaaggacgagttctgcagatgcgagctgaagctgcagaagtggtacggggacctgcggggaaagcccttcgccatcgaagccgagaacagcatcctggacatcagcggcttcagcaagcagtacaactgtgccttcatctggcagaaggacggcgtgaagaagctgaacctgtacctgatcatcaactacttcaagggcggcaagctgcggttcaagaagatcaaacctgaagccttcgaagccaacagattctacaccgtgatcaacaaaaagagcggcgagatcgtgcccatggaggtgaacttcaacttcgacgaccccaacctgatcatcctgcctctggcctttggcaagagacagggcagagaattcatctggaacgacctgctgtccctggaaaccggcagcctgaagctggccaacggaagagtgatcgagaagacactgtacaacagaagaacccggcaggatgagcctgccctgttcgtggccctgaccttcgagcggcgggaggtcctggactcctccaatatcaaaccaatgaacctgatcggcgtggcaagaggcgaaaacatccccgccgtgatcgccctgaccgaccccgagggctgcccactgagccggtttaaggatagcctgggaaacccaacccacatcctgagaatcggcgagagctataaggagaagcagcggaccatccaggccaagaaggaggtggagcagcggagagccggcggctacagccggaagtacgccagcaaagccaagaatctggcagacgatatggtgagaaacaccgctagagatctgctgtactacgccgtgacccaggatgccatgctgatcttcgccaacctgagccggggcttcggccggcagggcaagcggaccttcatggccgagagacagtacacacggatggaggactggctgaccgccaagctggcctacgagggcctgagcaagacctacctgtccaagacactggcccagtacacctccaagacatgcagcaactgtgggtttaccatcaccagcgccgactacgacagggtgctggagaagctgaagaagacagcaacaggctggatgaccacaattaacggcaaggagctgaaggtggagggccagattacctactacaacagatacaagagacagaacgtagtcaaggacctgtccgtcgagctggatagactgagcgaagaatctgtgaacaacgacatctcctcctggacaaagggcagaagcggagaagctctgagcctcctgaagaaaagattctcccatagacccgtgcaggagaagttcgtgtgcctgaactgcggcttcgagacacacgcagccgagcaagccgccctgaacatcgccagatcctggctgttcctgcggagccaggagtacaagaaataccagacaaacaagacaaccggcaacaccgataagagagccttcgtcgagacctggcagtccttttaccggaagaagcttaaggaggtgtggaaacctgccgtgcggtctggcggatctggcggaggctccacaagcagcaaggcccccgtgaccttcggcgacctggccatctacttcagccaggaggagtgggagtggctgagccccatgcagaaggacctgtacgaggacgtgatgctggagaactaccacaacctggtgagcgtgggcctggcctgcaggaggcccaacatcatcgccctgctggagaagggcaaggccccctgggtgatcgagcccagcaggaggaggtggggccccgagagcggcagcaagtacaccagccccaagaaaaagagaaaagtctaagctgccttctgcggggcttgccttctggccatgcccttcttctctcccttgcacctgtacctcttggtctttgaataaagcctgagtaggaaggctagcaaaaaaaaaaaaaaaaaaaaaaaaaaaaaaaaaaaaaaaaaaaaaaaaaaaaaaaaaaaaaaaaaaaaaaaaaaaaaaaa

SEQ ID NO: 3234 - RNA, 5419 nt, synthetic construct
  source 1..5419: mol_type = other RNA
aggaaataagagagaaaagaagagtaagaagaaatataagagccaccatggcccctaagaagaagcgtaaagtgagccgggtgaacggcagcggcagcggcggcggcatgaaccacgaccaggagttcgacccccctaaggtgtaccctcccgtccccgccgagaagagaaagcccatccgggtcctgagcctgttcgatggcatcgccaccggtctgctggtgctgaaggacctgggcatccaggtggataggtacattgcctccgaggtgtgcgaggactccatcaccgtgggaatggtgcgtcatcagggcaagatcatgtacgtgggcgacgtgcggagcgtgacacagaagcatatccaggagtggggccctttcgacctggtgatcggcggcagcccttgcaatgacctgagcatcgtgaacccagcccggaagggcctgtacgagggaaccggcagactgttcttcgagttttacagactgctgcacgacgcccggcctaaggaaggcgacgaccggcccttcttttggctgttcgagaatgtggtggccatgggagtcagcgacaagcgggatattagccggttcctggagagcaaccccgtgatgatcgatgccaaggaagtgagcgccgcccaccgggccagatacttctggggcaatctgcctggcatgaacagacccctggccagcaccgtgaacgacaagctggagctgcaggagtgcctggagcacggccggatcgccaagttcagcaaggtgagaaccatcaccacccgaagcaacagcatcaaacaaggcaaggaccagcactttcctgtgttcatgaacgagaaggaggacatcctgtggtgtaccgagatggagagagtgttcgggttcccagtccactacacagatgtcagcaacatgtctagactggccagacagagactgctgggaagaagctggtccgtccctgtgatcagacacctgttcgcccctctgaaggagtacttcgcctgcgtgagcagcggcaacagcaacgccaacagccggggccccagcttctctagcggcctggtgccactgtccctgagagggagccacatgggccccatggagatctacaaaaccgtgagcgcctggaagcggcagcctgtgcgcgtgctgagcctgtttcggaatatcgataaagtcctgaaaagcctgggattcctggagagcggctctggctccggcggtggcaccctgaagtacgtggaggatgtgacaaacgtggtcagacgggatgtggagaagtggggccccttcgatctggtgtacggcagcacccaacccctgggcagctcttgtgaccggtgccctggctggtacatgtttcagttccaccggatcctgcagtacgccctgccgagacaggagtcccagcggccattcttttggattttcatggacaacttgctgctgaccgaggatgaccaggaaactaccactcggttcctgcagaccgaagccgtgaccctgcaggacgtgagaggccgggactaccagaacgccatgcgggtgtggtccaacatccctggactgaaaagcaagcacgcacctctgacccctaaagaagaggagtacctgcaggcccaggtgcggagcagaagcaagctggacgcccctaaggtggatctgctggtgaagaattgcctcctgcccctgagagagtacttcaagtatttcagccagaatagtctgcccctgggcggcccaagcagcggcgcccctcctcccagcggcggcagcccagccggctccccaacctctaccgaggagggcacctctgagtccgccacccccgagagcggccctggcacctccaccgagcccagcgagggcagcgcacccggcagccctgccggcagccccacctccacagaggagggaaccagcaccgagcccagcgaaggcagcgccccaggcaccagcaccgagcctagtgagggcggctctggcggcggcagcgcccaggagattaaacggatcaacaagatcagaagaagacttgtgaaagacagcaacaccaagaaggccggcaagacaggccccatgaaaaccctgctggttagagtgatgacacccgatctgagagagcggctggaaaacctgagaaagaagcctgaaaatatcccccagcccatcagcaatacatctagagccaacctgaataagctgctgaccgattacaccgaaatgaagaaggcgatcctgcatgtgtactgggaagagttccagaaggaccctgtgggcctgatgagccgggtggcccagcctgccagcaagaagatcgatcagaacaagctgaaacctgagatggacgagaagggcaacctgaccaccgccggctttgcctgctctcagtgtggccagcccctgttcgtgtacaagctggagcaggtgtctgagaagggcaaggcttacaccaactacttcggacggtgcaatgtggccgagcacgaaaagctgatcctgctggcccagctgaagcccgagaaggatagcgacgaagccgtgacatatagcctgggaaagtttgggcagagggccctggatttctacagcattcatgtgaccaaggagtccacccaccccgtgaagcccctggcccagatcgccggaaacagatacgcctccggacctgtgggaaaggccctgagcgacgcatgtatgggcacaatcgcctccttcctgtctaagtaccaggacatcatcatcgaacaccagaaggtggtgaagggcaaccagaagagactggagagcctgcgggagctggccggcaaggaaaacctggaataccctagcgtgaccctgccacctcagcctcacaccaaggagggcgttgatgcctacaacgaagtgatcgcccgggtgcgaatgtgggtgaacctgaacctgtggcagaagctgaagctaagcagagatgatgccaagcctctgctgagactgaagggattcccttcctttcctctggtcgagagacaggccaacgaagtggactggtgggacatggtgtgtaacgtgaagaagctgatcaacgagaaaaaggaggatggcaaggtgttttggcagaatctggctggctacaagagacaggaagccctgagaccatacctgagcagcgaggaagatcggaagaagggaaagaaattcgctcggtaccagctgggcgacctgctgctgcacctggaaaagaagcacggcgaggactggggaaaggtgtacgacgaggcctgggagcggattgacaagaaagtggaaggcctgagcaagcacatcaagctggaagaggaacggagaagcgaggacgcccagagcaaggccgccctgaccgactggctgcgggctaaggccagcttcgtgatcgagggcctgaaggaggccgacaaggacgagttctgcagatgcgagctgaagctgcagaagtggtacggggacctgcggggaaagcccttcgccatcgaagccgagaacagcatcctggacatcagcggcttcagcaagcagtacaactgtgccttcatctggcagaaggacggcgtgaagaagctgaacctgtacctgatcatcaactacttcaagggcggcaagctgcggttcaagaagatcaaacctgaagccttcgaagccaacagattctacaccgtgatcaacaaaaagagcggcgagatcgtgcccatggaggtgaacttcaacttcgacgaccccaacctgatcatcctgcctctggcctttggcaagagacagggcagagaattcatctggaacgacctgctgtccctggaaaccggcagcctgaagctggccaacggaagagtgatcgagaagacactgtacaacagaagaacccggcaggatgagcctgccctgttcgtggccctgaccttcgagcggcgggaggtcctggactcctccaatatcaaaccaatgaacctgatcggcgtggcaagaggcgaaaacatccccgccgtgatcgccctgaccgaccccgagggctgcccactgagccggtttaaggatagcctgggaaacccaacccacatcctgagaatcggcgagagctataaggagaagcagcggaccatccaggccaagaaggaggtggagcagcggagagccggcggctacagccggaagtacgccagcaaagccaagaatctggcagacgatatggtgagaaacaccgctagagatctgctgtactacgccgtgacccaggatgccatgctgatcttcgccaacctgagccggggcttcggccggcagggcaagcggaccttcatggccgagagacagtacacacggatggaggactggctgaccgccaagctggcctacgagggcctgagcaagacctacctgtccaagacactggcccagtacacctccaagacatgcagcaactgtgggtttaccatcaccagcgccgactacgacagggtgctggagaagctgaagaagacagcaacaggctggatgaccacaattaacggcaaggagctgaaggtggagggccagattacctactacaacagatacaagagacagaacgtagtcaaggacctgtccgtcgagctggatagactgagcgaagaatctgtgaacaacgacatctcctcctggacaaagggcagaagcggagaagctctgagcctcctgaagaaaagattctcccatagacccgtgcaggagaagttcgtgtgcctgaactgcggcttcgagacacacgcagccgagcaagccgccctgaacatcgccagatcctggctgttcctgcggagccaggagtacaagaaataccagacaaacaagacaaccggcaacaccgataagagagccttcgtcgagacctggcagtccttttaccggaagaagcttaaggaggtgtggaaacctgccgtgcggtctggcggatctggcggaggctccacaagcatgatgaccgccgtgagcctgaccaccaggagccaggagagcgtggccttcgaggacgtggccgtgtacttcaccaccaaggagtgggccatcatggtgcccgccgagagggccctgtacagggacgtgatgctggagaactacgaggccgtggccttcgtggtgccccccaccagcaagcccgccctggtgagccacctggagcagggcaaggagagctgcttcatcaggccccagggcgtgaccagccccaagaaaaagagaaaagtctaagctgccttctgcggggcttgccttctggccatgcccttcttctctcccttgcacctgtacctcttggtctttgaataaagcctgagtaggaaggctagcaaaaaaaaaaaaaaaaaaaaaaaaaaaaaaaaaaaaaaaaaaaaaaaaaaaaaaaaaaaaaaaaaaaaaaaaaaaaaaaa

SEQ ID NO: 3235 - RNA, 5419 nt, synthetic construct
  source 1..5419: mol_type = other RNA
aggaaataagagagaaaagaagagtaagaagaaatataagagccaccatggcccctaagaagaagcgtaaagtgagccgggtgaacggcagcggcagcggcggcggcatgaaccacgaccaggagttcgacccccctaaggtgtaccctcccgtccccgccgagaagagaaagcccatccgggtcctgagcctgttcgatggcatcgccaccggtctgctggtgctgaaggacctgggcatccaggtggataggtacattgcctccgaggtgtgcgaggactccatcaccgtgggaatggtgcgtcatcagggcaagatcatgtacgtgggcgacgtgcggagcgtgacacagaagcatatccaggagtggggccctttcgacctggtgatcggcggcagcccttgcaatgacctgagcatcgtgaacccagcccggaagggcctgtacgagggaaccggcagactgttcttcgagttttacagactgctgcacgacgcccggcctaaggaaggcgacgaccggcccttcttttggctgttcgagaatgtggtggccatgggagtcagcgacaagcgggatattagccggttcctggagagcaaccccgtgatgatcgatgccaaggaagtgagcgccgcccaccgggccagatacttctggggcaatctgcctggcatgaacagacccctggccagcaccgtgaacgacaagctggagctgcaggagtgcctggagcacggccggatcgccaagttcagcaaggtgagaaccatcaccacccgaagcaacagcatcaaacaaggcaaggaccagcactttcctgtgttcatgaacgagaaggaggacatcctgtggtgtaccgagatggagagagtgttcgggttcccagtccactacacagatgtcagcaacatgtctagactggccagacagagactgctgggaagaagctggtccgtccctgtgatcagacacctgttcgcccctctgaaggagtacttcgcctgcgtgagcagcggcaacagcaacgccaacagccggggccccagcttctctagcggcctggtgccactgtccctgagagggagccacatgggccccatggagatctacaaaaccgtgagcgcctggaagcggcagcctgtgcgcgtgctgagcctgtttcggaatatcgataaagtcctgaaaagcctgggattcctggagagcggctctggctccggcggtggcaccctgaagtacgtggaggatgtgacaaacgtggtcagacgggatgtggagaagtggggccccttcgatctggtgtacggcagcacccaacccctgggcagctcttgtgaccggtgccctggctggtacatgtttcagttccaccggatcctgcagtacgccctgccgagacaggagtcccagcggccattcttttggattttcatggacaacttgctgctgaccgaggatgaccaggaaactaccactcggttcctgcagaccgaagccgtgaccctgcaggacgtgagaggccgggactaccagaacgccatgcgggtgtggtccaacatccctggactgaaaagcaagcacgcacctctgacccctaaagaagaggagtacctgcaggcccaggtgcggagcagaagcaagctggacgcccctaaggtggatctgctggtgaagaattgcctcctgcccctgagagagtacttcaagtatttcagccagaatagtctgcccctgggcggcccaagcagcggcgcccctcctcccagcggcggcagcccagccggctccccaacctctaccgaggagggcacctctgagtccgccacccccgagagcggccctggcacctccaccgagcccagcgagggcagcgcacccggcagccctgccggcagccccacctccacagaggagggaaccagcaccgagcccagcgaaggcagcgccccaggcaccagcaccgagcctagtgagggcggctctggcggcggcagcgcccaggagattaaacggatcaacaagatcagaagaagacttgtgaaagacagcaacaccaagaaggccggcaagacaggccccatgaaaaccctgctggttagagtgatgacacccgatctgagagagcggctggaaaacctgagaaagaagcctgaaaatatcccccagcccatcagcaatacatctagagccaacctgaataagctgctgaccgattacaccgaaatgaagaaggcgatcctgcatgtgtactgggaagagttccagaaggaccctgtgggcctgatgagccgggtggcccagcctgccagcaagaagatcgatcagaacaagctgaaacctgagatggacgagaagggcaacctgaccaccgccggctttgcctgctctcagtgtggccagcccctgttcgtgtacaagctggagcaggtgtctgagaagggcaaggcttacaccaactacttcggacggtgcaatgtggccgagcacgaaaagctgatcctgctggcccagctgaagcccgagaaggatagcgacgaagccgtgacatatagcctgggaaagtttgggcagagggccctggatttctacagcattcatgtgaccaaggagtccacccaccccgtgaagcccctggcccagatcgccggaaacagatacgcctccggacctgtgggaaaggccctgagcgacgcatgtatgggcacaatcgcctccttcctgtctaagtaccaggacatcatcatcgaacaccagaaggtggtgaagggcaaccagaagagactggagagcctgcgggagctggccggcaaggaaaacctggaataccctagcgtgaccctgccacctcagcctcacaccaaggagggcgttgatgcctacaacgaagtgatcgcccgggtgcgaatgtgggtgaacctgaacctgtggcagaagctgaagctaagcagagatgatgccaagcctctgctgagactgaagggattcccttcctttcctctggtcgagagacaggccaacgaagtggactggtgggacatggtgtgtaacgtgaagaagctgatcaacgagaaaaaggaggatggcaaggtgttttggcagaatctggctggctacaagagacaggaagccctgagaccatacctgagcagcgaggaagatcggaagaagggaaagaaattcgctcggtaccagctgggcgacctgctgctgcacctggaaaagaagcacggcgaggactggggaaaggtgtacgacgaggcctgggagcggattgacaagaaagtggaaggcctgagcaagcacatcaagctggaagaggaacggagaagcgaggacgcccagagcaaggccgccctgaccgactggctgcgggctaaggccagcttcgtgatcgagggcctgaaggaggccgacaaggacgagttctgcagatgcgagctgaagctgcagaagtggtacggggacctgcggggaaagcccttcgccatcgaagccgagaacagcatcctggacatcagcggcttcagcaagcagtacaactgtgccttcatctggcagaaggacggcgtgaagaagctgaacctgtacctgatcatcaactacttcaagggcggcaagctgcggttcaagaagatcaaacctgaagccttcgaagccaacagattctacaccgtgatcaacaaaaagagcggcgagatcgtgcccatggaggtgaacttcaacttcgacgaccccaacctgatcatcctgcctctggcctttggcaagagacagggcagagaattcatctggaacgacctgctgtccctggaaaccggcagcctgaagctggccaacggaagagtgatcgagaagacactgtacaacagaagaacccggcaggatgagcctgccctgttcgtggccctgaccttcgagcggcgggaggtcctggactcctccaatatcaaaccaatgaacctgatcggcgtggcaagaggcgaaaacatccccgccgtgatcgccctgaccgaccccgagggctgcccactgagccggtttaaggatagcctgggaaacccaacccacatcctgagaatcggcgagagctataaggagaagcagcggaccatccaggccaagaaggaggtggagcagcggagagccggcggctacagccggaagtacgccagcaaagccaagaatctggcagacgatatggtgagaaacaccgctagagatctgctgtactacgccgtgacccaggatgccatgctgatcttcgccaacctgagccggggcttcggccggcagggcaagcggaccttcatggccgagagacagtacacacggatggaggactggctgaccgccaagctggcctacgagggcctgagcaagacctacctgtccaagacactggcccagtacacctccaagacatgcagcaactgtgggtttaccatcaccagcgccgactacgacagggtgctggagaagctgaagaagacagcaacaggctggatgaccacaattaacggcaaggagctgaaggtggagggccagattacctactacaacagatacaagagacagaacgtagtcaaggacctgtccgtcgagctggatagactgagcgaagaatctgtgaacaacgacatctcctcctggacaaagggcagaagcggagaagctctgagcctcctgaagaaaagattctcccatagacccgtgcaggagaagttcgtgtgcctgaactgcggcttcgagacacacgcagccgagcaagccgccctgaacatcgccagatcctggctgttcctgcggagccaggagtacaagaaataccagacaaacaagacaaccggcaacaccgataagagagccttcgtcgagacctggcagtccttttaccggaagaagcttaaggaggtgtggaaacctgccgtgcggtctggcggatctggcggaggctccacaagcctgctgaccttcgaggacgtggccatcagcttcagcgaggaggagtggaagctgatggaccccgcccagaagatgctgtacagcgacgtgatgcaggagaactacgagaccgtgatcagcctgggcctgaagctgaagaaggacaccggcaacgaccagcccatcagcaccagcaccctggagatccaggccagcggctgcaaggtgctgaggaaggccaggatgaaggtggcccagaagaccaccagccccaagaaaaagagaaaagtctaagctgccttctgcggggcttgccttctggccatgcccttcttctctcccttgcacctgtacctcttggtctttgaataaagcctgagtaggaaggctagcaaaaaaaaaaaaaaaaaaaaaaaaaaaaaaaaaaaaaaaaaaaaaaaaaaaaaaaaaaaaaaaaaaaaaaaaaaaaaaaa

SEQ ID NO: 3236 - RNA, 5419 nt, synthetic construct
  source 1..5419: mol_type = other RNA
aggaaataagagagaaaagaagagtaagaagaaatataagagccaccatggcccctaagaagaagcgtaaagtgagccgggtgaacggcagcggcagcggcggcggcatgaaccacgaccaggagttcgacccccctaaggtgtaccctcccgtccccgccgagaagagaaagcccatccgggtcctgagcctgttcgatggcatcgccaccggtctgctggtgctgaaggacctgggcatccaggtggataggtacattgcctccgaggtgtgcgaggactccatcaccgtgggaatggtgcgtcatcagggcaagatcatgtacgtgggcgacgtgcggagcgtgacacagaagcatatccaggagtggggccctttcgacctggtgatcggcggcagcccttgcaatgacctgagcatcgtgaacccagcccggaagggcctgtacgagggaaccggcagactgttcttcgagttttacagactgctgcacgacgcccggcctaaggaaggcgacgaccggcccttcttttggctgttcgagaatgtggtggccatgggagtcagcgacaagcgggatattagccggttcctggagagcaaccccgtgatgatcgatgccaaggaagtgagcgccgcccaccgggccagatacttctggggcaatctgcctggcatgaacagacccctggccagcaccgtgaacgacaagctggagctgcaggagtgcctggagcacggccggatcgccaagttcagcaaggtgagaaccatcaccacccgaagcaacagcatcaaacaaggcaaggaccagcactttcctgtgttcatgaacgagaaggaggacatcctgtggtgtaccgagatggagagagtgttcgggttcccagtccactacacagatgtcagcaacatgtctagactggccagacagagactgctgggaagaagctggtccgtccctgtgatcagacacctgttcgcccctctgaaggagtacttcgcctgcgtgagcagcggcaacagcaacgccaacagccggggccccagcttctctagcggcctggtgccactgtccctgagagggagccacatgggccccatggagatctacaaaaccgtgagcgcctggaagcggcagcctgtgcgcgtgctgagcctgtttcggaatatcgataaagtcctgaaaagcctgggattcctggagagcggctctggctccggcggtggcaccctgaagtacgtggaggatgtgacaaacgtggtcagacgggatgtggagaagtggggccccttcgatctggtgtacggcagcacccaacccctgggcagctcttgtgaccggtgccctggctggtacatgtttcagttccaccggatcctgcagtacgccctgccgagacaggagtcccagcggccattcttttggattttcatggacaacttgctgctgaccgaggatgaccaggaaactaccactcggttcctgcagaccgaagccgtgaccctgcaggacgtgagaggccgggactaccagaacgccatgcgggtgtggtccaacatccctggactgaaaagcaagcacgcacctctgacccctaaagaagaggagtacctgcaggcccaggtgcggagcagaagcaagctggacgcccctaaggtggatctgctggtgaagaattgcctcctgcccctgagagagtacttcaagtatttcagccagaatagtctgcccctgggcggcccaagcagcggcgcccctcctcccagcggcggcagcccagccggctccccaacctctaccgaggagggcacctctgagtccgccacccccgagagcggccctggcacctccaccgagcccagcgagggcagcgcacccggcagccctgccggcagccccacctccacagaggagggaaccagcaccgagcccagcgaaggcagcgccccaggcaccagcaccgagcctagtgagggcggctctggcggcggcagcgcccaggagattaaacggatcaacaagatcagaagaagacttgtgaaagacagcaacaccaagaaggccggcaagacaggccccatgaaaaccctgctggttagagtgatgacacccgatctgagagagcggctggaaaacctgagaaagaagcctgaaaatatcccccagcccatcagcaatacatctagagccaacctgaataagctgctgaccgattacaccgaaatgaagaaggcgatcctgcatgtgtactgggaagagttccagaaggaccctgtgggcctgatgagccgggtggcccagcctgccagcaagaagatcgatcagaacaagctgaaacctgagatggacgagaagggcaacctgaccaccgccggctttgcctgctctcagtgtggccagcccctgttcgtgtacaagctggagcaggtgtctgagaagggcaaggcttacaccaactacttcggacggtgcaatgtggccgagcacgaaaagctgatcctgctggcccagctgaagcccgagaaggatagcgacgaagccgtgacatatagcctgggaaagtttgggcagagggccctggatttctacagcattcatgtgaccaaggagtccacccaccccgtgaagcccctggcccagatcgccggaaacagatacgcctccggacctgtgggaaaggccctgagcgacgcatgtatgggcacaatcgcctccttcctgtctaagtaccaggacatcatcatcgaacaccagaaggtggtgaagggcaaccagaagagactggagagcctgcgggagctggccggcaaggaaaacctggaataccctagcgtgaccctgccacctcagcctcacaccaaggagggcgttgatgcctacaacgaagtgatcgcccgggtgcgaatgtgggtgaacctgaacctgtggcagaagctgaagctaagcagagatgatgccaagcctctgctgagactgaagggattcccttcctttcctctggtcgagagacaggccaacgaagtggactggtgggacatggtgtgtaacgtgaagaagctgatcaacgagaaaaaggaggatggcaaggtgttttggcagaatctggctggctacaagagacaggaagccctgagaccatacctgagcagcgaggaagatcggaagaagggaaagaaattcgctcggtaccagctgggcgacctgctgctgcacctggaaaagaagcacggcgaggactggggaaaggtgtacgacgaggcctgggagcggattgacaagaaagtggaaggcctgagcaagcacatcaagctggaagaggaacggagaagcgaggacgcccagagcaaggccgccctgaccgactggctgcgggctaaggccagcttcgtgatcgagggcctgaaggaggccgacaaggacgagttctgcagatgcgagctgaagctgcagaagtggtacggggacctgcggggaaagcccttcgccatcgaagccgagaacagcatcctggacatcagcggcttcagcaagcagtacaactgtgccttcatctggcagaaggacggcgtgaagaagctgaacctgtacctgatcatcaactacttcaagggcggcaagctgcggttcaagaagatcaaacctgaagccttcgaagccaacagattctacaccgtgatcaacaaaaagagcggcgagatcgtgcccatggaggtgaacttcaacttcgacgaccccaacctgatcatcctgcctctggcctttggcaagagacagggcagagaattcatctggaacgacctgctgtccctggaaaccggcagcctgaagctggccaacggaagagtgatcgagaagacactgtacaacagaagaacccggcaggatgagcctgccctgttcgtggccctgaccttcgagcggcgggaggtcctggactcctccaatatcaaaccaatgaacctgatcggcgtggcaagaggcgaaaacatccccgccgtgatcgccctgaccgaccccgagggctgcccactgagccggtttaaggatagcctgggaaacccaacccacatcctgagaatcggcgagagctataaggagaagcagcggaccatccaggccaagaaggaggtggagcagcggagagccggcggctacagccggaagtacgccagcaaagccaagaatctggcagacgatatggtgagaaacaccgctagagatctgctgtactacgccgtgacccaggatgccatgctgatcttcgccaacctgagccggggcttcggccggcagggcaagcggaccttcatggccgagagacagtacacacggatggaggactggctgaccgccaagctggcctacgagggcctgagcaagacctacctgtccaagacactggcccagtacacctccaagacatgcagcaactgtgggtttaccatcaccagcgccgactacgacagggtgctggagaagctgaagaagacagcaacaggctggatgaccacaattaacggcaaggagctgaaggtggagggccagattacctactacaacagatacaagagacagaacgtagtcaaggacctgtccgtcgagctggatagactgagcgaagaatctgtgaacaacgacatctcctcctggacaaagggcagaagcggagaagctctgagcctcctgaagaaaagattctcccatagacccgtgcaggagaagttcgtgtgcctgaactgcggcttcgagacacacgcagccgagcaagccgccctgaacatcgccagatcctggctgttcctgcggagccaggagtacaagaaataccagacaaacaagacaaccggcaacaccgataagagagccttcgtcgagacctggcagtccttttaccggaagaagcttaaggaggtgtggaaacctgccgtgcggtctggcggatctggcggaggctccacaagcagggtggtgttcgaggacgtggccgtgtacttcagccaggaggagtggggcctgctggacgaggcccagaggcacctgtaccacgccgtgatgaccgagaacttcgccctggtgaccagcctgggctgctggcacggcgcccagtacgaggaggcccccagcgagcagagcgtgagcgtgggcatgagcgaggtgggcacccccaagcccgaccccagcaccaagaaggcccagccctacgagaccagccccaagaaaaagagaaaagtctaagctgccttctgcggggcttgccttctggccatgcccttcttctctcccttgcacctgtacctcttggtctttgaataaagcctgagtaggaaggctagcaaaaaaaaaaaaaaaaaaaaaaaaaaaaaaaaaaaaaaaaaaaaaaaaaaaaaaaaaaaaaaaaaaaaaaaaaaaaaaaa

SEQ ID NO: 3237 - RNA, 5419 nt, synthetic construct
  source 1..5419: mol_type = other RNA
aggaaataagagagaaaagaagagtaagaagaaatataagagccaccatggcccctaagaagaagcgtaaagtgagccgggtgaacggcagcggcagcggcggcggcatgaaccacgaccaggagttcgacccccctaaggtgtaccctcccgtccccgccgagaagagaaagcccatccgggtcctgagcctgttcgatggcatcgccaccggtctgctggtgctgaaggacctgggcatccaggtggataggtacattgcctccgaggtgtgcgaggactccatcaccgtgggaatggtgcgtcatcagggcaagatcatgtacgtgggcgacgtgcggagcgtgacacagaagcatatccaggagtggggccctttcgacctggtgatcggcggcagcccttgcaatgacctgagcatcgtgaacccagcccggaagggcctgtacgagggaaccggcagactgttcttcgagttttacagactgctgcacgacgcccggcctaaggaaggcgacgaccggcccttcttttggctgttcgagaatgtggtggccatgggagtcagcgacaagcgggatattagccggttcctggagagcaaccccgtgatgatcgatgccaaggaagtgagcgccgcccaccgggccagatacttctggggcaatctgcctggcatgaacagacccctggccagcaccgtgaacgacaagctggagctgcaggagtgcctggagcacggccggatcgccaagttcagcaaggtgagaaccatcaccacccgaagcaacagcatcaaacaaggcaaggaccagcactttcctgtgttcatgaacgagaaggaggacatcctgtggtgtaccgagatggagagagtgttcgggttcccagtccactacacagatgtcagcaacatgtctagactggccagacagagactgctgggaagaagctggtccgtccctgtgatcagacacctgttcgcccctctgaaggagtacttcgcctgcgtgagcagcggcaacagcaacgccaacagccggggccccagcttctctagcggcctggtgccactgtccctgagagggagccacatgggccccatggagatctacaaaaccgtgagcgcctggaagcggcagcctgtgcgcgtgctgagcctgtttcggaatatcgataaagtcctgaaaagcctgggattcctggagagcggctctggctccggcggtggcaccctgaagtacgtggaggatgtgacaaacgtggtcagacgggatgtggagaagtggggccccttcgatctggtgtacggcagcacccaacccctgggcagctcttgtgaccggtgccctggctggtacatgtttcagttccaccggatcctgcagtacgccctgccgagacaggagtcccagcggccattcttttggattttcatggacaacttgctgctgaccgaggatgaccaggaaactaccactcggttcctgcagaccgaagccgtgaccctgcaggacgtgagaggccgggactaccagaacgccatgcgggtgtggtccaacatccctggactgaaaagcaagcacgcacctctgacccctaaagaagaggagtacctgcaggcccaggtgcggagcagaagcaagctggacgcccctaaggtggatctgctggtgaagaattgcctcctgcccctgagagagtacttcaagtatttcagccagaatagtctgcccctgggcggcccaagcagcggcgcccctcctcccagcggcggcagcccagccggctccccaacctctaccgaggagggcacctctgagtccgccacccccgagagcggccctggcacctccaccgagcccagcgagggcagcgcacccggcagccctgccggcagccccacctccacagaggagggaaccagcaccgagcccagcgaaggcagcgccccaggcaccagcaccgagcctagtgagggcggctctggcggcggcagcgcccaggagattaaacggatcaacaagatcagaagaagacttgtgaaagacagcaacaccaagaaggccggcaagacaggccccatgaaaaccctgctggttagagtgatgacacccgatctgagagagcggctggaaaacctgagaaagaagcctgaaaatatcccccagcccatcagcaatacatctagagccaacctgaataagctgctgaccgattacaccgaaatgaagaaggcgatcctgcatgtgtactgggaagagttccagaaggaccctgtgggcctgatgagccgggtggcccagcctgccagcaagaagatcgatcagaacaagctgaaacctgagatggacgagaagggcaacctgaccaccgccggctttgcctgctctcagtgtggccagcccctgttcgtgtacaagctggagcaggtgtctgagaagggcaaggcttacaccaactacttcggacggtgcaatgtggccgagcacgaaaagctgatcctgctggcccagctgaagcccgagaaggatagcgacgaagccgtgacatatagcctgggaaagtttgggcagagggccctggatttctacagcattcatgtgaccaaggagtccacccaccccgtgaagcccctggcccagatcgccggaaacagatacgcctccggacctgtgggaaaggccctgagcgacgcatgtatgggcacaatcgcctccttcctgtctaagtaccaggacatcatcatcgaacaccagaaggtggtgaagggcaaccagaagagactggagagcctgcgggagctggccggcaaggaaaacctggaataccctagcgtgaccctgccacctcagcctcacaccaaggagggcgttgatgcctacaacgaagtgatcgcccgggtgcgaatgtgggtgaacctgaacctgtggcagaagctgaagctaagcagagatgatgccaagcctctgctgagactgaagggattcccttcctttcctctggtcgagagacaggccaacgaagtggactggtgggacatggtgtgtaacgtgaagaagctgatcaacgagaaaaaggaggatggcaaggtgttttggcagaatctggctggctacaagagacaggaagccctgagaccatacctgagcagcgaggaagatcggaagaagggaaagaaattcgctcggtaccagctgggcgacctgctgctgcacctggaaaagaagcacggcgaggactggggaaaggtgtacgacgaggcctgggagcggattgacaagaaagtggaaggcctgagcaagcacatcaagctggaagaggaacggagaagcgaggacgcccagagcaaggccgccctgaccgactggctgcgggctaaggccagcttcgtgatcgagggcctgaaggaggccgacaaggacgagttctgcagatgcgagctgaagctgcagaagtggtacggggacctgcggggaaagcccttcgccatcgaagccgagaacagcatcctggacatcagcggcttcagcaagcagtacaactgtgccttcatctggcagaaggacggcgtgaagaagctgaacctgtacctgatcatcaactacttcaagggcggcaagctgcggttcaagaagatcaaacctgaagccttcgaagccaacagattctacaccgtgatcaacaaaaagagcggcgagatcgtgcccatggaggtgaacttcaacttcgacgaccccaacctgatcatcctgcctctggcctttggcaagagacagggcagagaattcatctggaacgacctgctgtccctggaaaccggcagcctgaagctggccaacggaagagtgatcgagaagacactgtacaacagaagaacccggcaggatgagcctgccctgttcgtggccctgaccttcgagcggcgggaggtcctggactcctccaatatcaaaccaatgaacctgatcggcgtggcaagaggcgaaaacatccccgccgtgatcgccctgaccgaccccgagggctgcccactgagccggtttaaggatagcctgggaaacccaacccacatcctgagaatcggcgagagctataaggagaagcagcggaccatccaggccaagaaggaggtggagcagcggagagccggcggctacagccggaagtacgccagcaaagccaagaatctggcagacgatatggtgagaaacaccgctagagatctgctgtactacgccgtgacccaggatgccatgctgatcttcgccaacctgagccggggcttcggccggcagggcaagcggaccttcatggccgagagacagtacacacggatggaggactggctgaccgccaagctggcctacgagggcctgagcaagacctacctgtccaagacactggcccagtacacctccaagacatgcagcaactgtgggtttaccatcaccagcgccgactacgacagggtgctggagaagctgaagaagacagcaacaggctggatgaccacaattaacggcaaggagctgaaggtggagggccagattacctactacaacagatacaagagacagaacgtagtcaaggacctgtccgtcgagctggatagactgagcgaagaatctgtgaacaacgacatctcctcctggacaaagggcagaagcggagaagctctgagcctcctgaagaaaagattctcccatagacccgtgcaggagaagttcgtgtgcctgaactgcggcttcgagacacacgcagccgagcaagccgccctgaacatcgccagatcctggctgttcctgcggagccaggagtacaagaaataccagacaaacaagacaaccggcaacaccgataagagagccttcgtcgagacctggcagtccttttaccggaagaagcttaaggaggtgtggaaacctgccgtgcggtctggcggatctggcggaggctccacaagcatggtgaccttcgaggacgtggccgtgcacttcaccaagaccgagtggaccggcctgagccccgcccagagggccctgtacaggagcgtgatgctggagaacttcggcaacctgaccgccctgggctaccccgtgcccaagcccgccctgatcagcctgctggagggcggcgacatggcctggggcctggaggcccaggacgacgcccccgccgagaggaccaagaacatctgcaagggcaggaccagccccaagaaaaagagaaaagtctaagctgccttctgcggggcttgccttctggccatgcccttcttctctcccttgcacctgtacctcttggtctttgaataaagcctgagtaggaaggctagcaaaaaaaaaaaaaaaaaaaaaaaaaaaaaaaaaaaaaaaaaaaaaaaaaaaaaaaaaaaaaaaaaaaaaaaaaaaaaaaa

SEQ ID NO: 3238 - RNA, 5419 nt, synthetic construct
  source 1..5419: mol_type = other RNA
aggaaataagagagaaaagaagagtaagaagaaatataagagccaccatggcccctaagaagaagcgtaaagtgagccgggtgaacggcagcggcagcggcggcggcatgaaccacgaccaggagttcgacccccctaaggtgtaccctcccgtccccgccgagaagagaaagcccatccgggtcctgagcctgttcgatggcatcgccaccggtctgctggtgctgaaggacctgggcatccaggtggataggtacattgcctccgaggtgtgcgaggactccatcaccgtgggaatggtgcgtcatcagggcaagatcatgtacgtgggcgacgtgcggagcgtgacacagaagcatatccaggagtggggccctttcgacctggtgatcggcggcagcccttgcaatgacctgagcatcgtgaacccagcccggaagggcctgtacgagggaaccggcagactgttcttcgagttttacagactgctgcacgacgcccggcctaaggaaggcgacgaccggcccttcttttggctgttcgagaatgtggtggccatgggagtcagcgacaagcgggatattagccggttcctggagagcaaccccgtgatgatcgatgccaaggaagtgagcgccgcccaccgggccagatacttctggggcaatctgcctggcatgaacagacccctggccagcaccgtgaacgacaagctggagctgcaggagtgcctggagcacggccggatcgccaagttcagcaaggtgagaaccatcaccacccgaagcaacagcatcaaacaaggcaaggaccagcactttcctgtgttcatgaacgagaaggaggacatcctgtggtgtaccgagatggagagagtgttcgggttcccagtccactacacagatgtcagcaacatgtctagactggccagacagagactgctgggaagaagctggtccgtccctgtgatcagacacctgttcgcccctctgaaggagtacttcgcctgcgtgagcagcggcaacagcaacgccaacagccggggccccagcttctctagcggcctggtgccactgtccctgagagggagccacatgggccccatggagatctacaaaaccgtgagcgcctggaagcggcagcctgtgcgcgtgctgagcctgtttcggaatatcgataaagtcctgaaaagcctgggattcctggagagcggctctggctccggcggtggcaccctgaagtacgtggaggatgtgacaaacgtggtcagacgggatgtggagaagtggggccccttcgatctggtgtacggcagcacccaacccctgggcagctcttgtgaccggtgccctggctggtacatgtttcagttccaccggatcctgcagtacgccctgccgagacaggagtcccagcggccattcttttggattttcatggacaacttgctgctgaccgaggatgaccaggaaactaccactcggttcctgcagaccgaagccgtgaccctgcaggacgtgagaggccgggactaccagaacgccatgcgggtgtggtccaacatccctggactgaaaagcaagcacgcacctctgacccctaaagaagaggagtacctgcaggcccaggtgcggagcagaagcaagctggacgcccctaaggtggatctgctggtgaagaattgcctcctgcccctgagagagtacttcaagtatttcagccagaatagtctgcccctgggcggcccaagcagcggcgcccctcctcccagcggcggcagcccagccggctccccaacctctaccgaggagggcacctctgagtccgccacccccgagagcggccctggcacctccaccgagcccagcgagggcagcgcacccggcagccctgccggcagccccacctccacagaggagggaaccagcaccgagcccagcgaaggcagcgccccaggcaccagcaccgagcctagtgagggcggctctggcggcggcagcgcccaggagattaaacggatcaacaagatcagaagaagacttgtgaaagacagcaacaccaagaaggccggcaagacaggccccatgaaaaccctgctggttagagtgatgacacccgatctgagagagcggctggaaaacctgagaaagaagcctgaaaatatcccccagcccatcagcaatacatctagagccaacctgaataagctgctgaccgattacaccgaaatgaagaaggcgatcctgcatgtgtactgggaagagttccagaaggaccctgtgggcctgatgagccgggtggcccagcctgccagcaagaagatcgatcagaacaagctgaaacctgagatggacgagaagggcaacctgaccaccgccggctttgcctgctctcagtgtggccagcccctgttcgtgtacaagctggagcaggtgtctgagaagggcaaggcttacaccaactacttcggacggtgcaatgtggccgagcacgaaaagctgatcctgctggcccagctgaagcccgagaaggatagcgacgaagccgtgacatatagcctgggaaagtttgggcagagggccctggatttctacagcattcatgtgaccaaggagtccacccaccccgtgaagcccctggcccagatcgccggaaacagatacgcctccggacctgtgggaaaggccctgagcgacgcatgtatgggcacaatcgcctccttcctgtctaagtaccaggacatcatcatcgaacaccagaaggtggtgaagggcaaccagaagagactggagagcctgcgggagctggccggcaaggaaaacctggaataccctagcgtgaccctgccacctcagcctcacaccaaggagggcgttgatgcctacaacgaagtgatcgcccgggtgcgaatgtgggtgaacctgaacctgtggcagaagctgaagctaagcagagatgatgccaagcctctgctgagactgaagggattcccttcctttcctctggtcgagagacaggccaacgaagtggactggtgggacatggtgtgtaacgtgaagaagctgatcaacgagaaaaaggaggatggcaaggtgttttggcagaatctggctggctacaagagacaggaagccctgagaccatacctgagcagcgaggaagatcggaagaagggaaagaaattcgctcggtaccagctgggcgacctgctgctgcacctggaaaagaagcacggcgaggactggggaaaggtgtacgacgaggcctgggagcggattgacaagaaagtggaaggcctgagcaagcacatcaagctggaagaggaacggagaagcgaggacgcccagagcaaggccgccctgaccgactggctgcgggctaaggccagcttcgtgatcgagggcctgaaggaggccgacaaggacgagttctgcagatgcgagctgaagctgcagaagtggtacggggacctgcggggaaagcccttcgccatcgaagccgagaacagcatcctggacatcagcggcttcagcaagcagtacaactgtgccttcatctggcagaaggacggcgtgaagaagctgaacctgtacctgatcatcaactacttcaagggcggcaagctgcggttcaagaagatcaaacctgaagccttcgaagccaacagattctacaccgtgatcaacaaaaagagcggcgagatcgtgcccatggaggtgaacttcaacttcgacgaccccaacctgatcatcctgcctctggcctttggcaagagacagggcagagaattcatctggaacgacctgctgtccctggaaaccggcagcctgaagctggccaacggaagagtgatcgagaagacactgtacaacagaagaacccggcaggatgagcctgccctgttcgtggccctgaccttcgagcggcgggaggtcctggactcctccaatatcaaaccaatgaacctgatcggcgtggcaagaggcgaaaacatccccgccgtgatcgccctgaccgaccccgagggctgcccactgagccggtttaaggatagcctgggaaacccaacccacatcctgagaatcggcgagagctataaggagaagcagcggaccatccaggccaagaaggaggtggagcagcggagagccggcggctacagccggaagtacgccagcaaagccaagaatctggcagacgatatggtgagaaacaccgctagagatctgctgtactacgccgtgacccaggatgccatgctgatcttcgccaacctgagccggggcttcggccggcagggcaagcggaccttcatggccgagagacagtacacacggatggaggactggctgaccgccaagctggcctacgagggcctgagcaagacctacctgtccaagacactggcccagtacacctccaagacatgcagcaactgtgggtttaccatcaccagcgccgactacgacagggtgctggagaagctgaagaagacagcaacaggctggatgaccacaattaacggcaaggagctgaaggtggagggccagattacctactacaacagatacaagagacagaacgtagtcaaggacctgtccgtcgagctggatagactgagcgaagaatctgtgaacaacgacatctcctcctggacaaagggcagaagcggagaagctctgagcctcctgaagaaaagattctcccatagacccgtgcaggagaagttcgtgtgcctgaactgcggcttcgagacacacgcagccgagcaagccgccctgaacatcgccagatcctggctgttcctgcggagccaggagtacaagaaataccagacaaacaagacaaccggcaacaccgataagagagccttcgtcgagacctggcagtccttttaccggaagaagcttaaggaggtgtggaaacctgccgtgcggtctggcggatctggcggaggctccacaagcggcgagagcctggagagcagggtgaccctgggcagcctgaccgccgagagccaggagctgctgaccttcaaggacgtgagcgtggacttcacccaggaggagtggggccagctggcccccgcccacaggaacctgtacagggaggtgatgctggagaactacggcaacctggtgagcgtgggctaccagctgagcaagcccggcgtgatcagccagctggagaagggcgaggagccctggctgaccagccccaagaaaaagagaaaagtctaagctgccttctgcggggcttgccttctggccatgcccttcttctctcccttgcacctgtacctcttggtctttgaataaagcctgagtaggaaggctagcaaaaaaaaaaaaaaaaaaaaaaaaaaaaaaaaaaaaaaaaaaaaaaaaaaaaaaaaaaaaaaaaaaaaaaaaaaaaaaaa

SEQ ID NO: 3239 - RNA, 5419 nt, synthetic construct
  source 1..5419: mol_type = other RNA
aggaaataagagagaaaagaagagtaagaagaaatataagagccaccatggcccctaagaagaagcgtaaagtgagccgggtgaacggcagcggcagcggcggcggcatgaaccacgaccaggagttcgacccccctaaggtgtaccctcccgtccccgccgagaagagaaagcccatccgggtcctgagcctgttcgatggcatcgccaccggtctgctggtgctgaaggacctgggcatccaggtggataggtacattgcctccgaggtgtgcgaggactccatcaccgtgggaatggtgcgtcatcagggcaagatcatgtacgtgggcgacgtgcggagcgtgacacagaagcatatccaggagtggggccctttcgacctggtgatcggcggcagcccttgcaatgacctgagcatcgtgaacccagcccggaagggcctgtacgagggaaccggcagactgttcttcgagttttacagactgctgcacgacgcccggcctaaggaaggcgacgaccggcccttcttttggctgttcgagaatgtggtggccatgggagtcagcgacaagcgggatattagccggttcctggagagcaaccccgtgatgatcgatgccaaggaagtgagcgccgcccaccgggccagatacttctggggcaatctgcctggcatgaacagacccctggccagcaccgtgaacgacaagctggagctgcaggagtgcctggagcacggccggatcgccaagttcagcaaggtgagaaccatcaccacccgaagcaacagcatcaaacaaggcaaggaccagcactttcctgtgttcatgaacgagaaggaggacatcctgtggtgtaccgagatggagagagtgttcgggttcccagtccactacacagatgtcagcaacatgtctagactggccagacagagactgctgggaagaagctggtccgtccctgtgatcagacacctgttcgcccctctgaaggagtacttcgcctgcgtgagcagcggcaacagcaacgccaacagccggggccccagcttctctagcggcctggtgccactgtccctgagagggagccacatgggccccatggagatctacaaaaccgtgagcgcctggaagcggcagcctgtgcgcgtgctgagcctgtttcggaatatcgataaagtcctgaaaagcctgggattcctggagagcggctctggctccggcggtggcaccctgaagtacgtggaggatgtgacaaacgtggtcagacgggatgtggagaagtggggccccttcgatctggtgtacggcagcacccaacccctgggcagctcttgtgaccggtgccctggctggtacatgtttcagttccaccggatcctgcagtacgccctgccgagacaggagtcccagcggccattcttttggattttcatggacaacttgctgctgaccgaggatgaccaggaaactaccactcggttcctgcagaccgaagccgtgaccctgcaggacgtgagaggccgggactaccagaacgccatgcgggtgtggtccaacatccctggactgaaaagcaagcacgcacctctgacccctaaagaagaggagtacctgcaggcccaggtgcggagcagaagcaagctggacgcccctaaggtggatctgctggtgaagaattgcctcctgcccctgagagagtacttcaagtatttcagccagaatagtctgcccctgggcggcccaagcagcggcgcccctcctcccagcggcggcagcccagccggctccccaacctctaccgaggagggcacctctgagtccgccacccccgagagcggccctggcacctccaccgagcccagcgagggcagcgcacccggcagccctgccggcagccccacctccacagaggagggaaccagcaccgagcccagcgaaggcagcgccccaggcaccagcaccgagcctagtgagggcggctctggcggcggcagcgcccaggagattaaacggatcaacaagatcagaagaagacttgtgaaagacagcaacaccaagaaggccggcaagacaggccccatgaaaaccctgctggttagagtgatgacacccgatctgagagagcggctggaaaacctgagaaagaagcctgaaaatatcccccagcccatcagcaatacatctagagccaacctgaataagctgctgaccgattacaccgaaatgaagaaggcgatcctgcatgtgtactgggaagagttccagaaggaccctgtgggcctgatgagccgggtggcccagcctgccagcaagaagatcgatcagaacaagctgaaacctgagatggacgagaagggcaacctgaccaccgccggctttgcctgctctcagtgtggccagcccctgttcgtgtacaagctggagcaggtgtctgagaagggcaaggcttacaccaactacttcggacggtgcaatgtggccgagcacgaaaagctgatcctgctggcccagctgaagcccgagaaggatagcgacgaagccgtgacatatagcctgggaaagtttgggcagagggccctggatttctacagcattcatgtgaccaaggagtccacccaccccgtgaagcccctggcccagatcgccggaaacagatacgcctccggacctgtgggaaaggccctgagcgacgcatgtatgggcacaatcgcctccttcctgtctaagtaccaggacatcatcatcgaacaccagaaggtggtgaagggcaaccagaagagactggagagcctgcgggagctggccggcaaggaaaacctggaataccctagcgtgaccctgccacctcagcctcacaccaaggagggcgttgatgcctacaacgaagtgatcgcccgggtgcgaatgtgggtgaacctgaacctgtggcagaagctgaagctaagcagagatgatgccaagcctctgctgagactgaagggattcccttcctttcctctggtcgagagacaggccaacgaagtggactggtgggacatggtgtgtaacgtgaagaagctgatcaacgagaaaaaggaggatggcaaggtgttttggcagaatctggctggctacaagagacaggaagccctgagaccatacctgagcagcgaggaagatcggaagaagggaaagaaattcgctcggtaccagctgggcgacctgctgctgcacctggaaaagaagcacggcgaggactggggaaaggtgtacgacgaggcctgggagcggattgacaagaaagtggaaggcctgagcaagcacatcaagctggaagaggaacggagaagcgaggacgcccagagcaaggccgccctgaccgactggctgcgggctaaggccagcttcgtgatcgagggcctgaaggaggccgacaaggacgagttctgcagatgcgagctgaagctgcagaagtggtacggggacctgcggggaaagcccttcgccatcgaagccgagaacagcatcctggacatcagcggcttcagcaagcagtacaactgtgccttcatctggcagaaggacggcgtgaagaagctgaacctgtacctgatcatcaactacttcaagggcggcaagctgcggttcaagaagatcaaacctgaagccttcgaagccaacagattctacaccgtgatcaacaaaaagagcggcgagatcgtgcccatggaggtgaacttcaacttcgacgaccccaacctgatcatcctgcctctggcctttggcaagagacagggcagagaattcatctggaacgacctgctgtccctggaaaccggcagcctgaagctggccaacggaagagtgatcgagaagacactgtacaacagaagaacccggcaggatgagcctgccctgttcgtggccctgaccttcgagcggcgggaggtcctggactcctccaatatcaaaccaatgaacctgatcggcgtggcaagaggcgaaaacatccccgccgtgatcgccctgaccgaccccgagggctgcccactgagccggtttaaggatagcctgggaaacccaacccacatcctgagaatcggcgagagctataaggagaagcagcggaccatccaggccaagaaggaggtggagcagcggagagccggcggctacagccggaagtacgccagcaaagccaagaatctggcagacgatatggtgagaaacaccgctagagatctgctgtactacgccgtgacccaggatgccatgctgatcttcgccaacctgagccggggcttcggccggcagggcaagcggaccttcatggccgagagacagtacacacggatggaggactggctgaccgccaagctggcctacgagggcctgagcaagacctacctgtccaagacactggcccagtacacctccaagacatgcagcaactgtgggtttaccatcaccagcgccgactacgacagggtgctggagaagctgaagaagacagcaacaggctggatgaccacaattaacggcaaggagctgaaggtggagggccagattacctactacaacagatacaagagacagaacgtagtcaaggacctgtccgtcgagctggatagactgagcgaagaatctgtgaacaacgacatctcctcctggacaaagggcagaagcggagaagctctgagcctcctgaagaaaagattctcccatagacccgtgcaggagaagttcgtgtgcctgaactgcggcttcgagacacacgcagccgagcaagccgccctgaacatcgccagatcctggctgttcctgcggagccaggagtacaagaaataccagacaaacaagacaaccggcaacaccgataagagagccttcgtcgagacctggcagtccttttaccggaagaagcttaaggaggtgtggaaacctgccgtgcggtctggcggatctggcggaggctccacaagcgccgccggcagggtgaccttcgaggacgtgaccgtgagcttcaccaagggcgagtggcagcagctgaaccccgagcagagggagctgtacagggacgtgatgctggagaactacggcaacctggtgagcgtgggcctggaggagaccagcaagcccagcgtgatcctgaggctggaggagggcaaggagccctggagcgaggaggaggtgctgaggggcggcaggcccgagaagaactgggacaccagccccaagaaaaagagaaaagtctaagctgccttctgcggggcttgccttctggccatgcccttcttctctcccttgcacctgtacctcttggtctttgaataaagcctgagtaggaaggctagcaaaaaaaaaaaaaaaaaaaaaaaaaaaaaaaaaaaaaaaaaaaaaaaaaaaaaaaaaaaaaaaaaaaaaaaaaaaaaaaa

SEQ ID NO: 3240 - RNA, 5419 nt, synthetic construct
  source 1..5419: mol_type = other RNA
aggaaataagagagaaaagaagagtaagaagaaatataagagccaccatggcccctaagaagaagcgtaaagtgagccgggtgaacggcagcggcagcggcggcggcatgaaccacgaccaggagttcgacccccctaaggtgtaccctcccgtccccgccgagaagagaaagcccatccgggtcctgagcctgttcgatggcatcgccaccggtctgctggtgctgaaggacctgggcatccaggtggataggtacattgcctccgaggtgtgcgaggactccatcaccgtgggaatggtgcgtcatcagggcaagatcatgtacgtgggcgacgtgcggagcgtgacacagaagcatatccaggagtggggccctttcgacctggtgatcggcggcagcccttgcaatgacctgagcatcgtgaacccagcccggaagggcctgtacgagggaaccggcagactgttcttcgagttttacagactgctgcacgacgcccggcctaaggaaggcgacgaccggcccttcttttggctgttcgagaatgtggtggccatgggagtcagcgacaagcgggatattagccggttcctggagagcaaccccgtgatgatcgatgccaaggaagtgagcgccgcccaccgggccagatacttctggggcaatctgcctggcatgaacagacccctggccagcaccgtgaacgacaagctggagctgcaggagtgcctggagcacggccggatcgccaagttcagcaaggtgagaaccatcaccacccgaagcaacagcatcaaacaaggcaaggaccagcactttcctgtgttcatgaacgagaaggaggacatcctgtggtgtaccgagatggagagagtgttcgggttcccagtccactacacagatgtcagcaacatgtctagactggccagacagagactgctgggaagaagctggtccgtccctgtgatcagacacctgttcgcccctctgaaggagtacttcgcctgcgtgagcagcggcaacagcaacgccaacagccggggccccagcttctctagcggcctggtgccactgtccctgagagggagccacatgggccccatggagatctacaaaaccgtgagcgcctggaagcggcagcctgtgcgcgtgctgagcctgtttcggaatatcgataaagtcctgaaaagcctgggattcctggagagcggctctggctccggcggtggcaccctgaagtacgtggaggatgtgacaaacgtggtcagacgggatgtggagaagtggggccccttcgatctggtgtacggcagcacccaacccctgggcagctcttgtgaccggtgccctggctggtacatgtttcagttccaccggatcctgcagtacgccctgccgagacaggagtcccagcggccattcttttggattttcatggacaacttgctgctgaccgaggatgaccaggaaactaccactcggttcctgcagaccgaagccgtgaccctgcaggacgtgagaggccgggactaccagaacgccatgcgggtgtggtccaacatccctggactgaaaagcaagcacgcacctctgacccctaaagaagaggagtacctgcaggcccaggtgcggagcagaagcaagctggacgcccctaaggtggatctgctggtgaagaattgcctcctgcccctgagagagtacttcaagtatttcagccagaatagtctgcccctgggcggcccaagcagcggcgcccctcctcccagcggcggcagcccagccggctccccaacctctaccgaggagggcacctctgagtccgccacccccgagagcggccctggcacctccaccgagcccagcgagggcagcgcacccggcagccctgccggcagccccacctccacagaggagggaaccagcaccgagcccagcgaaggcagcgccccaggcaccagcaccgagcctagtgagggcggctctggcggcggcagcgcccaggagattaaacggatcaacaagatcagaagaagacttgtgaaagacagcaacaccaagaaggccggcaagacaggccccatgaaaaccctgctggttagagtgatgacacccgatctgagagagcggctggaaaacctgagaaagaagcctgaaaatatcccccagcccatcagcaatacatctagagccaacctgaataagctgctgaccgattacaccgaaatgaagaaggcgatcctgcatgtgtactgggaagagttccagaaggaccctgtgggcctgatgagccgggtggcccagcctgccagcaagaagatcgatcagaacaagctgaaacctgagatggacgagaagggcaacctgaccaccgccggctttgcctgctctcagtgtggccagcccctgttcgtgtacaagctggagcaggtgtctgagaagggcaaggcttacaccaactacttcggacggtgcaatgtggccgagcacgaaaagctgatcctgctggcccagctgaagcccgagaaggatagcgacgaagccgtgacatatagcctgggaaagtttgggcagagggccctggatttctacagcattcatgtgaccaaggagtccacccaccccgtgaagcccctggcccagatcgccggaaacagatacgcctccggacctgtgggaaaggccctgagcgacgcatgtatgggcacaatcgcctccttcctgtctaagtaccaggacatcatcatcgaacaccagaaggtggtgaagggcaaccagaagagactggagagcctgcgggagctggccggcaaggaaaacctggaataccctagcgtgaccctgccacctcagcctcacaccaaggagggcgttgatgcctacaacgaagtgatcgcccgggtgcgaatgtgggtgaacctgaacctgtggcagaagctgaagctaagcagagatgatgccaagcctctgctgagactgaagggattcccttcctttcctctggtcgagagacaggccaacgaagtggactggtgggacatggtgtgtaacgtgaagaagctgatcaacgagaaaaaggaggatggcaaggtgttttggcagaatctggctggctacaagagacaggaagccctgagaccatacctgagcagcgaggaagatcggaagaagggaaagaaattcgctcggtaccagctgggcgacctgctgctgcacctggaaaagaagcacggcgaggactggggaaaggtgtacgacgaggcctgggagcggattgacaagaaagtggaaggcctgagcaagcacatcaagctggaagaggaacggagaagcgaggacgcccagagcaaggccgccctgaccgactggctgcgggctaaggccagcttcgtgatcgagggcctgaaggaggccgacaaggacgagttctgcagatgcgagctgaagctgcagaagtggtacggggacctgcggggaaagcccttcgccatcgaagccgagaacagcatcctggacatcagcggcttcagcaagcagtacaactgtgccttcatctggcagaaggacggcgtgaagaagctgaacctgtacctgatcatcaactacttcaagggcggcaagctgcggttcaagaagatcaaacctgaagccttcgaagccaacagattctacaccgtgatcaacaaaaagagcggcgagatcgtgcccatggaggtgaacttcaacttcgacgaccccaacctgatcatcctgcctctggcctttggcaagagacagggcagagaattcatctggaacgacctgctgtccctggaaaccggcagcctgaagctggccaacggaagagtgatcgagaagacactgtacaacagaagaacccggcaggatgagcctgccctgttcgtggccctgaccttcgagcggcgggaggtcctggactcctccaatatcaaaccaatgaacctgatcggcgtggcaagaggcgaaaacatccccgccgtgatcgccctgaccgaccccgagggctgcccactgagccggtttaaggatagcctgggaaacccaacccacatcctgagaatcggcgagagctataaggagaagcagcggaccatccaggccaagaaggaggtggagcagcggagagccggcggctacagccggaagtacgccagcaaagccaagaatctggcagacgatatggtgagaaacaccgctagagatctgctgtactacgccgtgacccaggatgccatgctgatcttcgccaacctgagccggggcttcggccggcagggcaagcggaccttcatggccgagagacagtacacacggatggaggactggctgaccgccaagctggcctacgagggcctgagcaagacctacctgtccaagacactggcccagtacacctccaagacatgcagcaactgtgggtttaccatcaccagcgccgactacgacagggtgctggagaagctgaagaagacagcaacaggctggatgaccacaattaacggcaaggagctgaaggtggagggccagattacctactacaacagatacaagagacagaacgtagtcaaggacctgtccgtcgagctggatagactgagcgaagaatctgtgaacaacgacatctcctcctggacaaagggcagaagcggagaagctctgagcctcctgaagaaaagattctcccatagacccgtgcaggagaagttcgtgtgcctgaactgcggcttcgagacacacgcagccgagcaagccgccctgaacatcgccagatcctggctgttcctgcggagccaggagtacaagaaataccagacaaacaagacaaccggcaacaccgataagagagccttcgtcgagacctggcagtccttttaccggaagaagcttaaggaggtgtggaaacctgccgtgcggtctggcggatctggcggaggctccacaagcgcccacaggagcctgatgttcagcgacgtgagcatcgtgttcagccaggaggagtgggagtacctggacctggagcagagggacctgtacagggacgtgatgctggagaactacagcaacctggtgagcctgggctgcttcatcagcaagcccgacgtgatcagcctgctggagcagggcaaggagccctggaaggtggtgaggaagggcaggaggaggtacgccgacctggagaccaggtacaccagccccaagaaaaagagaaaagtctaagctgccttctgcggggcttgccttctggccatgcccttcttctctcccttgcacctgtacctcttggtctttgaataaagcctgagtaggaaggctagcaaaaaaaaaaaaaaaaaaaaaaaaaaaaaaaaaaaaaaaaaaaaaaaaaaaaaaaaaaaaaaaaaaaaaaaaaaaaaaaa

SEQ ID NO: 3241 - RNA, 5419 nt, synthetic construct
  source 1..5419: mol_type = other RNA
aggaaataagagagaaaagaagagtaagaagaaatataagagccaccatggcccctaagaagaagcgtaaagtgagccgggtgaacggcagcggcagcggcggcggcatgaaccacgaccaggagttcgacccccctaaggtgtaccctcccgtccccgccgagaagagaaagcccatccgggtcctgagcctgttcgatggcatcgccaccggtctgctggtgctgaaggacctgggcatccaggtggataggtacattgcctccgaggtgtgcgaggactccatcaccgtgggaatggtgcgtcatcagggcaagatcatgtacgtgggcgacgtgcggagcgtgacacagaagcatatccaggagtggggccctttcgacctggtgatcggcggcagcccttgcaatgacctgagcatcgtgaacccagcccggaagggcctgtacgagggaaccggcagactgttcttcgagttttacagactgctgcacgacgcccggcctaaggaaggcgacgaccggcccttcttttggctgttcgagaatgtggtggccatgggagtcagcgacaagcgggatattagccggttcctggagagcaaccccgtgatgatcgatgccaaggaagtgagcgccgcccaccgggccagatacttctggggcaatctgcctggcatgaacagacccctggccagcaccgtgaacgacaagctggagctgcaggagtgcctggagcacggccggatcgccaagttcagcaaggtgagaaccatcaccacccgaagcaacagcatcaaacaaggcaaggaccagcactttcctgtgttcatgaacgagaaggaggacatcctgtggtgtaccgagatggagagagtgttcgggttcccagtccactacacagatgtcagcaacatgtctagactggccagacagagactgctgggaagaagctggtccgtccctgtgatcagacacctgttcgcccctctgaaggagtacttcgcctgcgtgagcagcggcaacagcaacgccaacagccggggccccagcttctctagcggcctggtgccactgtccctgagagggagccacatgggccccatggagatctacaaaaccgtgagcgcctggaagcggcagcctgtgcgcgtgctgagcctgtttcggaatatcgataaagtcctgaaaagcctgggattcctggagagcggctctggctccggcggtggcaccctgaagtacgtggaggatgtgacaaacgtggtcagacgggatgtggagaagtggggccccttcgatctggtgtacggcagcacccaacccctgggcagctcttgtgaccggtgccctggctggtacatgtttcagttccaccggatcctgcagtacgccctgccgagacaggagtcccagcggccattcttttggattttcatggacaacttgctgctgaccgaggatgaccaggaaactaccactcggttcctgcagaccgaagccgtgaccctgcaggacgtgagaggccgggactaccagaacgccatgcgggtgtggtccaacatccctggactgaaaagcaagcacgcacctctgacccctaaagaagaggagtacctgcaggcccaggtgcggagcagaagcaagctggacgcccctaaggtggatctgctggtgaagaattgcctcctgcccctgagagagtacttcaagtatttcagccagaatagtctgcccctgggcggcccaagcagcggcgcccctcctcccagcggcggcagcccagccggctccccaacctctaccgaggagggcacctctgagtccgccacccccgagagcggccctggcacctccaccgagcccagcgagggcagcgcacccggcagccctgccggcagccccacctccacagaggagggaaccagcaccgagcccagcgaaggcagcgccccaggcaccagcaccgagcctagtgagggcggctctggcggcggcagcgcccaggagattaaacggatcaacaagatcagaagaagacttgtgaaagacagcaacaccaagaaggccggcaagacaggccccatgaaaaccctgctggttagagtgatgacacccgatctgagagagcggctggaaaacctgagaaagaagcctgaaaatatcccccagcccatcagcaatacatctagagccaacctgaataagctgctgaccgattacaccgaaatgaagaaggcgatcctgcatgtgtactgggaagagttccagaaggaccctgtgggcctgatgagccgggtggcccagcctgccagcaagaagatcgatcagaacaagctgaaacctgagatggacgagaagggcaacctgaccaccgccggctttgcctgctctcagtgtggccagcccctgttcgtgtacaagctggagcaggtgtctgagaagggcaaggcttacaccaactacttcggacggtgcaatgtggccgagcacgaaaagctgatcctgctggcccagctgaagcccgagaaggatagcgacgaagccgtgacatatagcctgggaaagtttgggcagagggccctggatttctacagcattcatgtgaccaaggagtccacccaccccgtgaagcccctggcccagatcgccggaaacagatacgcctccggacctgtgggaaaggccctgagcgacgcatgtatgggcacaatcgcctccttcctgtctaagtaccaggacatcatcatcgaacaccagaaggtggtgaagggcaaccagaagagactggagagcctgcgggagctggccggcaaggaaaacctggaataccctagcgtgaccctgccacctcagcctcacaccaaggagggcgttgatgcctacaacgaagtgatcgcccgggtgcgaatgtgggtgaacctgaacctgtggcagaagctgaagctaagcagagatgatgccaagcctctgctgagactgaagggattcccttcctttcctctggtcgagagacaggccaacgaagtggactggtgggacatggtgtgtaacgtgaagaagctgatcaacgagaaaaaggaggatggcaaggtgttttggcagaatctggctggctacaagagacaggaagccctgagaccatacctgagcagcgaggaagatcggaagaagggaaagaaattcgctcggtaccagctgggcgacctgctgctgcacctggaaaagaagcacggcgaggactggggaaaggtgtacgacgaggcctgggagcggattgacaagaaagtggaaggcctgagcaagcacatcaagctggaagaggaacggagaagcgaggacgcccagagcaaggccgccctgaccgactggctgcgggctaaggccagcttcgtgatcgagggcctgaaggaggccgacaaggacgagttctgcagatgcgagctgaagctgcagaagtggtacggggacctgcggggaaagcccttcgccatcgaagccgagaacagcatcctggacatcagcggcttcagcaagcagtacaactgtgccttcatctggcagaaggacggcgtgaagaagctgaacctgtacctgatcatcaactacttcaagggcggcaagctgcggttcaagaagatcaaacctgaagccttcgaagccaacagattctacaccgtgatcaacaaaaagagcggcgagatcgtgcccatggaggtgaacttcaacttcgacgaccccaacctgatcatcctgcctctggcctttggcaagagacagggcagagaattcatctggaacgacctgctgtccctggaaaccggcagcctgaagctggccaacggaagagtgatcgagaagacactgtacaacagaagaacccggcaggatgagcctgccctgttcgtggccctgaccttcgagcggcgggaggtcctggactcctccaatatcaaaccaatgaacctgatcggcgtggcaagaggcgaaaacatccccgccgtgatcgccctgaccgaccccgagggctgcccactgagccggtttaaggatagcctgggaaacccaacccacatcctgagaatcggcgagagctataaggagaagcagcggaccatccaggccaagaaggaggtggagcagcggagagccggcggctacagccggaagtacgccagcaaagccaagaatctggcagacgatatggtgagaaacaccgctagagatctgctgtactacgccgtgacccaggatgccatgctgatcttcgccaacctgagccggggcttcggccggcagggcaagcggaccttcatggccgagagacagtacacacggatggaggactggctgaccgccaagctggcctacgagggcctgagcaagacctacctgtccaagacactggcccagtacacctccaagacatgcagcaactgtgggtttaccatcaccagcgccgactacgacagggtgctggagaagctgaagaagacagcaacaggctggatgaccacaattaacggcaaggagctgaaggtggagggccagattacctactacaacagatacaagagacagaacgtagtcaaggacctgtccgtcgagctggatagactgagcgaagaatctgtgaacaacgacatctcctcctggacaaagggcagaagcggagaagctctgagcctcctgaagaaaagattctcccatagacccgtgcaggagaagttcgtgtgcctgaactgcggcttcgagacacacgcagccgagcaagccgccctgaacatcgccagatcctggctgttcctgcggagccaggagtacaagaaataccagacaaacaagacaaccggcaacaccgataagagagccttcgtcgagacctggcagtccttttaccggaagaagcttaaggaggtgtggaaacctgccgtgcggtctggcggatctggcggaggctccacaagcatgaccaaggcccaggagagcctgaccctgaaggacgtggccgtggacttcacctgggaggagtggcagctgctgggccccgcccagaagaggctgtacagggacgtgatgctggagaactacagcaacctggtgagcgtgggctaccaggccagcaagcccgacgccctgaccaagctggagcagggcgagcccctgtggaccctggaggacgagatccacagccccgcccaccccgagatcaccagccccaagaaaaagagaaaagtctaagctgccttctgcggggcttgccttctggccatgcccttcttctctcccttgcacctgtacctcttggtctttgaataaagcctgagtaggaaggctagcaaaaaaaaaaaaaaaaaaaaaaaaaaaaaaaaaaaaaaaaaaaaaaaaaaaaaaaaaaaaaaaaaaaaaaaaaaaaaaaa

SEQ ID NO: 3242 - RNA, 5419 nt, synthetic construct
  source 1..5419: mol_type = other RNA
aggaaataagagagaaaagaagagtaagaagaaatataagagccaccatggcccctaagaagaagcgtaaagtgagccgggtgaacggcagcggcagcggcggcggcatgaaccacgaccaggagttcgacccccctaaggtgtaccctcccgtccccgccgagaagagaaagcccatccgggtcctgagcctgttcgatggcatcgccaccggtctgctggtgctgaaggacctgggcatccaggtggataggtacattgcctccgaggtgtgcgaggactccatcaccgtgggaatggtgcgtcatcagggcaagatcatgtacgtgggcgacgtgcggagcgtgacacagaagcatatccaggagtggggccctttcgacctggtgatcggcggcagcccttgcaatgacctgagcatcgtgaacccagcccggaagggcctgtacgagggaaccggcagactgttcttcgagttttacagactgctgcacgacgcccggcctaaggaaggcgacgaccggcccttcttttggctgttcgagaatgtggtggccatgggagtcagcgacaagcgggatattagccggttcctggagagcaaccccgtgatgatcgatgccaaggaagtgagcgccgcccaccgggccagatacttctggggcaatctgcctggcatgaacagacccctggccagcaccgtgaacgacaagctggagctgcaggagtgcctggagcacggccggatcgccaagttcagcaaggtgagaaccatcaccacccgaagcaacagcatcaaacaaggcaaggaccagcactttcctgtgttcatgaacgagaaggaggacatcctgtggtgtaccgagatggagagagtgttcgggttcccagtccactacacagatgtcagcaacatgtctagactggccagacagagactgctgggaagaagctggtccgtccctgtgatcagacacctgttcgcccctctgaaggagtacttcgcctgcgtgagcagcggcaacagcaacgccaacagccggggccccagcttctctagcggcctggtgccactgtccctgagagggagccacatgggccccatggagatctacaaaaccgtgagcgcctggaagcggcagcctgtgcgcgtgctgagcctgtttcggaatatcgataaagtcctgaaaagcctgggattcctggagagcggctctggctccggcggtggcaccctgaagtacgtggaggatgtgacaaacgtggtcagacgggatgtggagaagtggggccccttcgatctggtgtacggcagcacccaacccctgggcagctcttgtgaccggtgccctggctggtacatgtttcagttccaccggatcctgcagtacgccctgccgagacaggagtcccagcggccattcttttggattttcatggacaacttgctgctgaccgaggatgaccaggaaactaccactcggttcctgcagaccgaagccgtgaccctgcaggacgtgagaggccgggactaccagaacgccatgcgggtgtggtccaacatccctggactgaaaagcaagcacgcacctctgacccctaaagaagaggagtacctgcaggcccaggtgcggagcagaagcaagctggacgcccctaaggtggatctgctggtgaagaattgcctcctgcccctgagagagtacttcaagtatttcagccagaatagtctgcccctgggcggcccaagcagcggcgcccctcctcccagcggcggcagcccagccggctccccaacctctaccgaggagggcacctctgagtccgccacccccgagagcggccctggcacctccaccgagcccagcgagggcagcgcacccggcagccctgccggcagccccacctccacagaggagggaaccagcaccgagcccagcgaaggcagcgccccaggcaccagcaccgagcctagtgagggcggctctggcggcggcagcgcccaggagattaaacggatcaacaagatcagaagaagacttgtgaaagacagcaacaccaagaaggccggcaagacaggccccatgaaaaccctgctggttagagtgatgacacccgatctgagagagcggctggaaaacctgagaaagaagcctgaaaatatcccccagcccatcagcaatacatctagagccaacctgaataagctgctgaccgattacaccgaaatgaagaaggcgatcctgcatgtgtactgggaagagttccagaaggaccctgtgggcctgatgagccgggtggcccagcctgccagcaagaagatcgatcagaacaagctgaaacctgagatggacgagaagggcaacctgaccaccgccggctttgcctgctctcagtgtggccagcccctgttcgtgtacaagctggagcaggtgtctgagaagggcaaggcttacaccaactacttcggacggtgcaatgtggccgagcacgaaaagctgatcctgctggcccagctgaagcccgagaaggatagcgacgaagccgtgacatatagcctgggaaagtttgggcagagggccctggatttctacagcattcatgtgaccaaggagtccacccaccccgtgaagcccctggcccagatcgccggaaacagatacgcctccggacctgtgggaaaggccctgagcgacgcatgtatgggcacaatcgcctccttcctgtctaagtaccaggacatcatcatcgaacaccagaaggtggtgaagggcaaccagaagagactggagagcctgcgggagctggccggcaaggaaaacctggaataccctagcgtgaccctgccacctcagcctcacaccaaggagggcgttgatgcctacaacgaagtgatcgcccgggtgcgaatgtgggtgaacctgaacctgtggcagaagctgaagctaagcagagatgatgccaagcctctgctgagactgaagggattcccttcctttcctctggtcgagagacaggccaacgaagtggactggtgggacatggtgtgtaacgtgaagaagctgatcaacgagaaaaaggaggatggcaaggtgttttggcagaatctggctggctacaagagacaggaagccctgagaccatacctgagcagcgaggaagatcggaagaagggaaagaaattcgctcggtaccagctgggcgacctgctgctgcacctggaaaagaagcacggcgaggactggggaaaggtgtacgacgaggcctgggagcggattgacaagaaagtggaaggcctgagcaagcacatcaagctggaagaggaacggagaagcgaggacgcccagagcaaggccgccctgaccgactggctgcgggctaaggccagcttcgtgatcgagggcctgaaggaggccgacaaggacgagttctgcagatgcgagctgaagctgcagaagtggtacggggacctgcggggaaagcccttcgccatcgaagccgagaacagcatcctggacatcagcggcttcagcaagcagtacaactgtgccttcatctggcagaaggacggcgtgaagaagctgaacctgtacctgatcatcaactacttcaagggcggcaagctgcggttcaagaagatcaaacctgaagccttcgaagccaacagattctacaccgtgatcaacaaaaagagcggcgagatcgtgcccatggaggtgaacttcaacttcgacgaccccaacctgatcatcctgcctctggcctttggcaagagacagggcagagaattcatctggaacgacctgctgtccctggaaaccggcagcctgaagctggccaacggaagagtgatcgagaagacactgtacaacagaagaacccggcaggatgagcctgccctgttcgtggccctgaccttcgagcggcgggaggtcctggactcctccaatatcaaaccaatgaacctgatcggcgtggcaagaggcgaaaacatccccgccgtgatcgccctgaccgaccccgagggctgcccactgagccggtttaaggatagcctgggaaacccaacccacatcctgagaatcggcgagagctataaggagaagcagcggaccatccaggccaagaaggaggtggagcagcggagagccggcggctacagccggaagtacgccagcaaagccaagaatctggcagacgatatggtgagaaacaccgctagagatctgctgtactacgccgtgacccaggatgccatgctgatcttcgccaacctgagccggggcttcggccggcagggcaagcggaccttcatggccgagagacagtacacacggatggaggactggctgaccgccaagctggcctacgagggcctgagcaagacctacctgtccaagacactggcccagtacacctccaagacatgcagcaactgtgggtttaccatcaccagcgccgactacgacagggtgctggagaagctgaagaagacagcaacaggctggatgaccacaattaacggcaaggagctgaaggtggagggccagattacctactacaacagatacaagagacagaacgtagtcaaggacctgtccgtcgagctggatagactgagcgaagaatctgtgaacaacgacatctcctcctggacaaagggcagaagcggagaagctctgagcctcctgaagaaaagattctcccatagacccgtgcaggagaagttcgtgtgcctgaactgcggcttcgagacacacgcagccgagcaagccgccctgaacatcgccagatcctggctgttcctgcggagccaggagtacaagaaataccagacaaacaagacaaccggcaacaccgataagagagccttcgtcgagacctggcagtccttttaccggaagaagcttaaggaggtgtggaaacctgccgtgcggtctggcggatctggcggaggctccacaagcatgatgaccgccgtgagcctgaccaccaggccccaggagagcgtggccttcgaggacgtggccgtgtacttcaccaccaaggagtgggccatcatggtgcccgccgagagggccctgtacagggacgtgatgctggagaactacgaggccgtggccttcgtggtgccccccaccagcaagcccgccctggtgagccacctggagcagggcaaggagagctgcttcacccagccccagggcgtgaccagccccaagaaaaagagaaaagtctaagctgccttctgcggggcttgccttctggccatgcccttcttctctcccttgcacctgtacctcttggtctttgaataaagcctgagtaggaaggctagcaaaaaaaaaaaaaaaaaaaaaaaaaaaaaaaaaaaaaaaaaaaaaaaaaaaaaaaaaaaaaaaaaaaaaaaaaaaaaaaa

SEQ ID NO: 3243 - RNA, 5419 nt, synthetic construct
  source 1..5419: mol_type = other RNA
aggaaataagagagaaaagaagagtaagaagaaatataagagccaccatggcccctaagaagaagcgtaaagtgagccgggtgaacggcagcggcagcggcggcggcatgaaccacgaccaggagttcgacccccctaaggtgtaccctcccgtccccgccgagaagagaaagcccatccgggtcctgagcctgttcgatggcatcgccaccggtctgctggtgctgaaggacctgggcatccaggtggataggtacattgcctccgaggtgtgcgaggactccatcaccgtgggaatggtgcgtcatcagggcaagatcatgtacgtgggcgacgtgcggagcgtgacacagaagcatatccaggagtggggccctttcgacctggtgatcggcggcagcccttgcaatgacctgagcatcgtgaacccagcccggaagggcctgtacgagggaaccggcagactgttcttcgagttttacagactgctgcacgacgcccggcctaaggaaggcgacgaccggcccttcttttggctgttcgagaatgtggtggccatgggagtcagcgacaagcgggatattagccggttcctggagagcaaccccgtgatgatcgatgccaaggaagtgagcgccgcccaccgggccagatacttctggggcaatctgcctggcatgaacagacccctggccagcaccgtgaacgacaagctggagctgcaggagtgcctggagcacggccggatcgccaagttcagcaaggtgagaaccatcaccacccgaagcaacagcatcaaacaaggcaaggaccagcactttcctgtgttcatgaacgagaaggaggacatcctgtggtgtaccgagatggagagagtgttcgggttcccagtccactacacagatgtcagcaacatgtctagactggccagacagagactgctgggaagaagctggtccgtccctgtgatcagacacctgttcgcccctctgaaggagtacttcgcctgcgtgagcagcggcaacagcaacgccaacagccggggccccagcttctctagcggcctggtgccactgtccctgagagggagccacatgggccccatggagatctacaaaaccgtgagcgcctggaagcggcagcctgtgcgcgtgctgagcctgtttcggaatatcgataaagtcctgaaaagcctgggattcctggagagcggctctggctccggcggtggcaccctgaagtacgtggaggatgtgacaaacgtggtcagacgggatgtggagaagtggggccccttcgatctggtgtacggcagcacccaacccctgggcagctcttgtgaccggtgccctggctggtacatgtttcagttccaccggatcctgcagtacgccctgccgagacaggagtcccagcggccattcttttggattttcatggacaacttgctgctgaccgaggatgaccaggaaactaccactcggttcctgcagaccgaagccgtgaccctgcaggacgtgagaggccgggactaccagaacgccatgcgggtgtggtccaacatccctggactgaaaagcaagcacgcacctctgacccctaaagaagaggagtacctgcaggcccaggtgcggagcagaagcaagctggacgcccctaaggtggatctgctggtgaagaattgcctcctgcccctgagagagtacttcaagtatttcagccagaatagtctgcccctgggcggcccaagcagcggcgcccctcctcccagcggcggcagcccagccggctccccaacctctaccgaggagggcacctctgagtccgccacccccgagagcggccctggcacctccaccgagcccagcgagggcagcgcacccggcagccctgccggcagccccacctccacagaggagggaaccagcaccgagcccagcgaaggcagcgccccaggcaccagcaccgagcctagtgagggcggctctggcggcggcagcgcccaggagattaaacggatcaacaagatcagaagaagacttgtgaaagacagcaacaccaagaaggccggcaagacaggccccatgaaaaccctgctggttagagtgatgacacccgatctgagagagcggctggaaaacctgagaaagaagcctgaaaatatcccccagcccatcagcaatacatctagagccaacctgaataagctgctgaccgattacaccgaaatgaagaaggcgatcctgcatgtgtactgggaagagttccagaaggaccctgtgggcctgatgagccgggtggcccagcctgccagcaagaagatcgatcagaacaagctgaaacctgagatggacgagaagggcaacctgaccaccgccggctttgcctgctctcagtgtggccagcccctgttcgtgtacaagctggagcaggtgtctgagaagggcaaggcttacaccaactacttcggacggtgcaatgtggccgagcacgaaaagctgatcctgctggcccagctgaagcccgagaaggatagcgacgaagccgtgacatatagcctgggaaagtttgggcagagggccctggatttctacagcattcatgtgaccaaggagtccacccaccccgtgaagcccctggcccagatcgccggaaacagatacgcctccggacctgtgggaaaggccctgagcgacgcatgtatgggcacaatcgcctccttcctgtctaagtaccaggacatcatcatcgaacaccagaaggtggtgaagggcaaccagaagagactggagagcctgcgggagctggccggcaaggaaaacctggaataccctagcgtgaccctgccacctcagcctcacaccaaggagggcgttgatgcctacaacgaagtgatcgcccgggtgcgaatgtgggtgaacctgaacctgtggcagaagctgaagctaagcagagatgatgccaagcctctgctgagactgaagggattcccttcctttcctctggtcgagagacaggccaacgaagtggactggtgggacatggtgtgtaacgtgaagaagctgatcaacgagaaaaaggaggatggcaaggtgttttggcagaatctggctggctacaagagacaggaagccctgagaccatacctgagcagcgaggaagatcggaagaagggaaagaaattcgctcggtaccagctgggcgacctgctgctgcacctggaaaagaagcacggcgaggactggggaaaggtgtacgacgaggcctgggagcggattgacaagaaagtggaaggcctgagcaagcacatcaagctggaagaggaacggagaagcgaggacgcccagagcaaggccgccctgaccgactggctgcgggctaaggccagcttcgtgatcgagggcctgaaggaggccgacaaggacgagttctgcagatgcgagctgaagctgcagaagtggtacggggacctgcggggaaagcccttcgccatcgaagccgagaacagcatcctggacatcagcggcttcagcaagcagtacaactgtgccttcatctggcagaaggacggcgtgaagaagctgaacctgtacctgatcatcaactacttcaagggcggcaagctgcggttcaagaagatcaaacctgaagccttcgaagccaacagattctacaccgtgatcaacaaaaagagcggcgagatcgtgcccatggaggtgaacttcaacttcgacgaccccaacctgatcatcctgcctctggcctttggcaagagacagggcagagaattcatctggaacgacctgctgtccctggaaaccggcagcctgaagctggccaacggaagagtgatcgagaagacactgtacaacagaagaacccggcaggatgagcctgccctgttcgtggccctgaccttcgagcggcgggaggtcctggactcctccaatatcaaaccaatgaacctgatcggcgtggcaagaggcgaaaacatccccgccgtgatcgccctgaccgaccccgagggctgcccactgagccggtttaaggatagcctgggaaacccaacccacatcctgagaatcggcgagagctataaggagaagcagcggaccatccaggccaagaaggaggtggagcagcggagagccggcggctacagccggaagtacgccagcaaagccaagaatctggcagacgatatggtgagaaacaccgctagagatctgctgtactacgccgtgacccaggatgccatgctgatcttcgccaacctgagccggggcttcggccggcagggcaagcggaccttcatggccgagagacagtacacacggatggaggactggctgaccgccaagctggcctacgagggcctgagcaagacctacctgtccaagacactggcccagtacacctccaagacatgcagcaactgtgggtttaccatcaccagcgccgactacgacagggtgctggagaagctgaagaagacagcaacaggctggatgaccacaattaacggcaaggagctgaaggtggagggccagattacctactacaacagatacaagagacagaacgtagtcaaggacctgtccgtcgagctggatagactgagcgaagaatctgtgaacaacgacatctcctcctggacaaagggcagaagcggagaagctctgagcctcctgaagaaaagattctcccatagacccgtgcaggagaagttcgtgtgcctgaactgcggcttcgagacacacgcagccgagcaagccgccctgaacatcgccagatcctggctgttcctgcggagccaggagtacaagaaataccagacaaacaagacaaccggcaacaccgataagagagccttcgtcgagacctggcagtccttttaccggaagaagcttaaggaggtgtggaaacctgccgtgcggtctggcggatctggcggaggctccacaagccagatgcaggtgaagttcgaggacatcgccatcagcttcagccaggaggagtgggagtacctgaacgaggagcagaaggagctgtacagggaggtgatggaggagaactaccagaccctgctgagcctggccaccgacagccccaccttcacccccaagatcatcagctacatcaagaggggcgaggagccctacatcaggggcgagcccgacagcgaggagagggagagcggcaagagcagcaccagccccaagaaaaagagaaaagtctaagctgccttctgcggggcttgccttctggccatgcccttcttctctcccttgcacctgtacctcttggtctttgaataaagcctgagtaggaaggctagcaaaaaaaaaaaaaaaaaaaaaaaaaaaaaaaaaaaaaaaaaaaaaaaaaaaaaaaaaaaaaaaaaaaaaaaaaaaaaaaa

SEQ ID NO: 3244 - RNA, 5419 nt, synthetic construct
  source 1..5419: mol_type = other RNA
aggaaataagagagaaaagaagagtaagaagaaatataagagccaccatggcccctaagaagaagcgtaaagtgagccgggtgaacggcagcggcagcggcggcggcatgaaccacgaccaggagttcgacccccctaaggtgtaccctcccgtccccgccgagaagagaaagcccatccgggtcctgagcctgttcgatggcatcgccaccggtctgctggtgctgaaggacctgggcatccaggtggataggtacattgcctccgaggtgtgcgaggactccatcaccgtgggaatggtgcgtcatcagggcaagatcatgtacgtgggcgacgtgcggagcgtgacacagaagcatatccaggagtggggccctttcgacctggtgatcggcggcagcccttgcaatgacctgagcatcgtgaacccagcccggaagggcctgtacgagggaaccggcagactgttcttcgagttttacagactgctgcacgacgcccggcctaaggaaggcgacgaccggcccttcttttggctgttcgagaatgtggtggccatgggagtcagcgacaagcgggatattagccggttcctggagagcaaccccgtgatgatcgatgccaaggaagtgagcgccgcccaccgggccagatacttctggggcaatctgcctggcatgaacagacccctggccagcaccgtgaacgacaagctggagctgcaggagtgcctggagcacggccggatcgccaagttcagcaaggtgagaaccatcaccacccgaagcaacagcatcaaacaaggcaaggaccagcactttcctgtgttcatgaacgagaaggaggacatcctgtggtgtaccgagatggagagagtgttcgggttcccagtccactacacagatgtcagcaacatgtctagactggccagacagagactgctgggaagaagctggtccgtccctgtgatcagacacctgttcgcccctctgaaggagtacttcgcctgcgtgagcagcggcaacagcaacgccaacagccggggccccagcttctctagcggcctggtgccactgtccctgagagggagccacatgggccccatggagatctacaaaaccgtgagcgcctggaagcggcagcctgtgcgcgtgctgagcctgtttcggaatatcgataaagtcctgaaaagcctgggattcctggagagcggctctggctccggcggtggcaccctgaagtacgtggaggatgtgacaaacgtggtcagacgggatgtggagaagtggggccccttcgatctggtgtacggcagcacccaacccctgggcagctcttgtgaccggtgccctggctggtacatgtttcagttccaccggatcctgcagtacgccctgccgagacaggagtcccagcggccattcttttggattttcatggacaacttgctgctgaccgaggatgaccaggaaactaccactcggttcctgcagaccgaagccgtgaccctgcaggacgtgagaggccgggactaccagaacgccatgcgggtgtggtccaacatccctggactgaaaagcaagcacgcacctctgacccctaaagaagaggagtacctgcaggcccaggtgcggagcagaagcaagctggacgcccctaaggtggatctgctggtgaagaattgcctcctgcccctgagagagtacttcaagtatttcagccagaatagtctgcccctgggcggcccaagcagcggcgcccctcctcccagcggcggcagcccagccggctccccaacctctaccgaggagggcacctctgagtccgccacccccgagagcggccctggcacctccaccgagcccagcgagggcagcgcacccggcagccctgccggcagccccacctccacagaggagggaaccagcaccgagcccagcgaaggcagcgccccaggcaccagcaccgagcctagtgagggcggctctggcggcggcagcgcccaggagattaaacggatcaacaagatcagaagaagacttgtgaaagacagcaacaccaagaaggccggcaagacaggccccatgaaaaccctgctggttagagtgatgacacccgatctgagagagcggctggaaaacctgagaaagaagcctgaaaatatcccccagcccatcagcaatacatctagagccaacctgaataagctgctgaccgattacaccgaaatgaagaaggcgatcctgcatgtgtactgggaagagttccagaaggaccctgtgggcctgatgagccgggtggcccagcctgccagcaagaagatcgatcagaacaagctgaaacctgagatggacgagaagggcaacctgaccaccgccggctttgcctgctctcagtgtggccagcccctgttcgtgtacaagctggagcaggtgtctgagaagggcaaggcttacaccaactacttcggacggtgcaatgtggccgagcacgaaaagctgatcctgctggcccagctgaagcccgagaaggatagcgacgaagccgtgacatatagcctgggaaagtttgggcagagggccctggatttctacagcattcatgtgaccaaggagtccacccaccccgtgaagcccctggcccagatcgccggaaacagatacgcctccggacctgtgggaaaggccctgagcgacgcatgtatgggcacaatcgcctccttcctgtctaagtaccaggacatcatcatcgaacaccagaaggtggtgaagggcaaccagaagagactggagagcctgcgggagctggccggcaaggaaaacctggaataccctagcgtgaccctgccacctcagcctcacaccaaggagggcgttgatgcctacaacgaagtgatcgcccgggtgcgaatgtgggtgaacctgaacctgtggcagaagctgaagctaagcagagatgatgccaagcctctgctgagactgaagggattcccttcctttcctctggtcgagagacaggccaacgaagtggactggtgggacatggtgtgtaacgtgaagaagctgatcaacgagaaaaaggaggatggcaaggtgttttggcagaatctggctggctacaagagacaggaagccctgagaccatacctgagcagcgaggaagatcggaagaagggaaagaaattcgctcggtaccagctgggcgacctgctgctgcacctggaaaagaagcacggcgaggactggggaaaggtgtacgacgaggcctgggagcggattgacaagaaagtggaaggcctgagcaagcacatcaagctggaagaggaacggagaagcgaggacgcccagagcaaggccgccctgaccgactggctgcgggctaaggccagcttcgtgatcgagggcctgaaggaggccgacaaggacgagttctgcagatgcgagctgaagctgcagaagtggtacggggacctgcggggaaagcccttcgccatcgaagccgagaacagcatcctggacatcagcggcttcagcaagcagtacaactgtgccttcatctggcagaaggacggcgtgaagaagctgaacctgtacctgatcatcaactacttcaagggcggcaagctgcggttcaagaagatcaaacctgaagccttcgaagccaacagattctacaccgtgatcaacaaaaagagcggcgagatcgtgcccatggaggtgaacttcaacttcgacgaccccaacctgatcatcctgcctctggcctttggcaagagacagggcagagaattcatctggaacgacctgctgtccctggaaaccggcagcctgaagctggccaacggaagagtgatcgagaagacactgtacaacagaagaacccggcaggatgagcctgccctgttcgtggccctgaccttcgagcggcgggaggtcctggactcctccaatatcaaaccaatgaacctgatcggcgtggcaagaggcgaaaacatccccgccgtgatcgccctgaccgaccccgagggctgcccactgagccggtttaaggatagcctgggaaacccaacccacatcctgagaatcggcgagagctataaggagaagcagcggaccatccaggccaagaaggaggtggagcagcggagagccggcggctacagccggaagtacgccagcaaagccaagaatctggcagacgatatggtgagaaacaccgctagagatctgctgtactacgccgtgacccaggatgccatgctgatcttcgccaacctgagccggggcttcggccggcagggcaagcggaccttcatggccgagagacagtacacacggatggaggactggctgaccgccaagctggcctacgagggcctgagcaagacctacctgtccaagacactggcccagtacacctccaagacatgcagcaactgtgggtttaccatcaccagcgccgactacgacagggtgctggagaagctgaagaagacagcaacaggctggatgaccacaattaacggcaaggagctgaaggtggagggccagattacctactacaacagatacaagagacagaacgtagtcaaggacctgtccgtcgagctggatagactgagcgaagaatctgtgaacaacgacatctcctcctggacaaagggcagaagcggagaagctctgagcctcctgaagaaaagattctcccatagacccgtgcaggagaagttcgtgtgcctgaactgcggcttcgagacacacgcagccgagcaagccgccctgaacatcgccagatcctggctgttcctgcggagccaggagtacaagaaataccagacaaacaagacaaccggcaacaccgataagagagccttcgtcgagacctggcagtccttttaccggaagaagcttaaggaggtgtggaaacctgccgtgcggtctggcggatctggcggaggctccacaagcgtgcaggccagcctgagcttcgaggacgtggccgtgcacttcacctgggaggagtggcagctgctggaccccagccagaaggacctgtacaggaacgtgatgtgggagaactactgcaacctggtgagcgtgggctaccagacccccaagcccgacagcttcttccagctggagcagggcgagcccccctggaccgtggagggcgccggccagagccagacctgccccggcaccagggccagcaccagccccaagaaaaagagaaaagtctaagctgccttctgcggggcttgccttctggccatgcccttcttctctcccttgcacctgtacctcttggtctttgaataaagcctgagtaggaaggctagcaaaaaaaaaaaaaaaaaaaaaaaaaaaaaaaaaaaaaaaaaaaaaaaaaaaaaaaaaaaaaaaaaaaaaaaaaaaaaaaa

SEQ ID NO: 3245 - RNA, 5419 nt, synthetic construct
  source 1..5419: mol_type = other RNA
aggaaataagagagaaaagaagagtaagaagaaatataagagccaccatggcccctaagaagaagcgtaaagtgagccgggtgaacggcagcggcagcggcggcggcatgaaccacgaccaggagttcgacccccctaaggtgtaccctcccgtccccgccgagaagagaaagcccatccgggtcctgagcctgttcgatggcatcgccaccggtctgctggtgctgaaggacctgggcatccaggtggataggtacattgcctccgaggtgtgcgaggactccatcaccgtgggaatggtgcgtcatcagggcaagatcatgtacgtgggcgacgtgcggagcgtgacacagaagcatatccaggagtggggccctttcgacctggtgatcggcggcagcccttgcaatgacctgagcatcgtgaacccagcccggaagggcctgtacgagggaaccggcagactgttcttcgagttttacagactgctgcacgacgcccggcctaaggaaggcgacgaccggcccttcttttggctgttcgagaatgtggtggccatgggagtcagcgacaagcgggatattagccggttcctggagagcaaccccgtgatgatcgatgccaaggaagtgagcgccgcccaccgggccagatacttctggggcaatctgcctggcatgaacagacccctggccagcaccgtgaacgacaagctggagctgcaggagtgcctggagcacggccggatcgccaagttcagcaaggtgagaaccatcaccacccgaagcaacagcatcaaacaaggcaaggaccagcactttcctgtgttcatgaacgagaaggaggacatcctgtggtgtaccgagatggagagagtgttcgggttcccagtccactacacagatgtcagcaacatgtctagactggccagacagagactgctgggaagaagctggtccgtccctgtgatcagacacctgttcgcccctctgaaggagtacttcgcctgcgtgagcagcggcaacagcaacgccaacagccggggccccagcttctctagcggcctggtgccactgtccctgagagggagccacatgggccccatggagatctacaaaaccgtgagcgcctggaagcggcagcctgtgcgcgtgctgagcctgtttcggaatatcgataaagtcctgaaaagcctgggattcctggagagcggctctggctccggcggtggcaccctgaagtacgtggaggatgtgacaaacgtggtcagacgggatgtggagaagtggggccccttcgatctggtgtacggcagcacccaacccctgggcagctcttgtgaccggtgccctggctggtacatgtttcagttccaccggatcctgcagtacgccctgccgagacaggagtcccagcggccattcttttggattttcatggacaacttgctgctgaccgaggatgaccaggaaactaccactcggttcctgcagaccgaagccgtgaccctgcaggacgtgagaggccgggactaccagaacgccatgcgggtgtggtccaacatccctggactgaaaagcaagcacgcacctctgacccctaaagaagaggagtacctgcaggcccaggtgcggagcagaagcaagctggacgcccctaaggtggatctgctggtgaagaattgcctcctgcccctgagagagtacttcaagtatttcagccagaatagtctgcccctgggcggcccaagcagcggcgcccctcctcccagcggcggcagcccagccggctccccaacctctaccgaggagggcacctctgagtccgccacccccgagagcggccctggcacctccaccgagcccagcgagggcagcgcacccggcagccctgccggcagccccacctccacagaggagggaaccagcaccgagcccagcgaaggcagcgccccaggcaccagcaccgagcctagtgagggcggctctggcggcggcagcgcccaggagattaaacggatcaacaagatcagaagaagacttgtgaaagacagcaacaccaagaaggccggcaagacaggccccatgaaaaccctgctggttagagtgatgacacccgatctgagagagcggctggaaaacctgagaaagaagcctgaaaatatcccccagcccatcagcaatacatctagagccaacctgaataagctgctgaccgattacaccgaaatgaagaaggcgatcctgcatgtgtactgggaagagttccagaaggaccctgtgggcctgatgagccgggtggcccagcctgccagcaagaagatcgatcagaacaagctgaaacctgagatggacgagaagggcaacctgaccaccgccggctttgcctgctctcagtgtggccagcccctgttcgtgtacaagctggagcaggtgtctgagaagggcaaggcttacaccaactacttcggacggtgcaatgtggccgagcacgaaaagctgatcctgctggcccagctgaagcccgagaaggatagcgacgaagccgtgacatatagcctgggaaagtttgggcagagggccctggatttctacagcattcatgtgaccaaggagtccacccaccccgtgaagcccctggcccagatcgccggaaacagatacgcctccggacctgtgggaaaggccctgagcgacgcatgtatgggcacaatcgcctccttcctgtctaagtaccaggacatcatcatcgaacaccagaaggtggtgaagggcaaccagaagagactggagagcctgcgggagctggccggcaaggaaaacctggaataccctagcgtgaccctgccacctcagcctcacaccaaggagggcgttgatgcctacaacgaagtgatcgcccgggtgcgaatgtgggtgaacctgaacctgtggcagaagctgaagctaagcagagatgatgccaagcctctgctgagactgaagggattcccttcctttcctctggtcgagagacaggccaacgaagtggactggtgggacatggtgtgtaacgtgaagaagctgatcaacgagaaaaaggaggatggcaaggtgttttggcagaatctggctggctacaagagacaggaagccctgagaccatacctgagcagcgaggaagatcggaagaagggaaagaaattcgctcggtaccagctgggcgacctgctgctgcacctggaaaagaagcacggcgaggactggggaaaggtgtacgacgaggcctgggagcggattgacaagaaagtggaaggcctgagcaagcacatcaagctggaagaggaacggagaagcgaggacgcccagagcaaggccgccctgaccgactggctgcgggctaaggccagcttcgtgatcgagggcctgaaggaggccgacaaggacgagttctgcagatgcgagctgaagctgcagaagtggtacggggacctgcggggaaagcccttcgccatcgaagccgagaacagcatcctggacatcagcggcttcagcaagcagtacaactgtgccttcatctggcagaaggacggcgtgaagaagctgaacctgtacctgatcatcaactacttcaagggcggcaagctgcggttcaagaagatcaaacctgaagccttcgaagccaacagattctacaccgtgatcaacaaaaagagcggcgagatcgtgcccatggaggtgaacttcaacttcgacgaccccaacctgatcatcctgcctctggcctttggcaagagacagggcagagaattcatctggaacgacctgctgtccctggaaaccggcagcctgaagctggccaacggaagagtgatcgagaagacactgtacaacagaagaacccggcaggatgagcctgccctgttcgtggccctgaccttcgagcggcgggaggtcctggactcctccaatatcaaaccaatgaacctgatcggcgtggcaagaggcgaaaacatccccgccgtgatcgccctgaccgaccccgagggctgcccactgagccggtttaaggatagcctgggaaacccaacccacatcctgagaatcggcgagagctataaggagaagcagcggaccatccaggccaagaaggaggtggagcagcggagagccggcggctacagccggaagtacgccagcaaagccaagaatctggcagacgatatggtgagaaacaccgctagagatctgctgtactacgccgtgacccaggatgccatgctgatcttcgccaacctgagccggggcttcggccggcagggcaagcggaccttcatggccgagagacagtacacacggatggaggactggctgaccgccaagctggcctacgagggcctgagcaagacctacctgtccaagacactggcccagtacacctccaagacatgcagcaactgtgggtttaccatcaccagcgccgactacgacagggtgctggagaagctgaagaagacagcaacaggctggatgaccacaattaacggcaaggagctgaaggtggagggccagattacctactacaacagatacaagagacagaacgtagtcaaggacctgtccgtcgagctggatagactgagcgaagaatctgtgaacaacgacatctcctcctggacaaagggcagaagcggagaagctctgagcctcctgaagaaaagattctcccatagacccgtgcaggagaagttcgtgtgcctgaactgcggcttcgagacacacgcagccgagcaagccgccctgaacatcgccagatcctggctgttcctgcggagccaggagtacaagaaataccagacaaacaagacaaccggcaacaccgataagagagccttcgtcgagacctggcagtccttttaccggaagaagcttaaggaggtgtggaaacctgccgtgcggtctggcggatctggcggaggctccacaagcatgatgttccaggacagcgtggccttcgaggacgtggccgtgaccttcacccaggaggagtgggccctgctggaccccagccagaagaacctgtacagggacgtgatgcaggagaccttcaagaacctggccagcatcggcaagaagtggaaggcccagaacatctacgtggagtacaagaacctgaggaggaacctgaggatcgtgggcgagaggctgttcgagagcaaggagggccaccagaccagccccaagaaaaagagaaaagtctaagctgccttctgcggggcttgccttctggccatgcccttcttctctcccttgcacctgtacctcttggtctttgaataaagcctgagtaggaaggctagcaaaaaaaaaaaaaaaaaaaaaaaaaaaaaaaaaaaaaaaaaaaaaaaaaaaaaaaaaaaaaaaaaaaaaaaaaaaaaaaa

SEQ ID NO: 3246 - RNA, 5419 nt, synthetic construct
  source 1..5419: mol_type = other RNA
aggaaataagagagaaaagaagagtaagaagaaatataagagccaccatggcccctaagaagaagcgtaaagtgagccgggtgaacggcagcggcagcggcggcggcatgaaccacgaccaggagttcgacccccctaaggtgtaccctcccgtccccgccgagaagagaaagcccatccgggtcctgagcctgttcgatggcatcgccaccggtctgctggtgctgaaggacctgggcatccaggtggataggtacattgcctccgaggtgtgcgaggactccatcaccgtgggaatggtgcgtcatcagggcaagatcatgtacgtgggcgacgtgcggagcgtgacacagaagcatatccaggagtggggccctttcgacctggtgatcggcggcagcccttgcaatgacctgagcatcgtgaacccagcccggaagggcctgtacgagggaaccggcagactgttcttcgagttttacagactgctgcacgacgcccggcctaaggaaggcgacgaccggcccttcttttggctgttcgagaatgtggtggccatgggagtcagcgacaagcgggatattagccggttcctggagagcaaccccgtgatgatcgatgccaaggaagtgagcgccgcccaccgggccagatacttctggggcaatctgcctggcatgaacagacccctggccagcaccgtgaacgacaagctggagctgcaggagtgcctggagcacggccggatcgccaagttcagcaaggtgagaaccatcaccacccgaagcaacagcatcaaacaaggcaaggaccagcactttcctgtgttcatgaacgagaaggaggacatcctgtggtgtaccgagatggagagagtgttcgggttcccagtccactacacagatgtcagcaacatgtctagactggccagacagagactgctgggaagaagctggtccgtccctgtgatcagacacctgttcgcccctctgaaggagtacttcgcctgcgtgagcagcggcaacagcaacgccaacagccggggccccagcttctctagcggcctggtgccactgtccctgagagggagccacatgggccccatggagatctacaaaaccgtgagcgcctggaagcggcagcctgtgcgcgtgctgagcctgtttcggaatatcgataaagtcctgaaaagcctgggattcctggagagcggctctggctccggcggtggcaccctgaagtacgtggaggatgtgacaaacgtggtcagacgggatgtggagaagtggggccccttcgatctggtgtacggcagcacccaacccctgggcagctcttgtgaccggtgccctggctggtacatgtttcagttccaccggatcctgcagtacgccctgccgagacaggagtcccagcggccattcttttggattttcatggacaacttgctgctgaccgaggatgaccaggaaactaccactcggttcctgcagaccgaagccgtgaccctgcaggacgtgagaggccgggactaccagaacgccatgcgggtgtggtccaacatccctggactgaaaagcaagcacgcacctctgacccctaaagaagaggagtacctgcaggcccaggtgcggagcagaagcaagctggacgcccctaaggtggatctgctggtgaagaattgcctcctgcccctgagagagtacttcaagtatttcagccagaatagtctgcccctgggcggcccaagcagcggcgcccctcctcccagcggcggcagcccagccggctccccaacctctaccgaggagggcacctctgagtccgccacccccgagagcggccctggcacctccaccgagcccagcgagggcagcgcacccggcagccctgccggcagccccacctccacagaggagggaaccagcaccgagcccagcgaaggcagcgccccaggcaccagcaccgagcctagtgagggcggctctggcggcggcagcgcccaggagattaaacggatcaacaagatcagaagaagacttgtgaaagacagcaacaccaagaaggccggcaagacaggccccatgaaaaccctgctggttagagtgatgacacccgatctgagagagcggctggaaaacctgagaaagaagcctgaaaatatcccccagcccatcagcaatacatctagagccaacctgaataagctgctgaccgattacaccgaaatgaagaaggcgatcctgcatgtgtactgggaagagttccagaaggaccctgtgggcctgatgagccgggtggcccagcctgccagcaagaagatcgatcagaacaagctgaaacctgagatggacgagaagggcaacctgaccaccgccggctttgcctgctctcagtgtggccagcccctgttcgtgtacaagctggagcaggtgtctgagaagggcaaggcttacaccaactacttcggacggtgcaatgtggccgagcacgaaaagctgatcctgctggcccagctgaagcccgagaaggatagcgacgaagccgtgacatatagcctgggaaagtttgggcagagggccctggatttctacagcattcatgtgaccaaggagtccacccaccccgtgaagcccctggcccagatcgccggaaacagatacgcctccggacctgtgggaaaggccctgagcgacgcatgtatgggcacaatcgcctccttcctgtctaagtaccaggacatcatcatcgaacaccagaaggtggtgaagggcaaccagaagagactggagagcctgcgggagctggccggcaaggaaaacctggaataccctagcgtgaccctgccacctcagcctcacaccaaggagggcgttgatgcctacaacgaagtgatcgcccgggtgcgaatgtgggtgaacctgaacctgtggcagaagctgaagctaagcagagatgatgccaagcctctgctgagactgaagggattcccttcctttcctctggtcgagagacaggccaacgaagtggactggtgggacatggtgtgtaacgtgaagaagctgatcaacgagaaaaaggaggatggcaaggtgttttggcagaatctggctggctacaagagacaggaagccctgagaccatacctgagcagcgaggaagatcggaagaagggaaagaaattcgctcggtaccagctgggcgacctgctgctgcacctggaaaagaagcacggcgaggactggggaaaggtgtacgacgaggcctgggagcggattgacaagaaagtggaaggcctgagcaagcacatcaagctggaagaggaacggagaagcgaggacgcccagagcaaggccgccctgaccgactggctgcgggctaaggccagcttcgtgatcgagggcctgaaggaggccgacaaggacgagttctgcagatgcgagctgaagctgcagaagtggtacggggacctgcggggaaagcccttcgccatcgaagccgagaacagcatcctggacatcagcggcttcagcaagcagtacaactgtgccttcatctggcagaaggacggcgtgaagaagctgaacctgtacctgatcatcaactacttcaagggcggcaagctgcggttcaagaagatcaaacctgaagccttcgaagccaacagattctacaccgtgatcaacaaaaagagcggcgagatcgtgcccatggaggtgaacttcaacttcgacgaccccaacctgatcatcctgcctctggcctttggcaagagacagggcagagaattcatctggaacgacctgctgtccctggaaaccggcagcctgaagctggccaacggaagagtgatcgagaagacactgtacaacagaagaacccggcaggatgagcctgccctgttcgtggccctgaccttcgagcggcgggaggtcctggactcctccaatatcaaaccaatgaacctgatcggcgtggcaagaggcgaaaacatccccgccgtgatcgccctgaccgaccccgagggctgcccactgagccggtttaaggatagcctgggaaacccaacccacatcctgagaatcggcgagagctataaggagaagcagcggaccatccaggccaagaaggaggtggagcagcggagagccggcggctacagccggaagtacgccagcaaagccaagaatctggcagacgatatggtgagaaacaccgctagagatctgctgtactacgccgtgacccaggatgccatgctgatcttcgccaacctgagccggggcttcggccggcagggcaagcggaccttcatggccgagagacagtacacacggatggaggactggctgaccgccaagctggcctacgagggcctgagcaagacctacctgtccaagacactggcccagtacacctccaagacatgcagcaactgtgggtttaccatcaccagcgccgactacgacagggtgctggagaagctgaagaagacagcaacaggctggatgaccacaattaacggcaaggagctgaaggtggagggccagattacctactacaacagatacaagagacagaacgtagtcaaggacctgtccgtcgagctggatagactgagcgaagaatctgtgaacaacgacatctcctcctggacaaagggcagaagcggagaagctctgagcctcctgaagaaaagattctcccatagacccgtgcaggagaagttcgtgtgcctgaactgcggcttcgagacacacgcagccgagcaagccgccctgaacatcgccagatcctggctgttcctgcggagccaggagtacaagaaataccagacaaacaagacaaccggcaacaccgataagagagccttcgtcgagacctggcagtccttttaccggaagaagcttaaggaggtgtggaaacctgccgtgcggtctggcggatctggcggaggctccacaagcggcctggtgatgttcaaggacgtggccatcgacgtgagccaggaggagtgggagtgcctgaaccccgcccagaggaacctgtacaaggacgtgatgctggagaactacagcaacctggtgagcctgggcctgagcgtgagcaagcccgccatgatcaccagcctggagcagggcaaggagccctggatggtgctgagggaggtgaccggcgagaggtgccccgacctggtgagcaagtgcgagaccagccccaagaaaaagagaaaagtctaagctgccttctgcggggcttgccttctggccatgcccttcttctctcccttgcacctgtacctcttggtctttgaataaagcctgagtaggaaggctagcaaaaaaaaaaaaaaaaaaaaaaaaaaaaaaaaaaaaaaaaaaaaaaaaaaaaaaaaaaaaaaaaaaaaaaaaaaaaaaaa

SEQ ID NO: 3247 - RNA, 5419 nt, synthetic construct
  source 1..5419: mol_type = other RNA
aggaaataagagagaaaagaagagtaagaagaaatataagagccaccatggcccctaagaagaagcgtaaagtgagccgggtgaacggcagcggcagcggcggcggcatgaaccacgaccaggagttcgacccccctaaggtgtaccctcccgtccccgccgagaagagaaagcccatccgggtcctgagcctgttcgatggcatcgccaccggtctgctggtgctgaaggacctgggcatccaggtggataggtacattgcctccgaggtgtgcgaggactccatcaccgtgggaatggtgcgtcatcagggcaagatcatgtacgtgggcgacgtgcggagcgtgacacagaagcatatccaggagtggggccctttcgacctggtgatcggcggcagcccttgcaatgacctgagcatcgtgaacccagcccggaagggcctgtacgagggaaccggcagactgttcttcgagttttacagactgctgcacgacgcccggcctaaggaaggcgacgaccggcccttcttttggctgttcgagaatgtggtggccatgggagtcagcgacaagcgggatattagccggttcctggagagcaaccccgtgatgatcgatgccaaggaagtgagcgccgcccaccgggccagatacttctggggcaatctgcctggcatgaacagacccctggccagcaccgtgaacgacaagctggagctgcaggagtgcctggagcacggccggatcgccaagttcagcaaggtgagaaccatcaccacccgaagcaacagcatcaaacaaggcaaggaccagcactttcctgtgttcatgaacgagaaggaggacatcctgtggtgtaccgagatggagagagtgttcgggttcccagtccactacacagatgtcagcaacatgtctagactggccagacagagactgctgggaagaagctggtccgtccctgtgatcagacacctgttcgcccctctgaaggagtacttcgcctgcgtgagcagcggcaacagcaacgccaacagccggggccccagcttctctagcggcctggtgccactgtccctgagagggagccacatgggccccatggagatctacaaaaccgtgagcgcctggaagcggcagcctgtgcgcgtgctgagcctgtttcggaatatcgataaagtcctgaaaagcctgggattcctggagagcggctctggctccggcggtggcaccctgaagtacgtggaggatgtgacaaacgtggtcagacgggatgtggagaagtggggccccttcgatctggtgtacggcagcacccaacccctgggcagctcttgtgaccggtgccctggctggtacatgtttcagttccaccggatcctgcagtacgccctgccgagacaggagtcccagcggccattcttttggattttcatggacaacttgctgctgaccgaggatgaccaggaaactaccactcggttcctgcagaccgaagccgtgaccctgcaggacgtgagaggccgggactaccagaacgccatgcgggtgtggtccaacatccctggactgaaaagcaagcacgcacctctgacccctaaagaagaggagtacctgcaggcccaggtgcggagcagaagcaagctggacgcccctaaggtggatctgctggtgaagaattgcctcctgcccctgagagagtacttcaagtatttcagccagaatagtctgcccctgggcggcccaagcagcggcgcccctcctcccagcggcggcagcccagccggctccccaacctctaccgaggagggcacctctgagtccgccacccccgagagcggccctggcacctccaccgagcccagcgagggcagcgcacccggcagccctgccggcagccccacctccacagaggagggaaccagcaccgagcccagcgaaggcagcgccccaggcaccagcaccgagcctagtgagggcggctctggcggcggcagcgcccaggagattaaacggatcaacaagatcagaagaagacttgtgaaagacagcaacaccaagaaggccggcaagacaggccccatgaaaaccctgctggttagagtgatgacacccgatctgagagagcggctggaaaacctgagaaagaagcctgaaaatatcccccagcccatcagcaatacatctagagccaacctgaataagctgctgaccgattacaccgaaatgaagaaggcgatcctgcatgtgtactgggaagagttccagaaggaccctgtgggcctgatgagccgggtggcccagcctgccagcaagaagatcgatcagaacaagctgaaacctgagatggacgagaagggcaacctgaccaccgccggctttgcctgctctcagtgtggccagcccctgttcgtgtacaagctggagcaggtgtctgagaagggcaaggcttacaccaactacttcggacggtgcaatgtggccgagcacgaaaagctgatcctgctggcccagctgaagcccgagaaggatagcgacgaagccgtgacatatagcctgggaaagtttgggcagagggccctggatttctacagcattcatgtgaccaaggagtccacccaccccgtgaagcccctggcccagatcgccggaaacagatacgcctccggacctgtgggaaaggccctgagcgacgcatgtatgggcacaatcgcctccttcctgtctaagtaccaggacatcatcatcgaacaccagaaggtggtgaagggcaaccagaagagactggagagcctgcgggagctggccggcaaggaaaacctggaataccctagcgtgaccctgccacctcagcctcacaccaaggagggcgttgatgcctacaacgaagtgatcgcccgggtgcgaatgtgggtgaacctgaacctgtggcagaagctgaagctaagcagagatgatgccaagcctctgctgagactgaagggattcccttcctttcctctggtcgagagacaggccaacgaagtggactggtgggacatggtgtgtaacgtgaagaagctgatcaacgagaaaaaggaggatggcaaggtgttttggcagaatctggctggctacaagagacaggaagccctgagaccatacctgagcagcgaggaagatcggaagaagggaaagaaattcgctcggtaccagctgggcgacctgctgctgcacctggaaaagaagcacggcgaggactggggaaaggtgtacgacgaggcctgggagcggattgacaagaaagtggaaggcctgagcaagcacatcaagctggaagaggaacggagaagcgaggacgcccagagcaaggccgccctgaccgactggctgcgggctaaggccagcttcgtgatcgagggcctgaaggaggccgacaaggacgagttctgcagatgcgagctgaagctgcagaagtggtacggggacctgcggggaaagcccttcgccatcgaagccgagaacagcatcctggacatcagcggcttcagcaagcagtacaactgtgccttcatctggcagaaggacggcgtgaagaagctgaacctgtacctgatcatcaactacttcaagggcggcaagctgcggttcaagaagatcaaacctgaagccttcgaagccaacagattctacaccgtgatcaacaaaaagagcggcgagatcgtgcccatggaggtgaacttcaacttcgacgaccccaacctgatcatcctgcctctggcctttggcaagagacagggcagagaattcatctggaacgacctgctgtccctggaaaccggcagcctgaagctggccaacggaagagtgatcgagaagacactgtacaacagaagaacccggcaggatgagcctgccctgttcgtggccctgaccttcgagcggcgggaggtcctggactcctccaatatcaaaccaatgaacctgatcggcgtggcaagaggcgaaaacatccccgccgtgatcgccctgaccgaccccgagggctgcccactgagccggtttaaggatagcctgggaaacccaacccacatcctgagaatcggcgagagctataaggagaagcagcggaccatccaggccaagaaggaggtggagcagcggagagccggcggctacagccggaagtacgccagcaaagccaagaatctggcagacgatatggtgagaaacaccgctagagatctgctgtactacgccgtgacccaggatgccatgctgatcttcgccaacctgagccggggcttcggccggcagggcaagcggaccttcatggccgagagacagtacacacggatggaggactggctgaccgccaagctggcctacgagggcctgagcaagacctacctgtccaagacactggcccagtacacctccaagacatgcagcaactgtgggtttaccatcaccagcgccgactacgacagggtgctggagaagctgaagaagacagcaacaggctggatgaccacaattaacggcaaggagctgaaggtggagggccagattacctactacaacagatacaagagacagaacgtagtcaaggacctgtccgtcgagctggatagactgagcgaagaatctgtgaacaacgacatctcctcctggacaaagggcagaagcggagaagctctgagcctcctgaagaaaagattctcccatagacccgtgcaggagaagttcgtgtgcctgaactgcggcttcgagacacacgcagccgagcaagccgccctgaacatcgccagatcctggctgttcctgcggagccaggagtacaagaaataccagacaaacaagacaaccggcaacaccgataagagagccttcgtcgagacctggcagtccttttaccggaagaagcttaaggaggtgtggaaacctgccgtgcggtctggcggatctggcggaggctccacaagcgcccaggagaccgtgaccttcaaggacgtggccgtggacttcacccaggaggagtggggccagctggaccccgtgcagaggaccctgtacagggacgtgatgctggagacctacggccacctgctgagcgtgggcaaccagatcgccaagcccgaggtgatcagcctgctggagcagggcgaggagccctggagcatggagagggtgtaccccccccagaggacctgccccgagtggatgaggaccagccccaagaaaaagagaaaagtctaagctgccttctgcggggcttgccttctggccatgcccttcttctctcccttgcacctgtacctcttggtctttgaataaagcctgagtaggaaggctagcaaaaaaaaaaaaaaaaaaaaaaaaaaaaaaaaaaaaaaaaaaaaaaaaaaaaaaaaaaaaaaaaaaaaaaaaaaaaaaaa

SEQ ID NO: 3248 - RNA, 5419 nt, synthetic construct
  source 1..5419: mol_type = other RNA
aggaaataagagagaaaagaagagtaagaagaaatataagagccaccatggcccctaagaagaagcgtaaagtgagccgggtgaacggcagcggcagcggcggcggcatgaaccacgaccaggagttcgacccccctaaggtgtaccctcccgtccccgccgagaagagaaagcccatccgggtcctgagcctgttcgatggcatcgccaccggtctgctggtgctgaaggacctgggcatccaggtggataggtacattgcctccgaggtgtgcgaggactccatcaccgtgggaatggtgcgtcatcagggcaagatcatgtacgtgggcgacgtgcggagcgtgacacagaagcatatccaggagtggggccctttcgacctggtgatcggcggcagcccttgcaatgacctgagcatcgtgaacccagcccggaagggcctgtacgagggaaccggcagactgttcttcgagttttacagactgctgcacgacgcccggcctaaggaaggcgacgaccggcccttcttttggctgttcgagaatgtggtggccatgggagtcagcgacaagcgggatattagccggttcctggagagcaaccccgtgatgatcgatgccaaggaagtgagcgccgcccaccgggccagatacttctggggcaatctgcctggcatgaacagacccctggccagcaccgtgaacgacaagctggagctgcaggagtgcctggagcacggccggatcgccaagttcagcaaggtgagaaccatcaccacccgaagcaacagcatcaaacaaggcaaggaccagcactttcctgtgttcatgaacgagaaggaggacatcctgtggtgtaccgagatggagagagtgttcgggttcccagtccactacacagatgtcagcaacatgtctagactggccagacagagactgctgggaagaagctggtccgtccctgtgatcagacacctgttcgcccctctgaaggagtacttcgcctgcgtgagcagcggcaacagcaacgccaacagccggggccccagcttctctagcggcctggtgccactgtccctgagagggagccacatgggccccatggagatctacaaaaccgtgagcgcctggaagcggcagcctgtgcgcgtgctgagcctgtttcggaatatcgataaagtcctgaaaagcctgggattcctggagagcggctctggctccggcggtggcaccctgaagtacgtggaggatgtgacaaacgtggtcagacgggatgtggagaagtggggccccttcgatctggtgtacggcagcacccaacccctgggcagctcttgtgaccggtgccctggctggtacatgtttcagttccaccggatcctgcagtacgccctgccgagacaggagtcccagcggccattcttttggattttcatggacaacttgctgctgaccgaggatgaccaggaaactaccactcggttcctgcagaccgaagccgtgaccctgcaggacgtgagaggccgggactaccagaacgccatgcgggtgtggtccaacatccctggactgaaaagcaagcacgcacctctgacccctaaagaagaggagtacctgcaggcccaggtgcggagcagaagcaagctggacgcccctaaggtggatctgctggtgaagaattgcctcctgcccctgagagagtacttcaagtatttcagccagaatagtctgcccctgggcggcccaagcagcggcgcccctcctcccagcggcggcagcccagccggctccccaacctctaccgaggagggcacctctgagtccgccacccccgagagcggccctggcacctccaccgagcccagcgagggcagcgcacccggcagccctgccggcagccccacctccacagaggagggaaccagcaccgagcccagcgaaggcagcgccccaggcaccagcaccgagcctagtgagggcggctctggcggcggcagcgcccaggagattaaacggatcaacaagatcagaagaagacttgtgaaagacagcaacaccaagaaggccggcaagacaggccccatgaaaaccctgctggttagagtgatgacacccgatctgagagagcggctggaaaacctgagaaagaagcctgaaaatatcccccagcccatcagcaatacatctagagccaacctgaataagctgctgaccgattacaccgaaatgaagaaggcgatcctgcatgtgtactgggaagagttccagaaggaccctgtgggcctgatgagccgggtggcccagcctgccagcaagaagatcgatcagaacaagctgaaacctgagatggacgagaagggcaacctgaccaccgccggctttgcctgctctcagtgtggccagcccctgttcgtgtacaagctggagcaggtgtctgagaagggcaaggcttacaccaactacttcggacggtgcaatgtggccgagcacgaaaagctgatcctgctggcccagctgaagcccgagaaggatagcgacgaagccgtgacatatagcctgggaaagtttgggcagagggccctggatttctacagcattcatgtgaccaaggagtccacccaccccgtgaagcccctggcccagatcgccggaaacagatacgcctccggacctgtgggaaaggccctgagcgacgcatgtatgggcacaatcgcctccttcctgtctaagtaccaggacatcatcatcgaacaccagaaggtggtgaagggcaaccagaagagactggagagcctgcgggagctggccggcaaggaaaacctggaataccctagcgtgaccctgccacctcagcctcacaccaaggagggcgttgatgcctacaacgaagtgatcgcccgggtgcgaatgtgggtgaacctgaacctgtggcagaagctgaagctaagcagagatgatgccaagcctctgctgagactgaagggattcccttcctttcctctggtcgagagacaggccaacgaagtggactggtgggacatggtgtgtaacgtgaagaagctgatcaacgagaaaaaggaggatggcaaggtgttttggcagaatctggctggctacaagagacaggaagccctgagaccatacctgagcagcgaggaagatcggaagaagggaaagaaattcgctcggtaccagctgggcgacctgctgctgcacctggaaaagaagcacggcgaggactggggaaaggtgtacgacgaggcctgggagcggattgacaagaaagtggaaggcctgagcaagcacatcaagctggaagaggaacggagaagcgaggacgcccagagcaaggccgccctgaccgactggctgcgggctaaggccagcttcgtgatcgagggcctgaaggaggccgacaaggacgagttctgcagatgcgagctgaagctgcagaagtggtacggggacctgcggggaaagcccttcgccatcgaagccgagaacagcatcctggacatcagcggcttcagcaagcagtacaactgtgccttcatctggcagaaggacggcgtgaagaagctgaacctgtacctgatcatcaactacttcaagggcggcaagctgcggttcaagaagatcaaacctgaagccttcgaagccaacagattctacaccgtgatcaacaaaaagagcggcgagatcgtgcccatggaggtgaacttcaacttcgacgaccccaacctgatcatcctgcctctggcctttggcaagagacagggcagagaattcatctggaacgacctgctgtccctggaaaccggcagcctgaagctggccaacggaagagtgatcgagaagacactgtacaacagaagaacccggcaggatgagcctgccctgttcgtggccctgaccttcgagcggcgggaggtcctggactcctccaatatcaaaccaatgaacctgatcggcgtggcaagaggcgaaaacatccccgccgtgatcgccctgaccgaccccgagggctgcccactgagccggtttaaggatagcctgggaaacccaacccacatcctgagaatcggcgagagctataaggagaagcagcggaccatccaggccaagaaggaggtggagcagcggagagccggcggctacagccggaagtacgccagcaaagccaagaatctggcagacgatatggtgagaaacaccgctagagatctgctgtactacgccgtgacccaggatgccatgctgatcttcgccaacctgagccggggcttcggccggcagggcaagcggaccttcatggccgagagacagtacacacggatggaggactggctgaccgccaagctggcctacgagggcctgagcaagacctacctgtccaagacactggcccagtacacctccaagacatgcagcaactgtgggtttaccatcaccagcgccgactacgacagggtgctggagaagctgaagaagacagcaacaggctggatgaccacaattaacggcaaggagctgaaggtggagggccagattacctactacaacagatacaagagacagaacgtagtcaaggacctgtccgtcgagctggatagactgagcgaagaatctgtgaacaacgacatctcctcctggacaaagggcagaagcggagaagctctgagcctcctgaagaaaagattctcccatagacccgtgcaggagaagttcgtgtgcctgaactgcggcttcgagacacacgcagccgagcaagccgccctgaacatcgccagatcctggctgttcctgcggagccaggagtacaagaaataccagacaaacaagacaaccggcaacaccgataagagagccttcgtcgagacctggcagtccttttaccggaagaagcttaaggaggtgtggaaacctgccgtgcggtctggcggatctggcggaggctccacaagcgccagggccagcctgagcttcgaggacgtggccgtgggcttcagctgggaggagtggcagctgctggcccccagccagaaggacctgtacagggacgtgatgctggagaactacaggaacctggtgagcgtgggctaccaggccagcaagcccgacagcgtgttccagctggagcagggcgagcccccctggatggtggagggcgccgcccagagccagacctgccagggctaccccgccaccaccagccccaagaaaaagagaaaagtctaagctgccttctgcggggcttgccttctggccatgcccttcttctctcccttgcacctgtacctcttggtctttgaataaagcctgagtaggaaggctagcaaaaaaaaaaaaaaaaaaaaaaaaaaaaaaaaaaaaaaaaaaaaaaaaaaaaaaaaaaaaaaaaaaaaaaaaaaaaaaaa

SEQ ID NO: 3249 - RNA, 5419 nt, synthetic construct
  source 1..5419: mol_type = other RNA
aggaaataagagagaaaagaagagtaagaagaaatataagagccaccatggcccctaagaagaagcgtaaagtgagccgggtgaacggcagcggcagcggcggcggcatgaaccacgaccaggagttcgacccccctaaggtgtaccctcccgtccccgccgagaagagaaagcccatccgggtcctgagcctgttcgatggcatcgccaccggtctgctggtgctgaaggacctgggcatccaggtggataggtacattgcctccgaggtgtgcgaggactccatcaccgtgggaatggtgcgtcatcagggcaagatcatgtacgtgggcgacgtgcggagcgtgacacagaagcatatccaggagtggggccctttcgacctggtgatcggcggcagcccttgcaatgacctgagcatcgtgaacccagcccggaagggcctgtacgagggaaccggcagactgttcttcgagttttacagactgctgcacgacgcccggcctaaggaaggcgacgaccggcccttcttttggctgttcgagaatgtggtggccatgggagtcagcgacaagcgggatattagccggttcctggagagcaaccccgtgatgatcgatgccaaggaagtgagcgccgcccaccgggccagatacttctggggcaatctgcctggcatgaacagacccctggccagcaccgtgaacgacaagctggagctgcaggagtgcctggagcacggccggatcgccaagttcagcaaggtgagaaccatcaccacccgaagcaacagcatcaaacaaggcaaggaccagcactttcctgtgttcatgaacgagaaggaggacatcctgtggtgtaccgagatggagagagtgttcgggttcccagtccactacacagatgtcagcaacatgtctagactggccagacagagactgctgggaagaagctggtccgtccctgtgatcagacacctgttcgcccctctgaaggagtacttcgcctgcgtgagcagcggcaacagcaacgccaacagccggggccccagcttctctagcggcctggtgccactgtccctgagagggagccacatgggccccatggagatctacaaaaccgtgagcgcctggaagcggcagcctgtgcgcgtgctgagcctgtttcggaatatcgataaagtcctgaaaagcctgggattcctggagagcggctctggctccggcggtggcaccctgaagtacgtggaggatgtgacaaacgtggtcagacgggatgtggagaagtggggccccttcgatctggtgtacggcagcacccaacccctgggcagctcttgtgaccggtgccctggctggtacatgtttcagttccaccggatcctgcagtacgccctgccgagacaggagtcccagcggccattcttttggattttcatggacaacttgctgctgaccgaggatgaccaggaaactaccactcggttcctgcagaccgaagccgtgaccctgcaggacgtgagaggccgggactaccagaacgccatgcgggtgtggtccaacatccctggactgaaaagcaagcacgcacctctgacccctaaagaagaggagtacctgcaggcccaggtgcggagcagaagcaagctggacgcccctaaggtggatctgctggtgaagaattgcctcctgcccctgagagagtacttcaagtatttcagccagaatagtctgcccctgggcggcccaagcagcggcgcccctcctcccagcggcggcagcccagccggctccccaacctctaccgaggagggcacctctgagtccgccacccccgagagcggccctggcacctccaccgagcccagcgagggcagcgcacccggcagccctgccggcagccccacctccacagaggagggaaccagcaccgagcccagcgaaggcagcgccccaggcaccagcaccgagcctagtgagggcggctctggcggcggcagcgcccaggagattaaacggatcaacaagatcagaagaagacttgtgaaagacagcaacaccaagaaggccggcaagacaggccccatgaaaaccctgctggttagagtgatgacacccgatctgagagagcggctggaaaacctgagaaagaagcctgaaaatatcccccagcccatcagcaatacatctagagccaacctgaataagctgctgaccgattacaccgaaatgaagaaggcgatcctgcatgtgtactgggaagagttccagaaggaccctgtgggcctgatgagccgggtggcccagcctgccagcaagaagatcgatcagaacaagctgaaacctgagatggacgagaagggcaacctgaccaccgccggctttgcctgctctcagtgtggccagcccctgttcgtgtacaagctggagcaggtgtctgagaagggcaaggcttacaccaactacttcggacggtgcaatgtggccgagcacgaaaagctgatcctgctggcccagctgaagcccgagaaggatagcgacgaagccgtgacatatagcctgggaaagtttgggcagagggccctggatttctacagcattcatgtgaccaaggagtccacccaccccgtgaagcccctggcccagatcgccggaaacagatacgcctccggacctgtgggaaaggccctgagcgacgcatgtatgggcacaatcgcctccttcctgtctaagtaccaggacatcatcatcgaacaccagaaggtggtgaagggcaaccagaagagactggagagcctgcgggagctggccggcaaggaaaacctggaataccctagcgtgaccctgccacctcagcctcacaccaaggagggcgttgatgcctacaacgaagtgatcgcccgggtgcgaatgtgggtgaacctgaacctgtggcagaagctgaagctaagcagagatgatgccaagcctctgctgagactgaagggattcccttcctttcctctggtcgagagacaggccaacgaagtggactggtgggacatggtgtgtaacgtgaagaagctgatcaacgagaaaaaggaggatggcaaggtgttttggcagaatctggctggctacaagagacaggaagccctgagaccatacctgagcagcgaggaagatcggaagaagggaaagaaattcgctcggtaccagctgggcgacctgctgctgcacctggaaaagaagcacggcgaggactggggaaaggtgtacgacgaggcctgggagcggattgacaagaaagtggaaggcctgagcaagcacatcaagctggaagaggaacggagaagcgaggacgcccagagcaaggccgccctgaccgactggctgcgggctaaggccagcttcgtgatcgagggcctgaaggaggccgacaaggacgagttctgcagatgcgagctgaagctgcagaagtggtacggggacctgcggggaaagcccttcgccatcgaagccgagaacagcatcctggacatcagcggcttcagcaagcagtacaactgtgccttcatctggcagaaggacggcgtgaagaagctgaacctgtacctgatcatcaactacttcaagggcggcaagctgcggttcaagaagatcaaacctgaagccttcgaagccaacagattctacaccgtgatcaacaaaaagagcggcgagatcgtgcccatggaggtgaacttcaacttcgacgaccccaacctgatcatcctgcctctggcctttggcaagagacagggcagagaattcatctggaacgacctgctgtccctggaaaccggcagcctgaagctggccaacggaagagtgatcgagaagacactgtacaacagaagaacccggcaggatgagcctgccctgttcgtggccctgaccttcgagcggcgggaggtcctggactcctccaatatcaaaccaatgaacctgatcggcgtggcaagaggcgaaaacatccccgccgtgatcgccctgaccgaccccgagggctgcccactgagccggtttaaggatagcctgggaaacccaacccacatcctgagaatcggcgagagctataaggagaagcagcggaccatccaggccaagaaggaggtggagcagcggagagccggcggctacagccggaagtacgccagcaaagccaagaatctggcagacgatatggtgagaaacaccgctagagatctgctgtactacgccgtgacccaggatgccatgctgatcttcgccaacctgagccggggcttcggccggcagggcaagcggaccttcatggccgagagacagtacacacggatggaggactggctgaccgccaagctggcctacgagggcctgagcaagacctacctgtccaagacactggcccagtacacctccaagacatgcagcaactgtgggtttaccatcaccagcgccgactacgacagggtgctggagaagctgaagaagacagcaacaggctggatgaccacaattaacggcaaggagctgaaggtggagggccagattacctactacaacagatacaagagacagaacgtagtcaaggacctgtccgtcgagctggatagactgagcgaagaatctgtgaacaacgacatctcctcctggacaaagggcagaagcggagaagctctgagcctcctgaagaaaagattctcccatagacccgtgcaggagaagttcgtgtgcctgaactgcggcttcgagacacacgcagccgagcaagccgccctgaacatcgccagatcctggctgttcctgcggagccaggagtacaagaaataccagacaaacaagacaaccggcaacaccgataagagagccttcgtcgagacctggcagtccttttaccggaagaagcttaaggaggtgtggaaacctgccgtgcggtctggcggatctggcggaggctccacaagcctgcaggtgagcgtgagcttcgaggacgtgaccgtggacttcagcagggaggagtggcagcacctggaccccgcccagaggaggctgtactgggacgtgaccctggagaactacagccacctgctgagcgtgggctaccaggtgcccaagcccgaggtgatcctgaagctggagcagggcgagggcccctggaccctggagggcgagaccccccaccagagctgcagcgacgaggacatcggcaccagccccaagaaaaagagaaaagtctaagctgccttctgcggggcttgccttctggccatgcccttcttctctcccttgcacctgtacctcttggtctttgaataaagcctgagtaggaaggctagcaaaaaaaaaaaaaaaaaaaaaaaaaaaaaaaaaaaaaaaaaaaaaaaaaaaaaaaaaaaaaaaaaaaaaaaaaaaaaaaa

SEQ ID NO: 3250 - RNA, 5419 nt, synthetic construct
  source 1..5419: mol_type = other RNA
aggaaataagagagaaaagaagagtaagaagaaatataagagccaccatggcccctaagaagaagcgtaaagtgagccgggtgaacggcagcggcagcggcggcggcatgaaccacgaccaggagttcgacccccctaaggtgtaccctcccgtccccgccgagaagagaaagcccatccgggtcctgagcctgttcgatggcatcgccaccggtctgctggtgctgaaggacctgggcatccaggtggataggtacattgcctccgaggtgtgcgaggactccatcaccgtgggaatggtgcgtcatcagggcaagatcatgtacgtgggcgacgtgcggagcgtgacacagaagcatatccaggagtggggccctttcgacctggtgatcggcggcagcccttgcaatgacctgagcatcgtgaacccagcccggaagggcctgtacgagggaaccggcagactgttcttcgagttttacagactgctgcacgacgcccggcctaaggaaggcgacgaccggcccttcttttggctgttcgagaatgtggtggccatgggagtcagcgacaagcgggatattagccggttcctggagagcaaccccgtgatgatcgatgccaaggaagtgagcgccgcccaccgggccagatacttctggggcaatctgcctggcatgaacagacccctggccagcaccgtgaacgacaagctggagctgcaggagtgcctggagcacggccggatcgccaagttcagcaaggtgagaaccatcaccacccgaagcaacagcatcaaacaaggcaaggaccagcactttcctgtgttcatgaacgagaaggaggacatcctgtggtgtaccgagatggagagagtgttcgggttcccagtccactacacagatgtcagcaacatgtctagactggccagacagagactgctgggaagaagctggtccgtccctgtgatcagacacctgttcgcccctctgaaggagtacttcgcctgcgtgagcagcggcaacagcaacgccaacagccggggccccagcttctctagcggcctggtgccactgtccctgagagggagccacatgggccccatggagatctacaaaaccgtgagcgcctggaagcggcagcctgtgcgcgtgctgagcctgtttcggaatatcgataaagtcctgaaaagcctgggattcctggagagcggctctggctccggcggtggcaccctgaagtacgtggaggatgtgacaaacgtggtcagacgggatgtggagaagtggggccccttcgatctggtgtacggcagcacccaacccctgggcagctcttgtgaccggtgccctggctggtacatgtttcagttccaccggatcctgcagtacgccctgccgagacaggagtcccagcggccattcttttggattttcatggacaacttgctgctgaccgaggatgaccaggaaactaccactcggttcctgcagaccgaagccgtgaccctgcaggacgtgagaggccgggactaccagaacgccatgcgggtgtggtccaacatccctggactgaaaagcaagcacgcacctctgacccctaaagaagaggagtacctgcaggcccaggtgcggagcagaagcaagctggacgcccctaaggtggatctgctggtgaagaattgcctcctgcccctgagagagtacttcaagtatttcagccagaatagtctgcccctgggcggcccaagcagcggcgcccctcctcccagcggcggcagcccagccggctccccaacctctaccgaggagggcacctctgagtccgccacccccgagagcggccctggcacctccaccgagcccagcgagggcagcgcacccggcagccctgccggcagccccacctccacagaggagggaaccagcaccgagcccagcgaaggcagcgccccaggcaccagcaccgagcctagtgagggcggctctggcggcggcagcgcccaggagattaaacggatcaacaagatcagaagaagacttgtgaaagacagcaacaccaagaaggccggcaagacaggccccatgaaaaccctgctggttagagtgatgacacccgatctgagagagcggctggaaaacctgagaaagaagcctgaaaatatcccccagcccatcagcaatacatctagagccaacctgaataagctgctgaccgattacaccgaaatgaagaaggcgatcctgcatgtgtactgggaagagttccagaaggaccctgtgggcctgatgagccgggtggcccagcctgccagcaagaagatcgatcagaacaagctgaaacctgagatggacgagaagggcaacctgaccaccgccggctttgcctgctctcagtgtggccagcccctgttcgtgtacaagctggagcaggtgtctgagaagggcaaggcttacaccaactacttcggacggtgcaatgtggccgagcacgaaaagctgatcctgctggcccagctgaagcccgagaaggatagcgacgaagccgtgacatatagcctgggaaagtttgggcagagggccctggatttctacagcattcatgtgaccaaggagtccacccaccccgtgaagcccctggcccagatcgccggaaacagatacgcctccggacctgtgggaaaggccctgagcgacgcatgtatgggcacaatcgcctccttcctgtctaagtaccaggacatcatcatcgaacaccagaaggtggtgaagggcaaccagaagagactggagagcctgcgggagctggccggcaaggaaaacctggaataccctagcgtgaccctgccacctcagcctcacaccaaggagggcgttgatgcctacaacgaagtgatcgcccgggtgcgaatgtgggtgaacctgaacctgtggcagaagctgaagctaagcagagatgatgccaagcctctgctgagactgaagggattcccttcctttcctctggtcgagagacaggccaacgaagtggactggtgggacatggtgtgtaacgtgaagaagctgatcaacgagaaaaaggaggatggcaaggtgttttggcagaatctggctggctacaagagacaggaagccctgagaccatacctgagcagcgaggaagatcggaagaagggaaagaaattcgctcggtaccagctgggcgacctgctgctgcacctggaaaagaagcacggcgaggactggggaaaggtgtacgacgaggcctgggagcggattgacaagaaagtggaaggcctgagcaagcacatcaagctggaagaggaacggagaagcgaggacgcccagagcaaggccgccctgaccgactggctgcgggctaaggccagcttcgtgatcgagggcctgaaggaggccgacaaggacgagttctgcagatgcgagctgaagctgcagaagtggtacggggacctgcggggaaagcccttcgccatcgaagccgagaacagcatcctggacatcagcggcttcagcaagcagtacaactgtgccttcatctggcagaaggacggcgtgaagaagctgaacctgtacctgatcatcaactacttcaagggcggcaagctgcggttcaagaagatcaaacctgaagccttcgaagccaacagattctacaccgtgatcaacaaaaagagcggcgagatcgtgcccatggaggtgaacttcaacttcgacgaccccaacctgatcatcctgcctctggcctttggcaagagacagggcagagaattcatctggaacgacctgctgtccctggaaaccggcagcctgaagctggccaacggaagagtgatcgagaagacactgtacaacagaagaacccggcaggatgagcctgccctgttcgtggccctgaccttcgagcggcgggaggtcctggactcctccaatatcaaaccaatgaacctgatcggcgtggcaagaggcgaaaacatccccgccgtgatcgccctgaccgaccccgagggctgcccactgagccggtttaaggatagcctgggaaacccaacccacatcctgagaatcggcgagagctataaggagaagcagcggaccatccaggccaagaaggaggtggagcagcggagagccggcggctacagccggaagtacgccagcaaagccaagaatctggcagacgatatggtgagaaacaccgctagagatctgctgtactacgccgtgacccaggatgccatgctgatcttcgccaacctgagccggggcttcggccggcagggcaagcggaccttcatggccgagagacagtacacacggatggaggactggctgaccgccaagctggcctacgagggcctgagcaagacctacctgtccaagacactggcccagtacacctccaagacatgcagcaactgtgggtttaccatcaccagcgccgactacgacagggtgctggagaagctgaagaagacagcaacaggctggatgaccacaattaacggcaaggagctgaaggtggagggccagattacctactacaacagatacaagagacagaacgtagtcaaggacctgtccgtcgagctggatagactgagcgaagaatctgtgaacaacgacatctcctcctggacaaagggcagaagcggagaagctctgagcctcctgaagaaaagattctcccatagacccgtgcaggagaagttcgtgtgcctgaactgcggcttcgagacacacgcagccgagcaagccgccctgaacatcgccagatcctggctgttcctgcggagccaggagtacaagaaataccagacaaacaagacaaccggcaacaccgataagagagccttcgtcgagacctggcagtccttttaccggaagaagcttaaggaggtgtggaaacctgccgtgcggtctggcggatctggcggaggctccacaagcagctggggccccctgagcttcatggacgtgttcgtggacttcacctgggaggagtggcagctgctggaccccgcccagaagtgcctgtacaggagcgtgatgctggagaactacagcaacctggtgagcctgggctaccagcacaccaagcccgacatcatcttcaagctggagcagggcgaggagctgtgcatggtgcaggcccaggtgcccaaccagacctgccccaacaccgtgtggaagaccagccccaagaaaaagagaaaagtctaagctgccttctgcggggcttgccttctggccatgcccttcttctctcccttgcacctgtacctcttggtctttgaataaagcctgagtaggaaggctagcaaaaaaaaaaaaaaaaaaaaaaaaaaaaaaaaaaaaaaaaaaaaaaaaaaaaaaaaaaaaaaaaaaaaaaaaaaaaaaaa

SEQ ID NO: 3251 - RNA, 5419 nt, synthetic construct
  source 1..5419: mol_type = other RNA
aggaaataagagagaaaagaagagtaagaagaaatataagagccaccatggcccctaagaagaagcgtaaagtgagccgggtgaacggcagcggcagcggcggcggcatgaaccacgaccaggagttcgacccccctaaggtgtaccctcccgtccccgccgagaagagaaagcccatccgggtcctgagcctgttcgatggcatcgccaccggtctgctggtgctgaaggacctgggcatccaggtggataggtacattgcctccgaggtgtgcgaggactccatcaccgtgggaatggtgcgtcatcagggcaagatcatgtacgtgggcgacgtgcggagcgtgacacagaagcatatccaggagtggggccctttcgacctggtgatcggcggcagcccttgcaatgacctgagcatcgtgaacccagcccggaagggcctgtacgagggaaccggcagactgttcttcgagttttacagactgctgcacgacgcccggcctaaggaaggcgacgaccggcccttcttttggctgttcgagaatgtggtggccatgggagtcagcgacaagcgggatattagccggttcctggagagcaaccccgtgatgatcgatgccaaggaagtgagcgccgcccaccgggccagatacttctggggcaatctgcctggcatgaacagacccctggccagcaccgtgaacgacaagctggagctgcaggagtgcctggagcacggccggatcgccaagttcagcaaggtgagaaccatcaccacccgaagcaacagcatcaaacaaggcaaggaccagcactttcctgtgttcatgaacgagaaggaggacatcctgtggtgtaccgagatggagagagtgttcgggttcccagtccactacacagatgtcagcaacatgtctagactggccagacagagactgctgggaagaagctggtccgtccctgtgatcagacacctgttcgcccctctgaaggagtacttcgcctgcgtgagcagcggcaacagcaacgccaacagccggggccccagcttctctagcggcctggtgccactgtccctgagagggagccacatgggccccatggagatctacaaaaccgtgagcgcctggaagcggcagcctgtgcgcgtgctgagcctgtttcggaatatcgataaagtcctgaaaagcctgggattcctggagagcggctctggctccggcggtggcaccctgaagtacgtggaggatgtgacaaacgtggtcagacgggatgtggagaagtggggccccttcgatctggtgtacggcagcacccaacccctgggcagctcttgtgaccggtgccctggctggtacatgtttcagttccaccggatcctgcagtacgccctgccgagacaggagtcccagcggccattcttttggattttcatggacaacttgctgctgaccgaggatgaccaggaaactaccactcggttcctgcagaccgaagccgtgaccctgcaggacgtgagaggccgggactaccagaacgccatgcgggtgtggtccaacatccctggactgaaaagcaagcacgcacctctgacccctaaagaagaggagtacctgcaggcccaggtgcggagcagaagcaagctggacgcccctaaggtggatctgctggtgaagaattgcctcctgcccctgagagagtacttcaagtatttcagccagaatagtctgcccctgggcggcccaagcagcggcgcccctcctcccagcggcggcagcccagccggctccccaacctctaccgaggagggcacctctgagtccgccacccccgagagcggccctggcacctccaccgagcccagcgagggcagcgcacccggcagccctgccggcagccccacctccacagaggagggaaccagcaccgagcccagcgaaggcagcgccccaggcaccagcaccgagcctagtgagggcggctctggcggcggcagcgcccaggagattaaacggatcaacaagatcagaagaagacttgtgaaagacagcaacaccaagaaggccggcaagacaggccccatgaaaaccctgctggttagagtgatgacacccgatctgagagagcggctggaaaacctgagaaagaagcctgaaaatatcccccagcccatcagcaatacatctagagccaacctgaataagctgctgaccgattacaccgaaatgaagaaggcgatcctgcatgtgtactgggaagagttccagaaggaccctgtgggcctgatgagccgggtggcccagcctgccagcaagaagatcgatcagaacaagctgaaacctgagatggacgagaagggcaacctgaccaccgccggctttgcctgctctcagtgtggccagcccctgttcgtgtacaagctggagcaggtgtctgagaagggcaaggcttacaccaactacttcggacggtgcaatgtggccgagcacgaaaagctgatcctgctggcccagctgaagcccgagaaggatagcgacgaagccgtgacatatagcctgggaaagtttgggcagagggccctggatttctacagcattcatgtgaccaaggagtccacccaccccgtgaagcccctggcccagatcgccggaaacagatacgcctccggacctgtgggaaaggccctgagcgacgcatgtatgggcacaatcgcctccttcctgtctaagtaccaggacatcatcatcgaacaccagaaggtggtgaagggcaaccagaagagactggagagcctgcgggagctggccggcaaggaaaacctggaataccctagcgtgaccctgccacctcagcctcacaccaaggagggcgttgatgcctacaacgaagtgatcgcccgggtgcgaatgtgggtgaacctgaacctgtggcagaagctgaagctaagcagagatgatgccaagcctctgctgagactgaagggattcccttcctttcctctggtcgagagacaggccaacgaagtggactggtgggacatggtgtgtaacgtgaagaagctgatcaacgagaaaaaggaggatggcaaggtgttttggcagaatctggctggctacaagagacaggaagccctgagaccatacctgagcagcgaggaagatcggaagaagggaaagaaattcgctcggtaccagctgggcgacctgctgctgcacctggaaaagaagcacggcgaggactggggaaaggtgtacgacgaggcctgggagcggattgacaagaaagtggaaggcctgagcaagcacatcaagctggaagaggaacggagaagcgaggacgcccagagcaaggccgccctgaccgactggctgcgggctaaggccagcttcgtgatcgagggcctgaaggaggccgacaaggacgagttctgcagatgcgagctgaagctgcagaagtggtacggggacctgcggggaaagcccttcgccatcgaagccgagaacagcatcctggacatcagcggcttcagcaagcagtacaactgtgccttcatctggcagaaggacggcgtgaagaagctgaacctgtacctgatcatcaactacttcaagggcggcaagctgcggttcaagaagatcaaacctgaagccttcgaagccaacagattctacaccgtgatcaacaaaaagagcggcgagatcgtgcccatggaggtgaacttcaacttcgacgaccccaacctgatcatcctgcctctggcctttggcaagagacagggcagagaattcatctggaacgacctgctgtccctggaaaccggcagcctgaagctggccaacggaagagtgatcgagaagacactgtacaacagaagaacccggcaggatgagcctgccctgttcgtggccctgaccttcgagcggcgggaggtcctggactcctccaatatcaaaccaatgaacctgatcggcgtggcaagaggcgaaaacatccccgccgtgatcgccctgaccgaccccgagggctgcccactgagccggtttaaggatagcctgggaaacccaacccacatcctgagaatcggcgagagctataaggagaagcagcggaccatccaggccaagaaggaggtggagcagcggagagccggcggctacagccggaagtacgccagcaaagccaagaatctggcagacgatatggtgagaaacaccgctagagatctgctgtactacgccgtgacccaggatgccatgctgatcttcgccaacctgagccggggcttcggccggcagggcaagcggaccttcatggccgagagacagtacacacggatggaggactggctgaccgccaagctggcctacgagggcctgagcaagacctacctgtccaagacactggcccagtacacctccaagacatgcagcaactgtgggtttaccatcaccagcgccgactacgacagggtgctggagaagctgaagaagacagcaacaggctggatgaccacaattaacggcaaggagctgaaggtggagggccagattacctactacaacagatacaagagacagaacgtagtcaaggacctgtccgtcgagctggatagactgagcgaagaatctgtgaacaacgacatctcctcctggacaaagggcagaagcggagaagctctgagcctcctgaagaaaagattctcccatagacccgtgcaggagaagttcgtgtgcctgaactgcggcttcgagacacacgcagccgagcaagccgccctgaacatcgccagatcctggctgttcctgcggagccaggagtacaagaaataccagacaaacaagacaaccggcaacaccgataagagagccttcgtcgagacctggcagtccttttaccggaagaagcttaaggaggtgtggaaacctgccgtgcggtctggcggatctggcggaggctccacaagcgcccaggtggccttcgaggacgtggccgtgtacttcaccgaggagcagtgggccctgctggaccacagccagagggccctgtacagggacgtgatgcaggagaactacgagaccgtggccagcctgggcctgcccatccccggccccgacagcatcagcaggctgcagcagagggaggagagcaggatcgaggcccagcccgtgctggagggcaacgacgtgagcagcgacgacgacctgggcaccagccccaagaaaaagagaaaagtctaagctgccttctgcggggcttgccttctggccatgcccttcttctctcccttgcacctgtacctcttggtctttgaataaagcctgagtaggaaggctagcaaaaaaaaaaaaaaaaaaaaaaaaaaaaaaaaaaaaaaaaaaaaaaaaaaaaaaaaaaaaaaaaaaaaaaaaaaaaaaaa

SEQ ID NO: 3252 - RNA, 5419 nt, synthetic construct
  source 1..5419: mol_type = other RNA
aggaaataagagagaaaagaagagtaagaagaaatataagagccaccatggcccctaagaagaagcgtaaagtgagccgggtgaacggcagcggcagcggcggcggcatgaaccacgaccaggagttcgacccccctaaggtgtaccctcccgtccccgccgagaagagaaagcccatccgggtcctgagcctgttcgatggcatcgccaccggtctgctggtgctgaaggacctgggcatccaggtggataggtacattgcctccgaggtgtgcgaggactccatcaccgtgggaatggtgcgtcatcagggcaagatcatgtacgtgggcgacgtgcggagcgtgacacagaagcatatccaggagtggggccctttcgacctggtgatcggcggcagcccttgcaatgacctgagcatcgtgaacccagcccggaagggcctgtacgagggaaccggcagactgttcttcgagttttacagactgctgcacgacgcccggcctaaggaaggcgacgaccggcccttcttttggctgttcgagaatgtggtggccatgggagtcagcgacaagcgggatattagccggttcctggagagcaaccccgtgatgatcgatgccaaggaagtgagcgccgcccaccgggccagatacttctggggcaatctgcctggcatgaacagacccctggccagcaccgtgaacgacaagctggagctgcaggagtgcctggagcacggccggatcgccaagttcagcaaggtgagaaccatcaccacccgaagcaacagcatcaaacaaggcaaggaccagcactttcctgtgttcatgaacgagaaggaggacatcctgtggtgtaccgagatggagagagtgttcgggttcccagtccactacacagatgtcagcaacatgtctagactggccagacagagactgctgggaagaagctggtccgtccctgtgatcagacacctgttcgcccctctgaaggagtacttcgcctgcgtgagcagcggcaacagcaacgccaacagccggggccccagcttctctagcggcctggtgccactgtccctgagagggagccacatgggccccatggagatctacaaaaccgtgagcgcctggaagcggcagcctgtgcgcgtgctgagcctgtttcggaatatcgataaagtcctgaaaagcctgggattcctggagagcggctctggctccggcggtggcaccctgaagtacgtggaggatgtgacaaacgtggtcagacgggatgtggagaagtggggccccttcgatctggtgtacggcagcacccaacccctgggcagctcttgtgaccggtgccctggctggtacatgtttcagttccaccggatcctgcagtacgccctgccgagacaggagtcccagcggccattcttttggattttcatggacaacttgctgctgaccgaggatgaccaggaaactaccactcggttcctgcagaccgaagccgtgaccctgcaggacgtgagaggccgggactaccagaacgccatgcgggtgtggtccaacatccctggactgaaaagcaagcacgcacctctgacccctaaagaagaggagtacctgcaggcccaggtgcggagcagaagcaagctggacgcccctaaggtggatctgctggtgaagaattgcctcctgcccctgagagagtacttcaagtatttcagccagaatagtctgcccctgggcggcccaagcagcggcgcccctcctcccagcggcggcagcccagccggctccccaacctctaccgaggagggcacctctgagtccgccacccccgagagcggccctggcacctccaccgagcccagcgagggcagcgcacccggcagccctgccggcagccccacctccacagaggagggaaccagcaccgagcccagcgaaggcagcgccccaggcaccagcaccgagcctagtgagggcggctctggcggcggcagcgcccaggagattaaacggatcaacaagatcagaagaagacttgtgaaagacagcaacaccaagaaggccggcaagacaggccccatgaaaaccctgctggttagagtgatgacacccgatctgagagagcggctggaaaacctgagaaagaagcctgaaaatatcccccagcccatcagcaatacatctagagccaacctgaataagctgctgaccgattacaccgaaatgaagaaggcgatcctgcatgtgtactgggaagagttccagaaggaccctgtgggcctgatgagccgggtggcccagcctgccagcaagaagatcgatcagaacaagctgaaacctgagatggacgagaagggcaacctgaccaccgccggctttgcctgctctcagtgtggccagcccctgttcgtgtacaagctggagcaggtgtctgagaagggcaaggcttacaccaactacttcggacggtgcaatgtggccgagcacgaaaagctgatcctgctggcccagctgaagcccgagaaggatagcgacgaagccgtgacatatagcctgggaaagtttgggcagagggccctggatttctacagcattcatgtgaccaaggagtccacccaccccgtgaagcccctggcccagatcgccggaaacagatacgcctccggacctgtgggaaaggccctgagcgacgcatgtatgggcacaatcgcctccttcctgtctaagtaccaggacatcatcatcgaacaccagaaggtggtgaagggcaaccagaagagactggagagcctgcgggagctggccggcaaggaaaacctggaataccctagcgtgaccctgccacctcagcctcacaccaaggagggcgttgatgcctacaacgaagtgatcgcccgggtgcgaatgtgggtgaacctgaacctgtggcagaagctgaagctaagcagagatgatgccaagcctctgctgagactgaagggattcccttcctttcctctggtcgagagacaggccaacgaagtggactggtgggacatggtgtgtaacgtgaagaagctgatcaacgagaaaaaggaggatggcaaggtgttttggcagaatctggctggctacaagagacaggaagccctgagaccatacctgagcagcgaggaagatcggaagaagggaaagaaattcgctcggtaccagctgggcgacctgctgctgcacctggaaaagaagcacggcgaggactggggaaaggtgtacgacgaggcctgggagcggattgacaagaaagtggaaggcctgagcaagcacatcaagctggaagaggaacggagaagcgaggacgcccagagcaaggccgccctgaccgactggctgcgggctaaggccagcttcgtgatcgagggcctgaaggaggccgacaaggacgagttctgcagatgcgagctgaagctgcagaagtggtacggggacctgcggggaaagcccttcgccatcgaagccgagaacagcatcctggacatcagcggcttcagcaagcagtacaactgtgccttcatctggcagaaggacggcgtgaagaagctgaacctgtacctgatcatcaactacttcaagggcggcaagctgcggttcaagaagatcaaacctgaagccttcgaagccaacagattctacaccgtgatcaacaaaaagagcggcgagatcgtgcccatggaggtgaacttcaacttcgacgaccccaacctgatcatcctgcctctggcctttggcaagagacagggcagagaattcatctggaacgacctgctgtccctggaaaccggcagcctgaagctggccaacggaagagtgatcgagaagacactgtacaacagaagaacccggcaggatgagcctgccctgttcgtggccctgaccttcgagcggcgggaggtcctggactcctccaatatcaaaccaatgaacctgatcggcgtggcaagaggcgaaaacatccccgccgtgatcgccctgaccgaccccgagggctgcccactgagccggtttaaggatagcctgggaaacccaacccacatcctgagaatcggcgagagctataaggagaagcagcggaccatccaggccaagaaggaggtggagcagcggagagccggcggctacagccggaagtacgccagcaaagccaagaatctggcagacgatatggtgagaaacaccgctagagatctgctgtactacgccgtgacccaggatgccatgctgatcttcgccaacctgagccggggcttcggccggcagggcaagcggaccttcatggccgagagacagtacacacggatggaggactggctgaccgccaagctggcctacgagggcctgagcaagacctacctgtccaagacactggcccagtacacctccaagacatgcagcaactgtgggtttaccatcaccagcgccgactacgacagggtgctggagaagctgaagaagacagcaacaggctggatgaccacaattaacggcaaggagctgaaggtggagggccagattacctactacaacagatacaagagacagaacgtagtcaaggacctgtccgtcgagctggatagactgagcgaagaatctgtgaacaacgacatctcctcctggacaaagggcagaagcggagaagctctgagcctcctgaagaaaagattctcccatagacccgtgcaggagaagttcgtgtgcctgaactgcggcttcgagacacacgcagccgagcaagccgccctgaacatcgccagatcctggctgttcctgcggagccaggagtacaagaaataccagacaaacaagacaaccggcaacaccgataagagagccttcgtcgagacctggcagtccttttaccggaagaagcttaaggaggtgtggaaacctgccgtgcggtctggcggatctggcggaggctccacaagcttcaggggccccgtgaccttcaaggacatcaccgtggagttcacccaggaggagtggcagctgctggacaacgcccagaggaccctgtacagggaggtgatgcaggagaactaccaccacctgatcagcgtgggctactgcgtgaacaagcccaacgccgtgttcaagctgaagcagggcaaggagccctggatcctggaggtggagttccccaggaggaacaaccccgaggacctgtggaacaccagccccaagaaaaagagaaaagtctaagctgccttctgcggggcttgccttctggccatgcccttcttctctcccttgcacctgtacctcttggtctttgaataaagcctgagtaggaaggctagcaaaaaaaaaaaaaaaaaaaaaaaaaaaaaaaaaaaaaaaaaaaaaaaaaaaaaaaaaaaaaaaaaaaaaaaaaaaaaaaa

SEQ ID NO: 3253 - RNA, 5455 nt, synthetic construct
  source 1..5455: mol_type = other RNA
aggaaataagagagaaaagaagagtaagaagaaatataagagccaccatggcccctaagaagaagcgtaaagtgagccgggtgaacggcagcggcagcggcggcggcatgaaccacgaccaggagttcgacccccctaaggtgtaccctcccgtccccgccgagaagagaaagcccatccgggtcctgagcctgttcgatggcatcgccaccggtctgctggtgctgaaggacctgggcatccaggtggataggtacattgcctccgaggtgtgcgaggactccatcaccgtgggaatggtgcgtcatcagggcaagatcatgtacgtgggcgacgtgcggagcgtgacacagaagcatatccaggagtggggccctttcgacctggtgatcggcggcagcccttgcaatgacctgagcatcgtgaacccagcccggaagggcctgtacgagggaaccggcagactgttcttcgagttttacagactgctgcacgacgcccggcctaaggaaggcgacgaccggcccttcttttggctgttcgagaatgtggtggccatgggagtcagcgacaagcgggatattagccggttcctggagagcaaccccgtgatgatcgatgccaaggaagtgagcgccgcccaccgggccagatacttctggggcaatctgcctggcatgaacagacccctggccagcaccgtgaacgacaagctggagctgcaggagtgcctggagcacggccggatcgccaagttcagcaaggtgagaaccatcaccacccgaagcaacagcatcaaacaaggcaaggaccagcactttcctgtgttcatgaacgagaaggaggacatcctgtggtgtaccgagatggagagagtgttcgggttcccagtccactacacagatgtcagcaacatgtctagactggccagacagagactgctgggaagaagctggtccgtccctgtgatcagacacctgttcgcccctctgaaggagtacttcgcctgcgtgagcagcggcaacagcaacgccaacagccggggccccagcttctctagcggcctggtgccactgtccctgagagggagccacatgggccccatggagatctacaaaaccgtgagcgcctggaagcggcagcctgtgcgcgtgctgagcctgtttcggaatatcgataaagtcctgaaaagcctgggattcctggagagcggctctggctccggcggtggcaccctgaagtacgtggaggatgtgacaaacgtggtcagacgggatgtggagaagtggggccccttcgatctggtgtacggcagcacccaacccctgggcagctcttgtgaccggtgccctggctggtacatgtttcagttccaccggatcctgcagtacgccctgccgagacaggagtcccagcggccattcttttggattttcatggacaacttgctgctgaccgaggatgaccaggaaactaccactcggttcctgcagaccgaagccgtgaccctgcaggacgtgagaggccgggactaccagaacgccatgcgggtgtggtccaacatccctggactgaaaagcaagcacgcacctctgacccctaaagaagaggagtacctgcaggcccaggtgcggagcagaagcaagctggacgcccctaaggtggatctgctggtgaagaattgcctcctgcccctgagagagtacttcaagtatttcagccagaatagtctgcccctgggcggcccaagcagcggcgcccctcctcccagcggcggcagcccagccggctccccaacctctaccgaggagggcacctctgagtccgccacccccgagagcggccctggcacctccaccgagcccagcgagggcagcgcacccggcagccctgccggcagccccacctccacagaggagggaaccagcaccgagcccagcgaaggcagcgccccaggcaccagcaccgagcctagtgagggcggctctggcggcggcagcgcccaggagattaaacggatcaacaagatcagaagaagacttgtgaaagacagcaacaccaagaaggccggcaagacaggccccatgaaaaccctgctggttagagtgatgacacccgatctgagagagcggctggaaaacctgagaaagaagcctgaaaatatcccccagcccatcagcaatacatctagagccaacctgaataagctgctgaccgattacaccgaaatgaagaaggcgatcctgcatgtgtactgggaagagttccagaaggaccctgtgggcctgatgagccgggtggcccagcctgccagcaagaagatcgatcagaacaagctgaaacctgagatggacgagaagggcaacctgaccaccgccggctttgcctgctctcagtgtggccagcccctgttcgtgtacaagctggagcaggtgtctgagaagggcaaggcttacaccaactacttcggacggtgcaatgtggccgagcacgaaaagctgatcctgctggcccagctgaagcccgagaaggatagcgacgaagccgtgacatatagcctgggaaagtttgggcagagggccctggatttctacagcattcatgtgaccaaggagtccacccaccccgtgaagcccctggcccagatcgccggaaacagatacgcctccggacctgtgggaaaggccctgagcgacgcatgtatgggcacaatcgcctccttcctgtctaagtaccaggacatcatcatcgaacaccagaaggtggtgaagggcaaccagaagagactggagagcctgcgggagctggccggcaaggaaaacctggaataccctagcgtgaccctgccacctcagcctcacaccaaggagggcgttgatgcctacaacgaagtgatcgcccgggtgcgaatgtgggtgaacctgaacctgtggcagaagctgaagctaagcagagatgatgccaagcctctgctgagactgaagggattcccttcctttcctctggtcgagagacaggccaacgaagtggactggtgggacatggtgtgtaacgtgaagaagctgatcaacgagaaaaaggaggatggcaaggtgttttggcagaatctggctggctacaagagacaggaagccctgagaccatacctgagcagcgaggaagatcggaagaagggaaagaaattcgctcggtaccagctgggcgacctgctgctgcacctggaaaagaagcacggcgaggactggggaaaggtgtacgacgaggcctgggagcggattgacaagaaagtggaaggcctgagcaagcacatcaagctggaagaggaacggagaagcgaggacgcccagagcaaggccgccctgaccgactggctgcgggctaaggccagcttcgtgatcgagggcctgaaggaggccgacaaggacgagttctgcagatgcgagctgaagctgcagaagtggtacggggacctgcggggaaagcccttcgccatcgaagccgagaacagcatcctggacatcagcggcttcagcaagcagtacaactgtgccttcatctggcagaaggacggcgtgaagaagctgaacctgtacctgatcatcaactacttcaagggcggcaagctgcggttcaagaagatcaaacctgaagccttcgaagccaacagattctacaccgtgatcaacaaaaagagcggcgagatcgtgcccatggaggtgaacttcaacttcgacgaccccaacctgatcatcctgcctctggcctttggcaagagacagggcagagaattcatctggaacgacctgctgtccctggaaaccggcagcctgaagctggccaacggaagagtgatcgagaagacactgtacaacagaagaacccggcaggatgagcctgccctgttcgtggccctgaccttcgagcggcgggaggtcctggactcctccaatatcaaaccaatgaacctgatcggcgtggcaagaggcgaaaacatccccgccgtgatcgccctgaccgaccccgagggctgcccactgagccggtttaaggatagcctgggaaacccaacccacatcctgagaatcggcgagagctataaggagaagcagcggaccatccaggccaagaaggaggtggagcagcggagagccggcggctacagccggaagtacgccagcaaagccaagaatctggcagacgatatggtgagaaacaccgctagagatctgctgtactacgccgtgacccaggatgccatgctgatcttcgccaacctgagccggggcttcggccggcagggcaagcggaccttcatggccgagagacagtacacacggatggaggactggctgaccgccaagctggcctacgagggcctgagcaagacctacctgtccaagacactggcccagtacacctccaagacatgcagcaactgtgggtttaccatcaccagcgccgactacgacagggtgctggagaagctgaagaagacagcaacaggctggatgaccacaattaacggcaaggagctgaaggtggagggccagattacctactacaacagatacaagagacagaacgtagtcaaggacctgtccgtcgagctggatagactgagcgaagaatctgtgaacaacgacatctcctcctggacaaagggcagaagcggagaagctctgagcctcctgaagaaaagattctcccatagacccgtgcaggagaagttcgtgtgcctgaactgcggcttcgagacacacgcagccgagcaagccgccctgaacatcgccagatcctggctgttcctgcggagccaggagtacaagaaataccagacaaacaagacaaccggcaacaccgataagagagccttcgtcgagacctggcagtccttttaccggaagaagcttaaggaggtgtggaaacctgccgtgcggtctggcggatctggcggaggctccacaagcttcagggaggtgagcgtgtacttcagcgaggaggagtggagctggctggaccccgaccagaaggccctgtactgggaggtgatgctggagaaccacaggaacatggccagcctgggcgacgacggccaggagaacaaggacagctacgagctgctgcagggcatcaccgccagggacaccatggagaccagcgccatcgagatggaggtggagaggtacaaggagaagcagagcgacgactggaaccaggagagcagcagctgcaccgacgacagcgtgaccagccccaagaaaaagagaaaagtctaagctgccttctgcggggcttgccttctggccatgcccttcttctctcccttgcacctgtacctcttggtctttgaataaagcctgagtaggaaggctagcaaaaaaaaaaaaaaaaaaaaaaaaaaaaaaaaaaaaaaaaaaaaaaaaaaaaaaaaaaaaaaaaaaaaaaaaaaaaaaaa

SEQ ID NO: 3254 - RNA, 5419 nt, synthetic construct
  source 1..5419: mol_type = other RNA
aggaaataagagagaaaagaagagtaagaagaaatataagagccaccatggcccctaagaagaagcgtaaagtgagccgggtgaacggcagcggcagcggcggcggcatgaaccacgaccaggagttcgacccccctaaggtgtaccctcccgtccccgccgagaagagaaagcccatccgggtcctgagcctgttcgatggcatcgccaccggtctgctggtgctgaaggacctgggcatccaggtggataggtacattgcctccgaggtgtgcgaggactccatcaccgtgggaatggtgcgtcatcagggcaagatcatgtacgtgggcgacgtgcggagcgtgacacagaagcatatccaggagtggggccctttcgacctggtgatcggcggcagcccttgcaatgacctgagcatcgtgaacccagcccggaagggcctgtacgagggaaccggcagactgttcttcgagttttacagactgctgcacgacgcccggcctaaggaaggcgacgaccggcccttcttttggctgttcgagaatgtggtggccatgggagtcagcgacaagcgggatattagccggttcctggagagcaaccccgtgatgatcgatgccaaggaagtgagcgccgcccaccgggccagatacttctggggcaatctgcctggcatgaacagacccctggccagcaccgtgaacgacaagctggagctgcaggagtgcctggagcacggccggatcgccaagttcagcaaggtgagaaccatcaccacccgaagcaacagcatcaaacaaggcaaggaccagcactttcctgtgttcatgaacgagaaggaggacatcctgtggtgtaccgagatggagagagtgttcgggttcccagtccactacacagatgtcagcaacatgtctagactggccagacagagactgctgggaagaagctggtccgtccctgtgatcagacacctgttcgcccctctgaaggagtacttcgcctgcgtgagcagcggcaacagcaacgccaacagccggggccccagcttctctagcggcctggtgccactgtccctgagagggagccacatgggccccatggagatctacaaaaccgtgagcgcctggaagcggcagcctgtgcgcgtgctgagcctgtttcggaatatcgataaagtcctgaaaagcctgggattcctggagagcggctctggctccggcggtggcaccctgaagtacgtggaggatgtgacaaacgtggtcagacgggatgtggagaagtggggccccttcgatctggtgtacggcagcacccaacccctgggcagctcttgtgaccggtgccctggctggtacatgtttcagttccaccggatcctgcagtacgccctgccgagacaggagtcccagcggccattcttttggattttcatggacaacttgctgctgaccgaggatgaccaggaaactaccactcggttcctgcagaccgaagccgtgaccctgcaggacgtgagaggccgggactaccagaacgccatgcgggtgtggtccaacatccctggactgaaaagcaagcacgcacctctgacccctaaagaagaggagtacctgcaggcccaggtgcggagcagaagcaagctggacgcccctaaggtggatctgctggtgaagaattgcctcctgcccctgagagagtacttcaagtatttcagccagaatagtctgcccctgggcggcccaagcagcggcgcccctcctcccagcggcggcagcccagccggctccccaacctctaccgaggagggcacctctgagtccgccacccccgagagcggccctggcacctccaccgagcccagcgagggcagcgcacccggcagccctgccggcagccccacctccacagaggagggaaccagcaccgagcccagcgaaggcagcgccccaggcaccagcaccgagcctagtgagggcggctctggcggcggcagcgcccaggagattaaacggatcaacaagatcagaagaagacttgtgaaagacagcaacaccaagaaggccggcaagacaggccccatgaaaaccctgctggttagagtgatgacacccgatctgagagagcggctggaaaacctgagaaagaagcctgaaaatatcccccagcccatcagcaatacatctagagccaacctgaataagctgctgaccgattacaccgaaatgaagaaggcgatcctgcatgtgtactgggaagagttccagaaggaccctgtgggcctgatgagccgggtggcccagcctgccagcaagaagatcgatcagaacaagctgaaacctgagatggacgagaagggcaacctgaccaccgccggctttgcctgctctcagtgtggccagcccctgttcgtgtacaagctggagcaggtgtctgagaagggcaaggcttacaccaactacttcggacggtgcaatgtggccgagcacgaaaagctgatcctgctggcccagctgaagcccgagaaggatagcgacgaagccgtgacatatagcctgggaaagtttgggcagagggccctggatttctacagcattcatgtgaccaaggagtccacccaccccgtgaagcccctggcccagatcgccggaaacagatacgcctccggacctgtgggaaaggccctgagcgacgcatgtatgggcacaatcgcctccttcctgtctaagtaccaggacatcatcatcgaacaccagaaggtggtgaagggcaaccagaagagactggagagcctgcgggagctggccggcaaggaaaacctggaataccctagcgtgaccctgccacctcagcctcacaccaaggagggcgttgatgcctacaacgaagtgatcgcccgggtgcgaatgtgggtgaacctgaacctgtggcagaagctgaagctaagcagagatgatgccaagcctctgctgagactgaagggattcccttcctttcctctggtcgagagacaggccaacgaagtggactggtgggacatggtgtgtaacgtgaagaagctgatcaacgagaaaaaggaggatggcaaggtgttttggcagaatctggctggctacaagagacaggaagccctgagaccatacctgagcagcgaggaagatcggaagaagggaaagaaattcgctcggtaccagctgggcgacctgctgctgcacctggaaaagaagcacggcgaggactggggaaaggtgtacgacgaggcctgggagcggattgacaagaaagtggaaggcctgagcaagcacatcaagctggaagaggaacggagaagcgaggacgcccagagcaaggccgccctgaccgactggctgcgggctaaggccagcttcgtgatcgagggcctgaaggaggccgacaaggacgagttctgcagatgcgagctgaagctgcagaagtggtacggggacctgcggggaaagcccttcgccatcgaagccgagaacagcatcctggacatcagcggcttcagcaagcagtacaactgtgccttcatctggcagaaggacggcgtgaagaagctgaacctgtacctgatcatcaactacttcaagggcggcaagctgcggttcaagaagatcaaacctgaagccttcgaagccaacagattctacaccgtgatcaacaaaaagagcggcgagatcgtgcccatggaggtgaacttcaacttcgacgaccccaacctgatcatcctgcctctggcctttggcaagagacagggcagagaattcatctggaacgacctgctgtccctggaaaccggcagcctgaagctggccaacggaagagtgatcgagaagacactgtacaacagaagaacccggcaggatgagcctgccctgttcgtggccctgaccttcgagcggcgggaggtcctggactcctccaatatcaaaccaatgaacctgatcggcgtggcaagaggcgaaaacatccccgccgtgatcgccctgaccgaccccgagggctgcccactgagccggtttaaggatagcctgggaaacccaacccacatcctgagaatcggcgagagctataaggagaagcagcggaccatccaggccaagaaggaggtggagcagcggagagccggcggctacagccggaagtacgccagcaaagccaagaatctggcagacgatatggtgagaaacaccgctagagatctgctgtactacgccgtgacccaggatgccatgctgatcttcgccaacctgagccggggcttcggccggcagggcaagcggaccttcatggccgagagacagtacacacggatggaggactggctgaccgccaagctggcctacgagggcctgagcaagacctacctgtccaagacactggcccagtacacctccaagacatgcagcaactgtgggtttaccatcaccagcgccgactacgacagggtgctggagaagctgaagaagacagcaacaggctggatgaccacaattaacggcaaggagctgaaggtggagggccagattacctactacaacagatacaagagacagaacgtagtcaaggacctgtccgtcgagctggatagactgagcgaagaatctgtgaacaacgacatctcctcctggacaaagggcagaagcggagaagctctgagcctcctgaagaaaagattctcccatagacccgtgcaggagaagttcgtgtgcctgaactgcggcttcgagacacacgcagccgagcaagccgccctgaacatcgccagatcctggctgttcctgcggagccaggagtacaagaaataccagacaaacaagacaaccggcaacaccgataagagagccttcgtcgagacctggcagtccttttaccggaagaagcttaaggaggtgtggaaacctgccgtgcggtctggcggatctggcggaggctccacaagcgacaccgtggtgttcgaggacgtggtggtgggcttcaccctggaggagtgggccctgctgaaccccgcccagaggaacctgtacagggaggtgatgctggagaccttcaagcacctggccagcgtggacaacgaggcccagcccaagaccaacggcagcatcagccagcaggacaccagcggcgagaagctgagcctgaagcagaagatcgagaagttcaccaggaagcacacctgggccagcaccagccccaagaaaaagagaaaagtctaagctgccttctgcggggcttgccttctggccatgcccttcttctctcccttgcacctgtacctcttggtctttgaataaagcctgagtaggaaggctagcaaaaaaaaaaaaaaaaaaaaaaaaaaaaaaaaaaaaaaaaaaaaaaaaaaaaaaaaaaaaaaaaaaaaaaaaaaaaaaaa

SEQ ID NO: 3255 - RNA, 5419 nt, synthetic construct
  source 1..5419: mol_type = other RNA
aggaaataagagagaaaagaagagtaagaagaaatataagagccaccatggcccctaagaagaagcgtaaagtgagccgggtgaacggcagcggcagcggcggcggcatgaaccacgaccaggagttcgacccccctaaggtgtaccctcccgtccccgccgagaagagaaagcccatccgggtcctgagcctgttcgatggcatcgccaccggtctgctggtgctgaaggacctgggcatccaggtggataggtacattgcctccgaggtgtgcgaggactccatcaccgtgggaatggtgcgtcatcagggcaagatcatgtacgtgggcgacgtgcggagcgtgacacagaagcatatccaggagtggggccctttcgacctggtgatcggcggcagcccttgcaatgacctgagcatcgtgaacccagcccggaagggcctgtacgagggaaccggcagactgttcttcgagttttacagactgctgcacgacgcccggcctaaggaaggcgacgaccggcccttcttttggctgttcgagaatgtggtggccatgggagtcagcgacaagcgggatattagccggttcctggagagcaaccccgtgatgatcgatgccaaggaagtgagcgccgcccaccgggccagatacttctggggcaatctgcctggcatgaacagacccctggccagcaccgtgaacgacaagctggagctgcaggagtgcctggagcacggccggatcgccaagttcagcaaggtgagaaccatcaccacccgaagcaacagcatcaaacaaggcaaggaccagcactttcctgtgttcatgaacgagaaggaggacatcctgtggtgtaccgagatggagagagtgttcgggttcccagtccactacacagatgtcagcaacatgtctagactggccagacagagactgctgggaagaagctggtccgtccctgtgatcagacacctgttcgcccctctgaaggagtacttcgcctgcgtgagcagcggcaacagcaacgccaacagccggggccccagcttctctagcggcctggtgccactgtccctgagagggagccacatgggccccatggagatctacaaaaccgtgagcgcctggaagcggcagcctgtgcgcgtgctgagcctgtttcggaatatcgataaagtcctgaaaagcctgggattcctggagagcggctctggctccggcggtggcaccctgaagtacgtggaggatgtgacaaacgtggtcagacgggatgtggagaagtggggccccttcgatctggtgtacggcagcacccaacccctgggcagctcttgtgaccggtgccctggctggtacatgtttcagttccaccggatcctgcagtacgccctgccgagacaggagtcccagcggccattcttttggattttcatggacaacttgctgctgaccgaggatgaccaggaaactaccactcggttcctgcagaccgaagccgtgaccctgcaggacgtgagaggccgggactaccagaacgccatgcgggtgtggtccaacatccctggactgaaaagcaagcacgcacctctgacccctaaagaagaggagtacctgcaggcccaggtgcggagcagaagcaagctggacgcccctaaggtggatctgctggtgaagaattgcctcctgcccctgagagagtacttcaagtatttcagccagaatagtctgcccctgggcggcccaagcagcggcgcccctcctcccagcggcggcagcccagccggctccccaacctctaccgaggagggcacctctgagtccgccacccccgagagcggccctggcacctccaccgagcccagcgagggcagcgcacccggcagccctgccggcagccccacctccacagaggagggaaccagcaccgagcccagcgaaggcagcgccccaggcaccagcaccgagcctagtgagggcggctctggcggcggcagcgcccaggagattaaacggatcaacaagatcagaagaagacttgtgaaagacagcaacaccaagaaggccggcaagacaggccccatgaaaaccctgctggttagagtgatgacacccgatctgagagagcggctggaaaacctgagaaagaagcctgaaaatatcccccagcccatcagcaatacatctagagccaacctgaataagctgctgaccgattacaccgaaatgaagaaggcgatcctgcatgtgtactgggaagagttccagaaggaccctgtgggcctgatgagccgggtggcccagcctgccagcaagaagatcgatcagaacaagctgaaacctgagatggacgagaagggcaacctgaccaccgccggctttgcctgctctcagtgtggccagcccctgttcgtgtacaagctggagcaggtgtctgagaagggcaaggcttacaccaactacttcggacggtgcaatgtggccgagcacgaaaagctgatcctgctggcccagctgaagcccgagaaggatagcgacgaagccgtgacatatagcctgggaaagtttgggcagagggccctggatttctacagcattcatgtgaccaaggagtccacccaccccgtgaagcccctggcccagatcgccggaaacagatacgcctccggacctgtgggaaaggccctgagcgacgcatgtatgggcacaatcgcctccttcctgtctaagtaccaggacatcatcatcgaacaccagaaggtggtgaagggcaaccagaagagactggagagcctgcgggagctggccggcaaggaaaacctggaataccctagcgtgaccctgccacctcagcctcacaccaaggagggcgttgatgcctacaacgaagtgatcgcccgggtgcgaatgtgggtgaacctgaacctgtggcagaagctgaagctaagcagagatgatgccaagcctctgctgagactgaagggattcccttcctttcctctggtcgagagacaggccaacgaagtggactggtgggacatggtgtgtaacgtgaagaagctgatcaacgagaaaaaggaggatggcaaggtgttttggcagaatctggctggctacaagagacaggaagccctgagaccatacctgagcagcgaggaagatcggaagaagggaaagaaattcgctcggtaccagctgggcgacctgctgctgcacctggaaaagaagcacggcgaggactggggaaaggtgtacgacgaggcctgggagcggattgacaagaaagtggaaggcctgagcaagcacatcaagctggaagaggaacggagaagcgaggacgcccagagcaaggccgccctgaccgactggctgcgggctaaggccagcttcgtgatcgagggcctgaaggaggccgacaaggacgagttctgcagatgcgagctgaagctgcagaagtggtacggggacctgcggggaaagcccttcgccatcgaagccgagaacagcatcctggacatcagcggcttcagcaagcagtacaactgtgccttcatctggcagaaggacggcgtgaagaagctgaacctgtacctgatcatcaactacttcaagggcggcaagctgcggttcaagaagatcaaacctgaagccttcgaagccaacagattctacaccgtgatcaacaaaaagagcggcgagatcgtgcccatggaggtgaacttcaacttcgacgaccccaacctgatcatcctgcctctggcctttggcaagagacagggcagagaattcatctggaacgacctgctgtccctggaaaccggcagcctgaagctggccaacggaagagtgatcgagaagacactgtacaacagaagaacccggcaggatgagcctgccctgttcgtggccctgaccttcgagcggcgggaggtcctggactcctccaatatcaaaccaatgaacctgatcggcgtggcaagaggcgaaaacatccccgccgtgatcgccctgaccgaccccgagggctgcccactgagccggtttaaggatagcctgggaaacccaacccacatcctgagaatcggcgagagctataaggagaagcagcggaccatccaggccaagaaggaggtggagcagcggagagccggcggctacagccggaagtacgccagcaaagccaagaatctggcagacgatatggtgagaaacaccgctagagatctgctgtactacgccgtgacccaggatgccatgctgatcttcgccaacctgagccggggcttcggccggcagggcaagcggaccttcatggccgagagacagtacacacggatggaggactggctgaccgccaagctggcctacgagggcctgagcaagacctacctgtccaagacactggcccagtacacctccaagacatgcagcaactgtgggtttaccatcaccagcgccgactacgacagggtgctggagaagctgaagaagacagcaacaggctggatgaccacaattaacggcaaggagctgaaggtggagggccagattacctactacaacagatacaagagacagaacgtagtcaaggacctgtccgtcgagctggatagactgagcgaagaatctgtgaacaacgacatctcctcctggacaaagggcagaagcggagaagctctgagcctcctgaagaaaagattctcccatagacccgtgcaggagaagttcgtgtgcctgaactgcggcttcgagacacacgcagccgagcaagccgccctgaacatcgccagatcctggctgttcctgcggagccaggagtacaagaaataccagacaaacaagacaaccggcaacaccgataagagagccttcgtcgagacctggcagtccttttaccggaagaagcttaaggaggtgtggaaacctgccgtgcggtctggcggatctggcggaggctccacaagcgcccacgccctggtgaccttcagggacgtggccatcgacttcagccagaaggagtgggagtgcctggacaccacccagaggaagctgtacagggacgtgatgctggagaactacaacaacctggtgagcctggccggctacagcggcagcaagcccgacgtgatcaccctgctggagcagggcaaggagccctgcgtggtggccagggacgtgaccggcaggcagtgccccggcctgctgagcaccagccccaagaaaaagagaaaagtctaagctgccttctgcggggcttgccttctggccatgcccttcttctctcccttgcacctgtacctcttggtctttgaataaagcctgagtaggaaggctagcaaaaaaaaaaaaaaaaaaaaaaaaaaaaaaaaaaaaaaaaaaaaaaaaaaaaaaaaaaaaaaaaaaaaaaaaaaaaaaaa

SEQ ID NO: 3256 - RNA, 5419 nt, synthetic construct
  source 1..5419: mol_type = other RNA
aggaaataagagagaaaagaagagtaagaagaaatataagagccaccatggcccctaagaagaagcgtaaagtgagccgggtgaacggcagcggcagcggcggcggcatgaaccacgaccaggagttcgacccccctaaggtgtaccctcccgtccccgccgagaagagaaagcccatccgggtcctgagcctgttcgatggcatcgccaccggtctgctggtgctgaaggacctgggcatccaggtggataggtacattgcctccgaggtgtgcgaggactccatcaccgtgggaatggtgcgtcatcagggcaagatcatgtacgtgggcgacgtgcggagcgtgacacagaagcatatccaggagtggggccctttcgacctggtgatcggcggcagcccttgcaatgacctgagcatcgtgaacccagcccggaagggcctgtacgagggaaccggcagactgttcttcgagttttacagactgctgcacgacgcccggcctaaggaaggcgacgaccggcccttcttttggctgttcgagaatgtggtggccatgggagtcagcgacaagcgggatattagccggttcctggagagcaaccccgtgatgatcgatgccaaggaagtgagcgccgcccaccgggccagatacttctggggcaatctgcctggcatgaacagacccctggccagcaccgtgaacgacaagctggagctgcaggagtgcctggagcacggccggatcgccaagttcagcaaggtgagaaccatcaccacccgaagcaacagcatcaaacaaggcaaggaccagcactttcctgtgttcatgaacgagaaggaggacatcctgtggtgtaccgagatggagagagtgttcgggttcccagtccactacacagatgtcagcaacatgtctagactggccagacagagactgctgggaagaagctggtccgtccctgtgatcagacacctgttcgcccctctgaaggagtacttcgcctgcgtgagcagcggcaacagcaacgccaacagccggggccccagcttctctagcggcctggtgccactgtccctgagagggagccacatgggccccatggagatctacaaaaccgtgagcgcctggaagcggcagcctgtgcgcgtgctgagcctgtttcggaatatcgataaagtcctgaaaagcctgggattcctggagagcggctctggctccggcggtggcaccctgaagtacgtggaggatgtgacaaacgtggtcagacgggatgtggagaagtggggccccttcgatctggtgtacggcagcacccaacccctgggcagctcttgtgaccggtgccctggctggtacatgtttcagttccaccggatcctgcagtacgccctgccgagacaggagtcccagcggccattcttttggattttcatggacaacttgctgctgaccgaggatgaccaggaaactaccactcggttcctgcagaccgaagccgtgaccctgcaggacgtgagaggccgggactaccagaacgccatgcgggtgtggtccaacatccctggactgaaaagcaagcacgcacctctgacccctaaagaagaggagtacctgcaggcccaggtgcggagcagaagcaagctggacgcccctaaggtggatctgctggtgaagaattgcctcctgcccctgagagagtacttcaagtatttcagccagaatagtctgcccctgggcggcccaagcagcggcgcccctcctcccagcggcggcagcccagccggctccccaacctctaccgaggagggcacctctgagtccgccacccccgagagcggccctggcacctccaccgagcccagcgagggcagcgcacccggcagccctgccggcagccccacctccacagaggagggaaccagcaccgagcccagcgaaggcagcgccccaggcaccagcaccgagcctagtgagggcggctctggcggcggcagcgcccaggagattaaacggatcaacaagatcagaagaagacttgtgaaagacagcaacaccaagaaggccggcaagacaggccccatgaaaaccctgctggttagagtgatgacacccgatctgagagagcggctggaaaacctgagaaagaagcctgaaaatatcccccagcccatcagcaatacatctagagccaacctgaataagctgctgaccgattacaccgaaatgaagaaggcgatcctgcatgtgtactgggaagagttccagaaggaccctgtgggcctgatgagccgggtggcccagcctgccagcaagaagatcgatcagaacaagctgaaacctgagatggacgagaagggcaacctgaccaccgccggctttgcctgctctcagtgtggccagcccctgttcgtgtacaagctggagcaggtgtctgagaagggcaaggcttacaccaactacttcggacggtgcaatgtggccgagcacgaaaagctgatcctgctggcccagctgaagcccgagaaggatagcgacgaagccgtgacatatagcctgggaaagtttgggcagagggccctggatttctacagcattcatgtgaccaaggagtccacccaccccgtgaagcccctggcccagatcgccggaaacagatacgcctccggacctgtgggaaaggccctgagcgacgcatgtatgggcacaatcgcctccttcctgtctaagtaccaggacatcatcatcgaacaccagaaggtggtgaagggcaaccagaagagactggagagcctgcgggagctggccggcaaggaaaacctggaataccctagcgtgaccctgccacctcagcctcacaccaaggagggcgttgatgcctacaacgaagtgatcgcccgggtgcgaatgtgggtgaacctgaacctgtggcagaagctgaagctaagcagagatgatgccaagcctctgctgagactgaagggattcccttcctttcctctggtcgagagacaggccaacgaagtggactggtgggacatggtgtgtaacgtgaagaagctgatcaacgagaaaaaggaggatggcaaggtgttttggcagaatctggctggctacaagagacaggaagccctgagaccatacctgagcagcgaggaagatcggaagaagggaaagaaattcgctcggtaccagctgggcgacctgctgctgcacctggaaaagaagcacggcgaggactggggaaaggtgtacgacgaggcctgggagcggattgacaagaaagtggaaggcctgagcaagcacatcaagctggaagaggaacggagaagcgaggacgcccagagcaaggccgccctgaccgactggctgcgggctaaggccagcttcgtgatcgagggcctgaaggaggccgacaaggacgagttctgcagatgcgagctgaagctgcagaagtggtacggggacctgcggggaaagcccttcgccatcgaagccgagaacagcatcctggacatcagcggcttcagcaagcagtacaactgtgccttcatctggcagaaggacggcgtgaagaagctgaacctgtacctgatcatcaactacttcaagggcggcaagctgcggttcaagaagatcaaacctgaagccttcgaagccaacagattctacaccgtgatcaacaaaaagagcggcgagatcgtgcccatggaggtgaacttcaacttcgacgaccccaacctgatcatcctgcctctggcctttggcaagagacagggcagagaattcatctggaacgacctgctgtccctggaaaccggcagcctgaagctggccaacggaagagtgatcgagaagacactgtacaacagaagaacccggcaggatgagcctgccctgttcgtggccctgaccttcgagcggcgggaggtcctggactcctccaatatcaaaccaatgaacctgatcggcgtggcaagaggcgaaaacatccccgccgtgatcgccctgaccgaccccgagggctgcccactgagccggtttaaggatagcctgggaaacccaacccacatcctgagaatcggcgagagctataaggagaagcagcggaccatccaggccaagaaggaggtggagcagcggagagccggcggctacagccggaagtacgccagcaaagccaagaatctggcagacgatatggtgagaaacaccgctagagatctgctgtactacgccgtgacccaggatgccatgctgatcttcgccaacctgagccggggcttcggccggcagggcaagcggaccttcatggccgagagacagtacacacggatggaggactggctgaccgccaagctggcctacgagggcctgagcaagacctacctgtccaagacactggcccagtacacctccaagacatgcagcaactgtgggtttaccatcaccagcgccgactacgacagggtgctggagaagctgaagaagacagcaacaggctggatgaccacaattaacggcaaggagctgaaggtggagggccagattacctactacaacagatacaagagacagaacgtagtcaaggacctgtccgtcgagctggatagactgagcgaagaatctgtgaacaacgacatctcctcctggacaaagggcagaagcggagaagctctgagcctcctgaagaaaagattctcccatagacccgtgcaggagaagttcgtgtgcctgaactgcggcttcgagacacacgcagccgagcaagccgccctgaacatcgccagatcctggctgttcctgcggagccaggagtacaagaaataccagacaaacaagacaaccggcaacaccgataagagagccttcgtcgagacctggcagtccttttaccggaagaagcttaaggaggtgtggaaacctgccgtgcggtctggcggatctggcggaggctccacaagcctgcaggtgagcgtgagcttcgaggacgtggccgtggacttcagcagggaggagtggcagcagctggacagcacccagaggaggctgtaccaggacgtgatgctggagaactacagccacctgctgagcctgggctgcgagatccccaagcccgaggtgatcttcaagctggagcagggcgaggagccctggaccctggaggaggagaccccccaccagagctgcagcgacgagaagttcggcaccagccccaagaaaaagagaaaagtctaagctgccttctgcggggcttgccttctggccatgcccttcttctctcccttgcacctgtacctcttggtctttgaataaagcctgagtaggaaggctagcaaaaaaaaaaaaaaaaaaaaaaaaaaaaaaaaaaaaaaaaaaaaaaaaaaaaaaaaaaaaaaaaaaaaaaaaaaaaaaaa

SEQ ID NO: 3257 - RNA, 5419 nt, synthetic construct
  source 1..5419: mol_type = other RNA
aggaaataagagagaaaagaagagtaagaagaaatataagagccaccatggcccctaagaagaagcgtaaagtgagccgggtgaacggcagcggcagcggcggcggcatgaaccacgaccaggagttcgacccccctaaggtgtaccctcccgtccccgccgagaagagaaagcccatccgggtcctgagcctgttcgatggcatcgccaccggtctgctggtgctgaaggacctgggcatccaggtggataggtacattgcctccgaggtgtgcgaggactccatcaccgtgggaatggtgcgtcatcagggcaagatcatgtacgtgggcgacgtgcggagcgtgacacagaagcatatccaggagtggggccctttcgacctggtgatcggcggcagcccttgcaatgacctgagcatcgtgaacccagcccggaagggcctgtacgagggaaccggcagactgttcttcgagttttacagactgctgcacgacgcccggcctaaggaaggcgacgaccggcccttcttttggctgttcgagaatgtggtggccatgggagtcagcgacaagcgggatattagccggttcctggagagcaaccccgtgatgatcgatgccaaggaagtgagcgccgcccaccgggccagatacttctggggcaatctgcctggcatgaacagacccctggccagcaccgtgaacgacaagctggagctgcaggagtgcctggagcacggccggatcgccaagttcagcaaggtgagaaccatcaccacccgaagcaacagcatcaaacaaggcaaggaccagcactttcctgtgttcatgaacgagaaggaggacatcctgtggtgtaccgagatggagagagtgttcgggttcccagtccactacacagatgtcagcaacatgtctagactggccagacagagactgctgggaagaagctggtccgtccctgtgatcagacacctgttcgcccctctgaaggagtacttcgcctgcgtgagcagcggcaacagcaacgccaacagccggggccccagcttctctagcggcctggtgccactgtccctgagagggagccacatgggccccatggagatctacaaaaccgtgagcgcctggaagcggcagcctgtgcgcgtgctgagcctgtttcggaatatcgataaagtcctgaaaagcctgggattcctggagagcggctctggctccggcggtggcaccctgaagtacgtggaggatgtgacaaacgtggtcagacgggatgtggagaagtggggccccttcgatctggtgtacggcagcacccaacccctgggcagctcttgtgaccggtgccctggctggtacatgtttcagttccaccggatcctgcagtacgccctgccgagacaggagtcccagcggccattcttttggattttcatggacaacttgctgctgaccgaggatgaccaggaaactaccactcggttcctgcagaccgaagccgtgaccctgcaggacgtgagaggccgggactaccagaacgccatgcgggtgtggtccaacatccctggactgaaaagcaagcacgcacctctgacccctaaagaagaggagtacctgcaggcccaggtgcggagcagaagcaagctggacgcccctaaggtggatctgctggtgaagaattgcctcctgcccctgagagagtacttcaagtatttcagccagaatagtctgcccctgggcggcccaagcagcggcgcccctcctcccagcggcggcagcccagccggctccccaacctctaccgaggagggcacctctgagtccgccacccccgagagcggccctggcacctccaccgagcccagcgagggcagcgcacccggcagccctgccggcagccccacctccacagaggagggaaccagcaccgagcccagcgaaggcagcgccccaggcaccagcaccgagcctagtgagggcggctctggcggcggcagcgcccaggagattaaacggatcaacaagatcagaagaagacttgtgaaagacagcaacaccaagaaggccggcaagacaggccccatgaaaaccctgctggttagagtgatgacacccgatctgagagagcggctggaaaacctgagaaagaagcctgaaaatatcccccagcccatcagcaatacatctagagccaacctgaataagctgctgaccgattacaccgaaatgaagaaggcgatcctgcatgtgtactgggaagagttccagaaggaccctgtgggcctgatgagccgggtggcccagcctgccagcaagaagatcgatcagaacaagctgaaacctgagatggacgagaagggcaacctgaccaccgccggctttgcctgctctcagtgtggccagcccctgttcgtgtacaagctggagcaggtgtctgagaagggcaaggcttacaccaactacttcggacggtgcaatgtggccgagcacgaaaagctgatcctgctggcccagctgaagcccgagaaggatagcgacgaagccgtgacatatagcctgggaaagtttgggcagagggccctggatttctacagcattcatgtgaccaaggagtccacccaccccgtgaagcccctggcccagatcgccggaaacagatacgcctccggacctgtgggaaaggccctgagcgacgcatgtatgggcacaatcgcctccttcctgtctaagtaccaggacatcatcatcgaacaccagaaggtggtgaagggcaaccagaagagactggagagcctgcgggagctggccggcaaggaaaacctggaataccctagcgtgaccctgccacctcagcctcacaccaaggagggcgttgatgcctacaacgaagtgatcgcccgggtgcgaatgtgggtgaacctgaacctgtggcagaagctgaagctaagcagagatgatgccaagcctctgctgagactgaagggattcccttcctttcctctggtcgagagacaggccaacgaagtggactggtgggacatggtgtgtaacgtgaagaagctgatcaacgagaaaaaggaggatggcaaggtgttttggcagaatctggctggctacaagagacaggaagccctgagaccatacctgagcagcgaggaagatcggaagaagggaaagaaattcgctcggtaccagctgggcgacctgctgctgcacctggaaaagaagcacggcgaggactggggaaaggtgtacgacgaggcctgggagcggattgacaagaaagtggaaggcctgagcaagcacatcaagctggaagaggaacggagaagcgaggacgcccagagcaaggccgccctgaccgactggctgcgggctaaggccagcttcgtgatcgagggcctgaaggaggccgacaaggacgagttctgcagatgcgagctgaagctgcagaagtggtacggggacctgcggggaaagcccttcgccatcgaagccgagaacagcatcctggacatcagcggcttcagcaagcagtacaactgtgccttcatctggcagaaggacggcgtgaagaagctgaacctgtacctgatcatcaactacttcaagggcggcaagctgcggttcaagaagatcaaacctgaagccttcgaagccaacagattctacaccgtgatcaacaaaaagagcggcgagatcgtgcccatggaggtgaacttcaacttcgacgaccccaacctgatcatcctgcctctggcctttggcaagagacagggcagagaattcatctggaacgacctgctgtccctggaaaccggcagcctgaagctggccaacggaagagtgatcgagaagacactgtacaacagaagaacccggcaggatgagcctgccctgttcgtggccctgaccttcgagcggcgggaggtcctggactcctccaatatcaaaccaatgaacctgatcggcgtggcaagaggcgaaaacatccccgccgtgatcgccctgaccgaccccgagggctgcccactgagccggtttaaggatagcctgggaaacccaacccacatcctgagaatcggcgagagctataaggagaagcagcggaccatccaggccaagaaggaggtggagcagcggagagccggcggctacagccggaagtacgccagcaaagccaagaatctggcagacgatatggtgagaaacaccgctagagatctgctgtactacgccgtgacccaggatgccatgctgatcttcgccaacctgagccggggcttcggccggcagggcaagcggaccttcatggccgagagacagtacacacggatggaggactggctgaccgccaagctggcctacgagggcctgagcaagacctacctgtccaagacactggcccagtacacctccaagacatgcagcaactgtgggtttaccatcaccagcgccgactacgacagggtgctggagaagctgaagaagacagcaacaggctggatgaccacaattaacggcaaggagctgaaggtggagggccagattacctactacaacagatacaagagacagaacgtagtcaaggacctgtccgtcgagctggatagactgagcgaagaatctgtgaacaacgacatctcctcctggacaaagggcagaagcggagaagctctgagcctcctgaagaaaagattctcccatagacccgtgcaggagaagttcgtgtgcctgaactgcggcttcgagacacacgcagccgagcaagccgccctgaacatcgccagatcctggctgttcctgcggagccaggagtacaagaaataccagacaaacaagacaaccggcaacaccgataagagagccttcgtcgagacctggcagtccttttaccggaagaagcttaaggaggtgtggaaacctgccgtgcggtctggcggatctggcggaggctccacaagcagcgagatgagggtgaccttcgaggaggtggccgtgtacttcaccaagggccagggcgccctgctggacgccaggcagaaggccctgtacagggacgtgatgctggagaactacgaggccgtgaccagcctgggcttccccgtgcccaagcccgagctgatcgccaggctggagaggggcgaggagccctgggtgcccgacctgcaggccggcgaggagagggagatcctgaggggcaccaggaccagccccaagaaaaagagaaaagtctaagctgccttctgcggggcttgccttctggccatgcccttcttctctcccttgcacctgtacctcttggtctttgaataaagcctgagtaggaaggctagcaaaaaaaaaaaaaaaaaaaaaaaaaaaaaaaaaaaaaaaaaaaaaaaaaaaaaaaaaaaaaaaaaaaaaaaaaaaaaaaa

SEQ ID NO: 3258 - RNA, 5419 nt, synthetic construct
  source 1..5419: mol_type = other RNA
aggaaataagagagaaaagaagagtaagaagaaatataagagccaccatggcccctaagaagaagcgtaaagtgagccgggtgaacggcagcggcagcggcggcggcatgaaccacgaccaggagttcgacccccctaaggtgtaccctcccgtccccgccgagaagagaaagcccatccgggtcctgagcctgttcgatggcatcgccaccggtctgctggtgctgaaggacctgggcatccaggtggataggtacattgcctccgaggtgtgcgaggactccatcaccgtgggaatggtgcgtcatcagggcaagatcatgtacgtgggcgacgtgcggagcgtgacacagaagcatatccaggagtggggccctttcgacctggtgatcggcggcagcccttgcaatgacctgagcatcgtgaacccagcccggaagggcctgtacgagggaaccggcagactgttcttcgagttttacagactgctgcacgacgcccggcctaaggaaggcgacgaccggcccttcttttggctgttcgagaatgtggtggccatgggagtcagcgacaagcgggatattagccggttcctggagagcaaccccgtgatgatcgatgccaaggaagtgagcgccgcccaccgggccagatacttctggggcaatctgcctggcatgaacagacccctggccagcaccgtgaacgacaagctggagctgcaggagtgcctggagcacggccggatcgccaagttcagcaaggtgagaaccatcaccacccgaagcaacagcatcaaacaaggcaaggaccagcactttcctgtgttcatgaacgagaaggaggacatcctgtggtgtaccgagatggagagagtgttcgggttcccagtccactacacagatgtcagcaacatgtctagactggccagacagagactgctgggaagaagctggtccgtccctgtgatcagacacctgttcgcccctctgaaggagtacttcgcctgcgtgagcagcggcaacagcaacgccaacagccggggccccagcttctctagcggcctggtgccactgtccctgagagggagccacatgggccccatggagatctacaaaaccgtgagcgcctggaagcggcagcctgtgcgcgtgctgagcctgtttcggaatatcgataaagtcctgaaaagcctgggattcctggagagcggctctggctccggcggtggcaccctgaagtacgtggaggatgtgacaaacgtggtcagacgggatgtggagaagtggggccccttcgatctggtgtacggcagcacccaacccctgggcagctcttgtgaccggtgccctggctggtacatgtttcagttccaccggatcctgcagtacgccctgccgagacaggagtcccagcggccattcttttggattttcatggacaacttgctgctgaccgaggatgaccaggaaactaccactcggttcctgcagaccgaagccgtgaccctgcaggacgtgagaggccgggactaccagaacgccatgcgggtgtggtccaacatccctggactgaaaagcaagcacgcacctctgacccctaaagaagaggagtacctgcaggcccaggtgcggagcagaagcaagctggacgcccctaaggtggatctgctggtgaagaattgcctcctgcccctgagagagtacttcaagtatttcagccagaatagtctgcccctgggcggcccaagcagcggcgcccctcctcccagcggcggcagcccagccggctccccaacctctaccgaggagggcacctctgagtccgccacccccgagagcggccctggcacctccaccgagcccagcgagggcagcgcacccggcagccctgccggcagccccacctccacagaggagggaaccagcaccgagcccagcgaaggcagcgccccaggcaccagcaccgagcctagtgagggcggctctggcggcggcagcgcccaggagattaaacggatcaacaagatcagaagaagacttgtgaaagacagcaacaccaagaaggccggcaagacaggccccatgaaaaccctgctggttagagtgatgacacccgatctgagagagcggctggaaaacctgagaaagaagcctgaaaatatcccccagcccatcagcaatacatctagagccaacctgaataagctgctgaccgattacaccgaaatgaagaaggcgatcctgcatgtgtactgggaagagttccagaaggaccctgtgggcctgatgagccgggtggcccagcctgccagcaagaagatcgatcagaacaagctgaaacctgagatggacgagaagggcaacctgaccaccgccggctttgcctgctctcagtgtggccagcccctgttcgtgtacaagctggagcaggtgtctgagaagggcaaggcttacaccaactacttcggacggtgcaatgtggccgagcacgaaaagctgatcctgctggcccagctgaagcccgagaaggatagcgacgaagccgtgacatatagcctgggaaagtttgggcagagggccctggatttctacagcattcatgtgaccaaggagtccacccaccccgtgaagcccctggcccagatcgccggaaacagatacgcctccggacctgtgggaaaggccctgagcgacgcatgtatgggcacaatcgcctccttcctgtctaagtaccaggacatcatcatcgaacaccagaaggtggtgaagggcaaccagaagagactggagagcctgcgggagctggccggcaaggaaaacctggaataccctagcgtgaccctgccacctcagcctcacaccaaggagggcgttgatgcctacaacgaagtgatcgcccgggtgcgaatgtgggtgaacctgaacctgtggcagaagctgaagctaagcagagatgatgccaagcctctgctgagactgaagggattcccttcctttcctctggtcgagagacaggccaacgaagtggactggtgggacatggtgtgtaacgtgaagaagctgatcaacgagaaaaaggaggatggcaaggtgttttggcagaatctggctggctacaagagacaggaagccctgagaccatacctgagcagcgaggaagatcggaagaagggaaagaaattcgctcggtaccagctgggcgacctgctgctgcacctggaaaagaagcacggcgaggactggggaaaggtgtacgacgaggcctgggagcggattgacaagaaagtggaaggcctgagcaagcacatcaagctggaagaggaacggagaagcgaggacgcccagagcaaggccgccctgaccgactggctgcgggctaaggccagcttcgtgatcgagggcctgaaggaggccgacaaggacgagttctgcagatgcgagctgaagctgcagaagtggtacggggacctgcggggaaagcccttcgccatcgaagccgagaacagcatcctggacatcagcggcttcagcaagcagtacaactgtgccttcatctggcagaaggacggcgtgaagaagctgaacctgtacctgatcatcaactacttcaagggcggcaagctgcggttcaagaagatcaaacctgaagccttcgaagccaacagattctacaccgtgatcaacaaaaagagcggcgagatcgtgcccatggaggtgaacttcaacttcgacgaccccaacctgatcatcctgcctctggcctttggcaagagacagggcagagaattcatctggaacgacctgctgtccctggaaaccggcagcctgaagctggccaacggaagagtgatcgagaagacactgtacaacagaagaacccggcaggatgagcctgccctgttcgtggccctgaccttcgagcggcgggaggtcctggactcctccaatatcaaaccaatgaacctgatcggcgtggcaagaggcgaaaacatccccgccgtgatcgccctgaccgaccccgagggctgcccactgagccggtttaaggatagcctgggaaacccaacccacatcctgagaatcggcgagagctataaggagaagcagcggaccatccaggccaagaaggaggtggagcagcggagagccggcggctacagccggaagtacgccagcaaagccaagaatctggcagacgatatggtgagaaacaccgctagagatctgctgtactacgccgtgacccaggatgccatgctgatcttcgccaacctgagccggggcttcggccggcagggcaagcggaccttcatggccgagagacagtacacacggatggaggactggctgaccgccaagctggcctacgagggcctgagcaagacctacctgtccaagacactggcccagtacacctccaagacatgcagcaactgtgggtttaccatcaccagcgccgactacgacagggtgctggagaagctgaagaagacagcaacaggctggatgaccacaattaacggcaaggagctgaaggtggagggccagattacctactacaacagatacaagagacagaacgtagtcaaggacctgtccgtcgagctggatagactgagcgaagaatctgtgaacaacgacatctcctcctggacaaagggcagaagcggagaagctctgagcctcctgaagaaaagattctcccatagacccgtgcaggagaagttcgtgtgcctgaactgcggcttcgagacacacgcagccgagcaagccgccctgaacatcgccagatcctggctgttcctgcggagccaggagtacaagaaataccagacaaacaagacaaccggcaacaccgataagagagccttcgtcgagacctggcagtccttttaccggaagaagcttaaggaggtgtggaaacctgccgtgcggtctggcggatctggcggaggctccacaagcggccacgccctgctgaccttcagggacgtggccatcgagttcagccaggaggagtggggctgcctgaaccacacccagagggagctgtacagggacgtgatgctggagaactacggccacctgctgttcctgggcctgatcgtgagcaagcccgacctggtgagcttcctggagcagaccaaggacccctgggacggcaagaggaagaagaccgtggccttccaccccggcctggccctgagcaccagccccaagaaaaagagaaaagtctaagctgccttctgcggggcttgccttctggccatgcccttcttctctcccttgcacctgtacctcttggtctttgaataaagcctgagtaggaaggctagcaaaaaaaaaaaaaaaaaaaaaaaaaaaaaaaaaaaaaaaaaaaaaaaaaaaaaaaaaaaaaaaaaaaaaaaaaaaaaaaa

SEQ ID NO: 3259 - RNA, 5419 nt, synthetic construct
  source 1..5419: mol_type = other RNA
aggaaataagagagaaaagaagagtaagaagaaatataagagccaccatggcccctaagaagaagcgtaaagtgagccgggtgaacggcagcggcagcggcggcggcatgaaccacgaccaggagttcgacccccctaaggtgtaccctcccgtccccgccgagaagagaaagcccatccgggtcctgagcctgttcgatggcatcgccaccggtctgctggtgctgaaggacctgggcatccaggtggataggtacattgcctccgaggtgtgcgaggactccatcaccgtgggaatggtgcgtcatcagggcaagatcatgtacgtgggcgacgtgcggagcgtgacacagaagcatatccaggagtggggccctttcgacctggtgatcggcggcagcccttgcaatgacctgagcatcgtgaacccagcccggaagggcctgtacgagggaaccggcagactgttcttcgagttttacagactgctgcacgacgcccggcctaaggaaggcgacgaccggcccttcttttggctgttcgagaatgtggtggccatgggagtcagcgacaagcgggatattagccggttcctggagagcaaccccgtgatgatcgatgccaaggaagtgagcgccgcccaccgggccagatacttctggggcaatctgcctggcatgaacagacccctggccagcaccgtgaacgacaagctggagctgcaggagtgcctggagcacggccggatcgccaagttcagcaaggtgagaaccatcaccacccgaagcaacagcatcaaacaaggcaaggaccagcactttcctgtgttcatgaacgagaaggaggacatcctgtggtgtaccgagatggagagagtgttcgggttcccagtccactacacagatgtcagcaacatgtctagactggccagacagagactgctgggaagaagctggtccgtccctgtgatcagacacctgttcgcccctctgaaggagtacttcgcctgcgtgagcagcggcaacagcaacgccaacagccggggccccagcttctctagcggcctggtgccactgtccctgagagggagccacatgggccccatggagatctacaaaaccgtgagcgcctggaagcggcagcctgtgcgcgtgctgagcctgtttcggaatatcgataaagtcctgaaaagcctgggattcctggagagcggctctggctccggcggtggcaccctgaagtacgtggaggatgtgacaaacgtggtcagacgggatgtggagaagtggggccccttcgatctggtgtacggcagcacccaacccctgggcagctcttgtgaccggtgccctggctggtacatgtttcagttccaccggatcctgcagtacgccctgccgagacaggagtcccagcggccattcttttggattttcatggacaacttgctgctgaccgaggatgaccaggaaactaccactcggttcctgcagaccgaagccgtgaccctgcaggacgtgagaggccgggactaccagaacgccatgcgggtgtggtccaacatccctggactgaaaagcaagcacgcacctctgacccctaaagaagaggagtacctgcaggcccaggtgcggagcagaagcaagctggacgcccctaaggtggatctgctggtgaagaattgcctcctgcccctgagagagtacttcaagtatttcagccagaatagtctgcccctgggcggcccaagcagcggcgcccctcctcccagcggcggcagcccagccggctccccaacctctaccgaggagggcacctctgagtccgccacccccgagagcggccctggcacctccaccgagcccagcgagggcagcgcacccggcagccctgccggcagccccacctccacagaggagggaaccagcaccgagcccagcgaaggcagcgccccaggcaccagcaccgagcctagtgagggcggctctggcggcggcagcgcccaggagattaaacggatcaacaagatcagaagaagacttgtgaaagacagcaacaccaagaaggccggcaagacaggccccatgaaaaccctgctggttagagtgatgacacccgatctgagagagcggctggaaaacctgagaaagaagcctgaaaatatcccccagcccatcagcaatacatctagagccaacctgaataagctgctgaccgattacaccgaaatgaagaaggcgatcctgcatgtgtactgggaagagttccagaaggaccctgtgggcctgatgagccgggtggcccagcctgccagcaagaagatcgatcagaacaagctgaaacctgagatggacgagaagggcaacctgaccaccgccggctttgcctgctctcagtgtggccagcccctgttcgtgtacaagctggagcaggtgtctgagaagggcaaggcttacaccaactacttcggacggtgcaatgtggccgagcacgaaaagctgatcctgctggcccagctgaagcccgagaaggatagcgacgaagccgtgacatatagcctgggaaagtttgggcagagggccctggatttctacagcattcatgtgaccaaggagtccacccaccccgtgaagcccctggcccagatcgccggaaacagatacgcctccggacctgtgggaaaggccctgagcgacgcatgtatgggcacaatcgcctccttcctgtctaagtaccaggacatcatcatcgaacaccagaaggtggtgaagggcaaccagaagagactggagagcctgcgggagctggccggcaaggaaaacctggaataccctagcgtgaccctgccacctcagcctcacaccaaggagggcgttgatgcctacaacgaagtgatcgcccgggtgcgaatgtgggtgaacctgaacctgtggcagaagctgaagctaagcagagatgatgccaagcctctgctgagactgaagggattcccttcctttcctctggtcgagagacaggccaacgaagtggactggtgggacatggtgtgtaacgtgaagaagctgatcaacgagaaaaaggaggatggcaaggtgttttggcagaatctggctggctacaagagacaggaagccctgagaccatacctgagcagcgaggaagatcggaagaagggaaagaaattcgctcggtaccagctgggcgacctgctgctgcacctggaaaagaagcacggcgaggactggggaaaggtgtacgacgaggcctgggagcggattgacaagaaagtggaaggcctgagcaagcacatcaagctggaagaggaacggagaagcgaggacgcccagagcaaggccgccctgaccgactggctgcgggctaaggccagcttcgtgatcgagggcctgaaggaggccgacaaggacgagttctgcagatgcgagctgaagctgcagaagtggtacggggacctgcggggaaagcccttcgccatcgaagccgagaacagcatcctggacatcagcggcttcagcaagcagtacaactgtgccttcatctggcagaaggacggcgtgaagaagctgaacctgtacctgatcatcaactacttcaagggcggcaagctgcggttcaagaagatcaaacctgaagccttcgaagccaacagattctacaccgtgatcaacaaaaagagcggcgagatcgtgcccatggaggtgaacttcaacttcgacgaccccaacctgatcatcctgcctctggcctttggcaagagacagggcagagaattcatctggaacgacctgctgtccctggaaaccggcagcctgaagctggccaacggaagagtgatcgagaagacactgtacaacagaagaacccggcaggatgagcctgccctgttcgtggccctgaccttcgagcggcgggaggtcctggactcctccaatatcaaaccaatgaacctgatcggcgtggcaagaggcgaaaacatccccgccgtgatcgccctgaccgaccccgagggctgcccactgagccggtttaaggatagcctgggaaacccaacccacatcctgagaatcggcgagagctataaggagaagcagcggaccatccaggccaagaaggaggtggagcagcggagagccggcggctacagccggaagtacgccagcaaagccaagaatctggcagacgatatggtgagaaacaccgctagagatctgctgtactacgccgtgacccaggatgccatgctgatcttcgccaacctgagccggggcttcggccggcagggcaagcggaccttcatggccgagagacagtacacacggatggaggactggctgaccgccaagctggcctacgagggcctgagcaagacctacctgtccaagacactggcccagtacacctccaagacatgcagcaactgtgggtttaccatcaccagcgccgactacgacagggtgctggagaagctgaagaagacagcaacaggctggatgaccacaattaacggcaaggagctgaaggtggagggccagattacctactacaacagatacaagagacagaacgtagtcaaggacctgtccgtcgagctggatagactgagcgaagaatctgtgaacaacgacatctcctcctggacaaagggcagaagcggagaagctctgagcctcctgaagaaaagattctcccatagacccgtgcaggagaagttcgtgtgcctgaactgcggcttcgagacacacgcagccgagcaagccgccctgaacatcgccagatcctggctgttcctgcggagccaggagtacaagaaataccagacaaacaagacaaccggcaacaccgataagagagccttcgtcgagacctggcagtccttttaccggaagaagcttaaggaggtgtggaaacctgccgtgcggtctggcggatctggcggaggctccacaagcttccaggagctggtgaccttcagggacgtggccatcgacttcagcggccaggagtgggagtacctggacccccaccagagggacctgtacagggacgtgatgctggagaactacaggaacctggtgagcctgggccacagcatcagcaagcccgtgctggtggacctgctggagcagggcaaggagccctggatgatcctgagggaggagacccagttccccggcaaggaggacaggggccacaccagccccaagaaaaagagaaaagtctaagctgccttctgcggggcttgccttctggccatgcccttcttctctcccttgcacctgtacctcttggtctttgaataaagcctgagtaggaaggctagcaaaaaaaaaaaaaaaaaaaaaaaaaaaaaaaaaaaaaaaaaaaaaaaaaaaaaaaaaaaaaaaaaaaaaaaaaaaaaaaa

SEQ ID NO: 3260 - RNA, 5419 nt, synthetic construct
  source 1..5419: mol_type = other RNA
aggaaataagagagaaaagaagagtaagaagaaatataagagccaccatggcccctaagaagaagcgtaaagtgagccgggtgaacggcagcggcagcggcggcggcatgaaccacgaccaggagttcgacccccctaaggtgtaccctcccgtccccgccgagaagagaaagcccatccgggtcctgagcctgttcgatggcatcgccaccggtctgctggtgctgaaggacctgggcatccaggtggataggtacattgcctccgaggtgtgcgaggactccatcaccgtgggaatggtgcgtcatcagggcaagatcatgtacgtgggcgacgtgcggagcgtgacacagaagcatatccaggagtggggccctttcgacctggtgatcggcggcagcccttgcaatgacctgagcatcgtgaacccagcccggaagggcctgtacgagggaaccggcagactgttcttcgagttttacagactgctgcacgacgcccggcctaaggaaggcgacgaccggcccttcttttggctgttcgagaatgtggtggccatgggagtcagcgacaagcgggatattagccggttcctggagagcaaccccgtgatgatcgatgccaaggaagtgagcgccgcccaccgggccagatacttctggggcaatctgcctggcatgaacagacccctggccagcaccgtgaacgacaagctggagctgcaggagtgcctggagcacggccggatcgccaagttcagcaaggtgagaaccatcaccacccgaagcaacagcatcaaacaaggcaaggaccagcactttcctgtgttcatgaacgagaaggaggacatcctgtggtgtaccgagatggagagagtgttcgggttcccagtccactacacagatgtcagcaacatgtctagactggccagacagagactgctgggaagaagctggtccgtccctgtgatcagacacctgttcgcccctctgaaggagtacttcgcctgcgtgagcagcggcaacagcaacgccaacagccggggccccagcttctctagcggcctggtgccactgtccctgagagggagccacatgggccccatggagatctacaaaaccgtgagcgcctggaagcggcagcctgtgcgcgtgctgagcctgtttcggaatatcgataaagtcctgaaaagcctgggattcctggagagcggctctggctccggcggtggcaccctgaagtacgtggaggatgtgacaaacgtggtcagacgggatgtggagaagtggggccccttcgatctggtgtacggcagcacccaacccctgggcagctcttgtgaccggtgccctggctggtacatgtttcagttccaccggatcctgcagtacgccctgccgagacaggagtcccagcggccattcttttggattttcatggacaacttgctgctgaccgaggatgaccaggaaactaccactcggttcctgcagaccgaagccgtgaccctgcaggacgtgagaggccgggactaccagaacgccatgcgggtgtggtccaacatccctggactgaaaagcaagcacgcacctctgacccctaaagaagaggagtacctgcaggcccaggtgcggagcagaagcaagctggacgcccctaaggtggatctgctggtgaagaattgcctcctgcccctgagagagtacttcaagtatttcagccagaatagtctgcccctgggcggcccaagcagcggcgcccctcctcccagcggcggcagcccagccggctccccaacctctaccgaggagggcacctctgagtccgccacccccgagagcggccctggcacctccaccgagcccagcgagggcagcgcacccggcagccctgccggcagccccacctccacagaggagggaaccagcaccgagcccagcgaaggcagcgccccaggcaccagcaccgagcctagtgagggcggctctggcggcggcagcgcccaggagattaaacggatcaacaagatcagaagaagacttgtgaaagacagcaacaccaagaaggccggcaagacaggccccatgaaaaccctgctggttagagtgatgacacccgatctgagagagcggctggaaaacctgagaaagaagcctgaaaatatcccccagcccatcagcaatacatctagagccaacctgaataagctgctgaccgattacaccgaaatgaagaaggcgatcctgcatgtgtactgggaagagttccagaaggaccctgtgggcctgatgagccgggtggcccagcctgccagcaagaagatcgatcagaacaagctgaaacctgagatggacgagaagggcaacctgaccaccgccggctttgcctgctctcagtgtggccagcccctgttcgtgtacaagctggagcaggtgtctgagaagggcaaggcttacaccaactacttcggacggtgcaatgtggccgagcacgaaaagctgatcctgctggcccagctgaagcccgagaaggatagcgacgaagccgtgacatatagcctgggaaagtttgggcagagggccctggatttctacagcattcatgtgaccaaggagtccacccaccccgtgaagcccctggcccagatcgccggaaacagatacgcctccggacctgtgggaaaggccctgagcgacgcatgtatgggcacaatcgcctccttcctgtctaagtaccaggacatcatcatcgaacaccagaaggtggtgaagggcaaccagaagagactggagagcctgcgggagctggccggcaaggaaaacctggaataccctagcgtgaccctgccacctcagcctcacaccaaggagggcgttgatgcctacaacgaagtgatcgcccgggtgcgaatgtgggtgaacctgaacctgtggcagaagctgaagctaagcagagatgatgccaagcctctgctgagactgaagggattcccttcctttcctctggtcgagagacaggccaacgaagtggactggtgggacatggtgtgtaacgtgaagaagctgatcaacgagaaaaaggaggatggcaaggtgttttggcagaatctggctggctacaagagacaggaagccctgagaccatacctgagcagcgaggaagatcggaagaagggaaagaaattcgctcggtaccagctgggcgacctgctgctgcacctggaaaagaagcacggcgaggactggggaaaggtgtacgacgaggcctgggagcggattgacaagaaagtggaaggcctgagcaagcacatcaagctggaagaggaacggagaagcgaggacgcccagagcaaggccgccctgaccgactggctgcgggctaaggccagcttcgtgatcgagggcctgaaggaggccgacaaggacgagttctgcagatgcgagctgaagctgcagaagtggtacggggacctgcggggaaagcccttcgccatcgaagccgagaacagcatcctggacatcagcggcttcagcaagcagtacaactgtgccttcatctggcagaaggacggcgtgaagaagctgaacctgtacctgatcatcaactacttcaagggcggcaagctgcggttcaagaagatcaaacctgaagccttcgaagccaacagattctacaccgtgatcaacaaaaagagcggcgagatcgtgcccatggaggtgaacttcaacttcgacgaccccaacctgatcatcctgcctctggcctttggcaagagacagggcagagaattcatctggaacgacctgctgtccctggaaaccggcagcctgaagctggccaacggaagagtgatcgagaagacactgtacaacagaagaacccggcaggatgagcctgccctgttcgtggccctgaccttcgagcggcgggaggtcctggactcctccaatatcaaaccaatgaacctgatcggcgtggcaagaggcgaaaacatccccgccgtgatcgccctgaccgaccccgagggctgcccactgagccggtttaaggatagcctgggaaacccaacccacatcctgagaatcggcgagagctataaggagaagcagcggaccatccaggccaagaaggaggtggagcagcggagagccggcggctacagccggaagtacgccagcaaagccaagaatctggcagacgatatggtgagaaacaccgctagagatctgctgtactacgccgtgacccaggatgccatgctgatcttcgccaacctgagccggggcttcggccggcagggcaagcggaccttcatggccgagagacagtacacacggatggaggactggctgaccgccaagctggcctacgagggcctgagcaagacctacctgtccaagacactggcccagtacacctccaagacatgcagcaactgtgggtttaccatcaccagcgccgactacgacagggtgctggagaagctgaagaagacagcaacaggctggatgaccacaattaacggcaaggagctgaaggtggagggccagattacctactacaacagatacaagagacagaacgtagtcaaggacctgtccgtcgagctggatagactgagcgaagaatctgtgaacaacgacatctcctcctggacaaagggcagaagcggagaagctctgagcctcctgaagaaaagattctcccatagacccgtgcaggagaagttcgtgtgcctgaactgcggcttcgagacacacgcagccgagcaagccgccctgaacatcgccagatcctggctgttcctgcggagccaggagtacaagaaataccagacaaacaagacaaccggcaacaccgataagagagccttcgtcgagacctggcagtccttttaccggaagaagcttaaggaggtgtggaaacctgccgtgcggtctggcggatctggcggaggctccacaagcctgctgaccttcgaggacgtggccgtgtacttcaccgaggaggagtgggccctgctggaccccaaccagaagatcctgtacaacgacgtgatgcaggagaactacgagaacgtgatctgcctgggcctgaagctgaagaacgacaccggcaacgaccagcccaccagcgtgagcaccctggagatccaggccagcggctgcaaggtgctgaggaaggccaggatcaaggtggcccagaagaccaccagccccaagaaaaagagaaaagtctaagctgccttctgcggggcttgccttctggccatgcccttcttctctcccttgcacctgtacctcttggtctttgaataaagcctgagtaggaaggctagcaaaaaaaaaaaaaaaaaaaaaaaaaaaaaaaaaaaaaaaaaaaaaaaaaaaaaaaaaaaaaaaaaaaaaaaaaaaaaaaa

SEQ ID NO: 3261 - RNA, 5419 nt, synthetic construct
  source 1..5419: mol_type = other RNA
aggaaataagagagaaaagaagagtaagaagaaatataagagccaccatggcccctaagaagaagcgtaaagtgagccgggtgaacggcagcggcagcggcggcggcatgaaccacgaccaggagttcgacccccctaaggtgtaccctcccgtccccgccgagaagagaaagcccatccgggtcctgagcctgttcgatggcatcgccaccggtctgctggtgctgaaggacctgggcatccaggtggataggtacattgcctccgaggtgtgcgaggactccatcaccgtgggaatggtgcgtcatcagggcaagatcatgtacgtgggcgacgtgcggagcgtgacacagaagcatatccaggagtggggccctttcgacctggtgatcggcggcagcccttgcaatgacctgagcatcgtgaacccagcccggaagggcctgtacgagggaaccggcagactgttcttcgagttttacagactgctgcacgacgcccggcctaaggaaggcgacgaccggcccttcttttggctgttcgagaatgtggtggccatgggagtcagcgacaagcgggatattagccggttcctggagagcaaccccgtgatgatcgatgccaaggaagtgagcgccgcccaccgggccagatacttctggggcaatctgcctggcatgaacagacccctggccagcaccgtgaacgacaagctggagctgcaggagtgcctggagcacggccggatcgccaagttcagcaaggtgagaaccatcaccacccgaagcaacagcatcaaacaaggcaaggaccagcactttcctgtgttcatgaacgagaaggaggacatcctgtggtgtaccgagatggagagagtgttcgggttcccagtccactacacagatgtcagcaacatgtctagactggccagacagagactgctgggaagaagctggtccgtccctgtgatcagacacctgttcgcccctctgaaggagtacttcgcctgcgtgagcagcggcaacagcaacgccaacagccggggccccagcttctctagcggcctggtgccactgtccctgagagggagccacatgggccccatggagatctacaaaaccgtgagcgcctggaagcggcagcctgtgcgcgtgctgagcctgtttcggaatatcgataaagtcctgaaaagcctgggattcctggagagcggctctggctccggcggtggcaccctgaagtacgtggaggatgtgacaaacgtggtcagacgggatgtggagaagtggggccccttcgatctggtgtacggcagcacccaacccctgggcagctcttgtgaccggtgccctggctggtacatgtttcagttccaccggatcctgcagtacgccctgccgagacaggagtcccagcggccattcttttggattttcatggacaacttgctgctgaccgaggatgaccaggaaactaccactcggttcctgcagaccgaagccgtgaccctgcaggacgtgagaggccgggactaccagaacgccatgcgggtgtggtccaacatccctggactgaaaagcaagcacgcacctctgacccctaaagaagaggagtacctgcaggcccaggtgcggagcagaagcaagctggacgcccctaaggtggatctgctggtgaagaattgcctcctgcccctgagagagtacttcaagtatttcagccagaatagtctgcccctgggcggcccaagcagcggcgcccctcctcccagcggcggcagcccagccggctccccaacctctaccgaggagggcacctctgagtccgccacccccgagagcggccctggcacctccaccgagcccagcgagggcagcgcacccggcagccctgccggcagccccacctccacagaggagggaaccagcaccgagcccagcgaaggcagcgccccaggcaccagcaccgagcctagtgagggcggctctggcggcggcagcgcccaggagattaaacggatcaacaagatcagaagaagacttgtgaaagacagcaacaccaagaaggccggcaagacaggccccatgaaaaccctgctggttagagtgatgacacccgatctgagagagcggctggaaaacctgagaaagaagcctgaaaatatcccccagcccatcagcaatacatctagagccaacctgaataagctgctgaccgattacaccgaaatgaagaaggcgatcctgcatgtgtactgggaagagttccagaaggaccctgtgggcctgatgagccgggtggcccagcctgccagcaagaagatcgatcagaacaagctgaaacctgagatggacgagaagggcaacctgaccaccgccggctttgcctgctctcagtgtggccagcccctgttcgtgtacaagctggagcaggtgtctgagaagggcaaggcttacaccaactacttcggacggtgcaatgtggccgagcacgaaaagctgatcctgctggcccagctgaagcccgagaaggatagcgacgaagccgtgacatatagcctgggaaagtttgggcagagggccctggatttctacagcattcatgtgaccaaggagtccacccaccccgtgaagcccctggcccagatcgccggaaacagatacgcctccggacctgtgggaaaggccctgagcgacgcatgtatgggcacaatcgcctccttcctgtctaagtaccaggacatcatcatcgaacaccagaaggtggtgaagggcaaccagaagagactggagagcctgcgggagctggccggcaaggaaaacctggaataccctagcgtgaccctgccacctcagcctcacaccaaggagggcgttgatgcctacaacgaagtgatcgcccgggtgcgaatgtgggtgaacctgaacctgtggcagaagctgaagctaagcagagatgatgccaagcctctgctgagactgaagggattcccttcctttcctctggtcgagagacaggccaacgaagtggactggtgggacatggtgtgtaacgtgaagaagctgatcaacgagaaaaaggaggatggcaaggtgttttggcagaatctggctggctacaagagacaggaagccctgagaccatacctgagcagcgaggaagatcggaagaagggaaagaaattcgctcggtaccagctgggcgacctgctgctgcacctggaaaagaagcacggcgaggactggggaaaggtgtacgacgaggcctgggagcggattgacaagaaagtggaaggcctgagcaagcacatcaagctggaagaggaacggagaagcgaggacgcccagagcaaggccgccctgaccgactggctgcgggctaaggccagcttcgtgatcgagggcctgaaggaggccgacaaggacgagttctgcagatgcgagctgaagctgcagaagtggtacggggacctgcggggaaagcccttcgccatcgaagccgagaacagcatcctggacatcagcggcttcagcaagcagtacaactgtgccttcatctggcagaaggacggcgtgaagaagctgaacctgtacctgatcatcaactacttcaagggcggcaagctgcggttcaagaagatcaaacctgaagccttcgaagccaacagattctacaccgtgatcaacaaaaagagcggcgagatcgtgcccatggaggtgaacttcaacttcgacgaccccaacctgatcatcctgcctctggcctttggcaagagacagggcagagaattcatctggaacgacctgctgtccctggaaaccggcagcctgaagctggccaacggaagagtgatcgagaagacactgtacaacagaagaacccggcaggatgagcctgccctgttcgtggccctgaccttcgagcggcgggaggtcctggactcctccaatatcaaaccaatgaacctgatcggcgtggcaagaggcgaaaacatccccgccgtgatcgccctgaccgaccccgagggctgcccactgagccggtttaaggatagcctgggaaacccaacccacatcctgagaatcggcgagagctataaggagaagcagcggaccatccaggccaagaaggaggtggagcagcggagagccggcggctacagccggaagtacgccagcaaagccaagaatctggcagacgatatggtgagaaacaccgctagagatctgctgtactacgccgtgacccaggatgccatgctgatcttcgccaacctgagccggggcttcggccggcagggcaagcggaccttcatggccgagagacagtacacacggatggaggactggctgaccgccaagctggcctacgagggcctgagcaagacctacctgtccaagacactggcccagtacacctccaagacatgcagcaactgtgggtttaccatcaccagcgccgactacgacagggtgctggagaagctgaagaagacagcaacaggctggatgaccacaattaacggcaaggagctgaaggtggagggccagattacctactacaacagatacaagagacagaacgtagtcaaggacctgtccgtcgagctggatagactgagcgaagaatctgtgaacaacgacatctcctcctggacaaagggcagaagcggagaagctctgagcctcctgaagaaaagattctcccatagacccgtgcaggagaagttcgtgtgcctgaactgcggcttcgagacacacgcagccgagcaagccgccctgaacatcgccagatcctggctgttcctgcggagccaggagtacaagaaataccagacaaacaagacaaccggcaacaccgataagagagccttcgtcgagacctggcagtccttttaccggaagaagcttaaggaggtgtggaaacctgccgtgcggtctggcggatctggcggaggctccacaagcagccagggcctggtgaccttcagggacgtggccctggacttcagccaggaggagtgggagtggctggaccagagccagaaggacctgtacagggacgtgatgctggagaactacaggaacctggtgtggctgggcctgagcatcagcaagcccaacatgatcagcctgctggagcagggcaaggagccctggatggtggagaaggagatgagcgacggccagtgcgccgactgggacagctggaccagccccaagaaaaagagaaaagtctaagctgccttctgcggggcttgccttctggccatgcccttcttctctcccttgcacctgtacctcttggtctttgaataaagcctgagtaggaaggctagcaaaaaaaaaaaaaaaaaaaaaaaaaaaaaaaaaaaaaaaaaaaaaaaaaaaaaaaaaaaaaaaaaaaaaaaaaaaaaaaa

SEQ ID NO: 3262 - RNA, 5419 nt, synthetic construct
  source 1..5419: mol_type = other RNA
aggaaataagagagaaaagaagagtaagaagaaatataagagccaccatggcccctaagaagaagcgtaaagtgagccgggtgaacggcagcggcagcggcggcggcatgaaccacgaccaggagttcgacccccctaaggtgtaccctcccgtccccgccgagaagagaaagcccatccgggtcctgagcctgttcgatggcatcgccaccggtctgctggtgctgaaggacctgggcatccaggtggataggtacattgcctccgaggtgtgcgaggactccatcaccgtgggaatggtgcgtcatcagggcaagatcatgtacgtgggcgacgtgcggagcgtgacacagaagcatatccaggagtggggccctttcgacctggtgatcggcggcagcccttgcaatgacctgagcatcgtgaacccagcccggaagggcctgtacgagggaaccggcagactgttcttcgagttttacagactgctgcacgacgcccggcctaaggaaggcgacgaccggcccttcttttggctgttcgagaatgtggtggccatgggagtcagcgacaagcgggatattagccggttcctggagagcaaccccgtgatgatcgatgccaaggaagtgagcgccgcccaccgggccagatacttctggggcaatctgcctggcatgaacagacccctggccagcaccgtgaacgacaagctggagctgcaggagtgcctggagcacggccggatcgccaagttcagcaaggtgagaaccatcaccacccgaagcaacagcatcaaacaaggcaaggaccagcactttcctgtgttcatgaacgagaaggaggacatcctgtggtgtaccgagatggagagagtgttcgggttcccagtccactacacagatgtcagcaacatgtctagactggccagacagagactgctgggaagaagctggtccgtccctgtgatcagacacctgttcgcccctctgaaggagtacttcgcctgcgtgagcagcggcaacagcaacgccaacagccggggccccagcttctctagcggcctggtgccactgtccctgagagggagccacatgggccccatggagatctacaaaaccgtgagcgcctggaagcggcagcctgtgcgcgtgctgagcctgtttcggaatatcgataaagtcctgaaaagcctgggattcctggagagcggctctggctccggcggtggcaccctgaagtacgtggaggatgtgacaaacgtggtcagacgggatgtggagaagtggggccccttcgatctggtgtacggcagcacccaacccctgggcagctcttgtgaccggtgccctggctggtacatgtttcagttccaccggatcctgcagtacgccctgccgagacaggagtcccagcggccattcttttggattttcatggacaacttgctgctgaccgaggatgaccaggaaactaccactcggttcctgcagaccgaagccgtgaccctgcaggacgtgagaggccgggactaccagaacgccatgcgggtgtggtccaacatccctggactgaaaagcaagcacgcacctctgacccctaaagaagaggagtacctgcaggcccaggtgcggagcagaagcaagctggacgcccctaaggtggatctgctggtgaagaattgcctcctgcccctgagagagtacttcaagtatttcagccagaatagtctgcccctgggcggcccaagcagcggcgcccctcctcccagcggcggcagcccagccggctccccaacctctaccgaggagggcacctctgagtccgccacccccgagagcggccctggcacctccaccgagcccagcgagggcagcgcacccggcagccctgccggcagccccacctccacagaggagggaaccagcaccgagcccagcgaaggcagcgccccaggcaccagcaccgagcctagtgagggcggctctggcggcggcagcgcccaggagattaaacggatcaacaagatcagaagaagacttgtgaaagacagcaacaccaagaaggccggcaagacaggccccatgaaaaccctgctggttagagtgatgacacccgatctgagagagcggctggaaaacctgagaaagaagcctgaaaatatcccccagcccatcagcaatacatctagagccaacctgaataagctgctgaccgattacaccgaaatgaagaaggcgatcctgcatgtgtactgggaagagttccagaaggaccctgtgggcctgatgagccgggtggcccagcctgccagcaagaagatcgatcagaacaagctgaaacctgagatggacgagaagggcaacctgaccaccgccggctttgcctgctctcagtgtggccagcccctgttcgtgtacaagctggagcaggtgtctgagaagggcaaggcttacaccaactacttcggacggtgcaatgtggccgagcacgaaaagctgatcctgctggcccagctgaagcccgagaaggatagcgacgaagccgtgacatatagcctgggaaagtttgggcagagggccctggatttctacagcattcatgtgaccaaggagtccacccaccccgtgaagcccctggcccagatcgccggaaacagatacgcctccggacctgtgggaaaggccctgagcgacgcatgtatgggcacaatcgcctccttcctgtctaagtaccaggacatcatcatcgaacaccagaaggtggtgaagggcaaccagaagagactggagagcctgcgggagctggccggcaaggaaaacctggaataccctagcgtgaccctgccacctcagcctcacaccaaggagggcgttgatgcctacaacgaagtgatcgcccgggtgcgaatgtgggtgaacctgaacctgtggcagaagctgaagctaagcagagatgatgccaagcctctgctgagactgaagggattcccttcctttcctctggtcgagagacaggccaacgaagtggactggtgggacatggtgtgtaacgtgaagaagctgatcaacgagaaaaaggaggatggcaaggtgttttggcagaatctggctggctacaagagacaggaagccctgagaccatacctgagcagcgaggaagatcggaagaagggaaagaaattcgctcggtaccagctgggcgacctgctgctgcacctggaaaagaagcacggcgaggactggggaaaggtgtacgacgaggcctgggagcggattgacaagaaagtggaaggcctgagcaagcacatcaagctggaagaggaacggagaagcgaggacgcccagagcaaggccgccctgaccgactggctgcgggctaaggccagcttcgtgatcgagggcctgaaggaggccgacaaggacgagttctgcagatgcgagctgaagctgcagaagtggtacggggacctgcggggaaagcccttcgccatcgaagccgagaacagcatcctggacatcagcggcttcagcaagcagtacaactgtgccttcatctggcagaaggacggcgtgaagaagctgaacctgtacctgatcatcaactacttcaagggcggcaagctgcggttcaagaagatcaaacctgaagccttcgaagccaacagattctacaccgtgatcaacaaaaagagcggcgagatcgtgcccatggaggtgaacttcaacttcgacgaccccaacctgatcatcctgcctctggcctttggcaagagacagggcagagaattcatctggaacgacctgctgtccctggaaaccggcagcctgaagctggccaacggaagagtgatcgagaagacactgtacaacagaagaacccggcaggatgagcctgccctgttcgtggccctgaccttcgagcggcgggaggtcctggactcctccaatatcaaaccaatgaacctgatcggcgtggcaagaggcgaaaacatccccgccgtgatcgccctgaccgaccccgagggctgcccactgagccggtttaaggatagcctgggaaacccaacccacatcctgagaatcggcgagagctataaggagaagcagcggaccatccaggccaagaaggaggtggagcagcggagagccggcggctacagccggaagtacgccagcaaagccaagaatctggcagacgatatggtgagaaacaccgctagagatctgctgtactacgccgtgacccaggatgccatgctgatcttcgccaacctgagccggggcttcggccggcagggcaagcggaccttcatggccgagagacagtacacacggatggaggactggctgaccgccaagctggcctacgagggcctgagcaagacctacctgtccaagacactggcccagtacacctccaagacatgcagcaactgtgggtttaccatcaccagcgccgactacgacagggtgctggagaagctgaagaagacagcaacaggctggatgaccacaattaacggcaaggagctgaaggtggagggccagattacctactacaacagatacaagagacagaacgtagtcaaggacctgtccgtcgagctggatagactgagcgaagaatctgtgaacaacgacatctcctcctggacaaagggcagaagcggagaagctctgagcctcctgaagaaaagattctcccatagacccgtgcaggagaagttcgtgtgcctgaactgcggcttcgagacacacgcagccgagcaagccgccctgaacatcgccagatcctggctgttcctgcggagccaggagtacaagaaataccagacaaacaagacaaccggcaacaccgataagagagccttcgtcgagacctggcagtccttttaccggaagaagcttaaggaggtgtggaaacctgccgtgcggtctggcggatctggcggaggctccacaagccaggccgaggtgaccttcgaggacgtggccgtgttcctgagccaggaggagtggggcctgctgggccccgcccagaagggcctgtacagggaggtgatgctggagacctacaggaacctggtgagcctgggcgccggcctggccggccccaagcccgaggtgatcgtgcacctggagaggggcgacgagctgtgggtgctggacatgaggggcgccgagcagcccagcgtggacggcagcgccaccagccccaagaaaaagagaaaagtctaagctgccttctgcggggcttgccttctggccatgcccttcttctctcccttgcacctgtacctcttggtctttgaataaagcctgagtaggaaggctagcaaaaaaaaaaaaaaaaaaaaaaaaaaaaaaaaaaaaaaaaaaaaaaaaaaaaaaaaaaaaaaaaaaaaaaaaaaaaaaaa

SEQ ID NO: 3263 - RNA, 5419 nt, synthetic construct
  source 1..5419: mol_type = other RNA
aggaaataagagagaaaagaagagtaagaagaaatataagagccaccatggcccctaagaagaagcgtaaagtgagccgggtgaacggcagcggcagcggcggcggcatgaaccacgaccaggagttcgacccccctaaggtgtaccctcccgtccccgccgagaagagaaagcccatccgggtcctgagcctgttcgatggcatcgccaccggtctgctggtgctgaaggacctgggcatccaggtggataggtacattgcctccgaggtgtgcgaggactccatcaccgtgggaatggtgcgtcatcagggcaagatcatgtacgtgggcgacgtgcggagcgtgacacagaagcatatccaggagtggggccctttcgacctggtgatcggcggcagcccttgcaatgacctgagcatcgtgaacccagcccggaagggcctgtacgagggaaccggcagactgttcttcgagttttacagactgctgcacgacgcccggcctaaggaaggcgacgaccggcccttcttttggctgttcgagaatgtggtggccatgggagtcagcgacaagcgggatattagccggttcctggagagcaaccccgtgatgatcgatgccaaggaagtgagcgccgcccaccgggccagatacttctggggcaatctgcctggcatgaacagacccctggccagcaccgtgaacgacaagctggagctgcaggagtgcctggagcacggccggatcgccaagttcagcaaggtgagaaccatcaccacccgaagcaacagcatcaaacaaggcaaggaccagcactttcctgtgttcatgaacgagaaggaggacatcctgtggtgtaccgagatggagagagtgttcgggttcccagtccactacacagatgtcagcaacatgtctagactggccagacagagactgctgggaagaagctggtccgtccctgtgatcagacacctgttcgcccctctgaaggagtacttcgcctgcgtgagcagcggcaacagcaacgccaacagccggggccccagcttctctagcggcctggtgccactgtccctgagagggagccacatgggccccatggagatctacaaaaccgtgagcgcctggaagcggcagcctgtgcgcgtgctgagcctgtttcggaatatcgataaagtcctgaaaagcctgggattcctggagagcggctctggctccggcggtggcaccctgaagtacgtggaggatgtgacaaacgtggtcagacgggatgtggagaagtggggccccttcgatctggtgtacggcagcacccaacccctgggcagctcttgtgaccggtgccctggctggtacatgtttcagttccaccggatcctgcagtacgccctgccgagacaggagtcccagcggccattcttttggattttcatggacaacttgctgctgaccgaggatgaccaggaaactaccactcggttcctgcagaccgaagccgtgaccctgcaggacgtgagaggccgggactaccagaacgccatgcgggtgtggtccaacatccctggactgaaaagcaagcacgcacctctgacccctaaagaagaggagtacctgcaggcccaggtgcggagcagaagcaagctggacgcccctaaggtggatctgctggtgaagaattgcctcctgcccctgagagagtacttcaagtatttcagccagaatagtctgcccctgggcggcccaagcagcggcgcccctcctcccagcggcggcagcccagccggctccccaacctctaccgaggagggcacctctgagtccgccacccccgagagcggccctggcacctccaccgagcccagcgagggcagcgcacccggcagccctgccggcagccccacctccacagaggagggaaccagcaccgagcccagcgaaggcagcgccccaggcaccagcaccgagcctagtgagggcggctctggcggcggcagcgcccaggagattaaacggatcaacaagatcagaagaagacttgtgaaagacagcaacaccaagaaggccggcaagacaggccccatgaaaaccctgctggttagagtgatgacacccgatctgagagagcggctggaaaacctgagaaagaagcctgaaaatatcccccagcccatcagcaatacatctagagccaacctgaataagctgctgaccgattacaccgaaatgaagaaggcgatcctgcatgtgtactgggaagagttccagaaggaccctgtgggcctgatgagccgggtggcccagcctgccagcaagaagatcgatcagaacaagctgaaacctgagatggacgagaagggcaacctgaccaccgccggctttgcctgctctcagtgtggccagcccctgttcgtgtacaagctggagcaggtgtctgagaagggcaaggcttacaccaactacttcggacggtgcaatgtggccgagcacgaaaagctgatcctgctggcccagctgaagcccgagaaggatagcgacgaagccgtgacatatagcctgggaaagtttgggcagagggccctggatttctacagcattcatgtgaccaaggagtccacccaccccgtgaagcccctggcccagatcgccggaaacagatacgcctccggacctgtgggaaaggccctgagcgacgcatgtatgggcacaatcgcctccttcctgtctaagtaccaggacatcatcatcgaacaccagaaggtggtgaagggcaaccagaagagactggagagcctgcgggagctggccggcaaggaaaacctggaataccctagcgtgaccctgccacctcagcctcacaccaaggagggcgttgatgcctacaacgaagtgatcgcccgggtgcgaatgtgggtgaacctgaacctgtggcagaagctgaagctaagcagagatgatgccaagcctctgctgagactgaagggattcccttcctttcctctggtcgagagacaggccaacgaagtggactggtgggacatggtgtgtaacgtgaagaagctgatcaacgagaaaaaggaggatggcaaggtgttttggcagaatctggctggctacaagagacaggaagccctgagaccatacctgagcagcgaggaagatcggaagaagggaaagaaattcgctcggtaccagctgggcgacctgctgctgcacctggaaaagaagcacggcgaggactggggaaaggtgtacgacgaggcctgggagcggattgacaagaaagtggaaggcctgagcaagcacatcaagctggaagaggaacggagaagcgaggacgcccagagcaaggccgccctgaccgactggctgcgggctaaggccagcttcgtgatcgagggcctgaaggaggccgacaaggacgagttctgcagatgcgagctgaagctgcagaagtggtacggggacctgcggggaaagcccttcgccatcgaagccgagaacagcatcctggacatcagcggcttcagcaagcagtacaactgtgccttcatctggcagaaggacggcgtgaagaagctgaacctgtacctgatcatcaactacttcaagggcggcaagctgcggttcaagaagatcaaacctgaagccttcgaagccaacagattctacaccgtgatcaacaaaaagagcggcgagatcgtgcccatggaggtgaacttcaacttcgacgaccccaacctgatcatcctgcctctggcctttggcaagagacagggcagagaattcatctggaacgacctgctgtccctggaaaccggcagcctgaagctggccaacggaagagtgatcgagaagacactgtacaacagaagaacccggcaggatgagcctgccctgttcgtggccctgaccttcgagcggcgggaggtcctggactcctccaatatcaaaccaatgaacctgatcggcgtggcaagaggcgaaaacatccccgccgtgatcgccctgaccgaccccgagggctgcccactgagccggtttaaggatagcctgggaaacccaacccacatcctgagaatcggcgagagctataaggagaagcagcggaccatccaggccaagaaggaggtggagcagcggagagccggcggctacagccggaagtacgccagcaaagccaagaatctggcagacgatatggtgagaaacaccgctagagatctgctgtactacgccgtgacccaggatgccatgctgatcttcgccaacctgagccggggcttcggccggcagggcaagcggaccttcatggccgagagacagtacacacggatggaggactggctgaccgccaagctggcctacgagggcctgagcaagacctacctgtccaagacactggcccagtacacctccaagacatgcagcaactgtgggtttaccatcaccagcgccgactacgacagggtgctggagaagctgaagaagacagcaacaggctggatgaccacaattaacggcaaggagctgaaggtggagggccagattacctactacaacagatacaagagacagaacgtagtcaaggacctgtccgtcgagctggatagactgagcgaagaatctgtgaacaacgacatctcctcctggacaaagggcagaagcggagaagctctgagcctcctgaagaaaagattctcccatagacccgtgcaggagaagttcgtgtgcctgaactgcggcttcgagacacacgcagccgagcaagccgccctgaacatcgccagatcctggctgttcctgcggagccaggagtacaagaaataccagacaaacaagacaaccggcaacaccgataagagagccttcgtcgagacctggcagtccttttaccggaagaagcttaaggaggtgtggaaacctgccgtgcggtctggcggatctggcggaggctccacaagcatgacccccggcccccccggcagcctggagatggagcccctgaccttcaaggacgtggccatcgagttctgcctggaggagtggcagtgcctggacaccgcccagcaggacctgtacaggaacgtgatgctggagaactacaggaacctggtgttcctgggcatcgccgtgagcaagcccgacctgatcacctgcctggagcagggcaaggtgccctggaacaggaagaggcacgagatggtgaccagccccaagaaaaagagaaaagtctaagctgccttctgcggggcttgccttctggccatgcccttcttctctcccttgcacctgtacctcttggtctttgaataaagcctgagtaggaaggctagcaaaaaaaaaaaaaaaaaaaaaaaaaaaaaaaaaaaaaaaaaaaaaaaaaaaaaaaaaaaaaaaaaaaaaaaaaaaaaaaa

SEQ ID NO: 3264 - RNA, 5419 nt, synthetic construct
  source 1..5419: mol_type = other RNA
aggaaataagagagaaaagaagagtaagaagaaatataagagccaccatggcccctaagaagaagcgtaaagtgagccgggtgaacggcagcggcagcggcggcggcatgaaccacgaccaggagttcgacccccctaaggtgtaccctcccgtccccgccgagaagagaaagcccatccgggtcctgagcctgttcgatggcatcgccaccggtctgctggtgctgaaggacctgggcatccaggtggataggtacattgcctccgaggtgtgcgaggactccatcaccgtgggaatggtgcgtcatcagggcaagatcatgtacgtgggcgacgtgcggagcgtgacacagaagcatatccaggagtggggccctttcgacctggtgatcggcggcagcccttgcaatgacctgagcatcgtgaacccagcccggaagggcctgtacgagggaaccggcagactgttcttcgagttttacagactgctgcacgacgcccggcctaaggaaggcgacgaccggcccttcttttggctgttcgagaatgtggtggccatgggagtcagcgacaagcgggatattagccggttcctggagagcaaccccgtgatgatcgatgccaaggaagtgagcgccgcccaccgggccagatacttctggggcaatctgcctggcatgaacagacccctggccagcaccgtgaacgacaagctggagctgcaggagtgcctggagcacggccggatcgccaagttcagcaaggtgagaaccatcaccacccgaagcaacagcatcaaacaaggcaaggaccagcactttcctgtgttcatgaacgagaaggaggacatcctgtggtgtaccgagatggagagagtgttcgggttcccagtccactacacagatgtcagcaacatgtctagactggccagacagagactgctgggaagaagctggtccgtccctgtgatcagacacctgttcgcccctctgaaggagtacttcgcctgcgtgagcagcggcaacagcaacgccaacagccggggccccagcttctctagcggcctggtgccactgtccctgagagggagccacatgggccccatggagatctacaaaaccgtgagcgcctggaagcggcagcctgtgcgcgtgctgagcctgtttcggaatatcgataaagtcctgaaaagcctgggattcctggagagcggctctggctccggcggtggcaccctgaagtacgtggaggatgtgacaaacgtggtcagacgggatgtggagaagtggggccccttcgatctggtgtacggcagcacccaacccctgggcagctcttgtgaccggtgccctggctggtacatgtttcagttccaccggatcctgcagtacgccctgccgagacaggagtcccagcggccattcttttggattttcatggacaacttgctgctgaccgaggatgaccaggaaactaccactcggttcctgcagaccgaagccgtgaccctgcaggacgtgagaggccgggactaccagaacgccatgcgggtgtggtccaacatccctggactgaaaagcaagcacgcacctctgacccctaaagaagaggagtacctgcaggcccaggtgcggagcagaagcaagctggacgcccctaaggtggatctgctggtgaagaattgcctcctgcccctgagagagtacttcaagtatttcagccagaatagtctgcccctgggcggcccaagcagcggcgcccctcctcccagcggcggcagcccagccggctccccaacctctaccgaggagggcacctctgagtccgccacccccgagagcggccctggcacctccaccgagcccagcgagggcagcgcacccggcagccctgccggcagccccacctccacagaggagggaaccagcaccgagcccagcgaaggcagcgccccaggcaccagcaccgagcctagtgagggcggctctggcggcggcagcgcccaggagattaaacggatcaacaagatcagaagaagacttgtgaaagacagcaacaccaagaaggccggcaagacaggccccatgaaaaccctgctggttagagtgatgacacccgatctgagagagcggctggaaaacctgagaaagaagcctgaaaatatcccccagcccatcagcaatacatctagagccaacctgaataagctgctgaccgattacaccgaaatgaagaaggcgatcctgcatgtgtactgggaagagttccagaaggaccctgtgggcctgatgagccgggtggcccagcctgccagcaagaagatcgatcagaacaagctgaaacctgagatggacgagaagggcaacctgaccaccgccggctttgcctgctctcagtgtggccagcccctgttcgtgtacaagctggagcaggtgtctgagaagggcaaggcttacaccaactacttcggacggtgcaatgtggccgagcacgaaaagctgatcctgctggcccagctgaagcccgagaaggatagcgacgaagccgtgacatatagcctgggaaagtttgggcagagggccctggatttctacagcattcatgtgaccaaggagtccacccaccccgtgaagcccctggcccagatcgccggaaacagatacgcctccggacctgtgggaaaggccctgagcgacgcatgtatgggcacaatcgcctccttcctgtctaagtaccaggacatcatcatcgaacaccagaaggtggtgaagggcaaccagaagagactggagagcctgcgggagctggccggcaaggaaaacctggaataccctagcgtgaccctgccacctcagcctcacaccaaggagggcgttgatgcctacaacgaagtgatcgcccgggtgcgaatgtgggtgaacctgaacctgtggcagaagctgaagctaagcagagatgatgccaagcctctgctgagactgaagggattcccttcctttcctctggtcgagagacaggccaacgaagtggactggtgggacatggtgtgtaacgtgaagaagctgatcaacgagaaaaaggaggatggcaaggtgttttggcagaatctggctggctacaagagacaggaagccctgagaccatacctgagcagcgaggaagatcggaagaagggaaagaaattcgctcggtaccagctgggcgacctgctgctgcacctggaaaagaagcacggcgaggactggggaaaggtgtacgacgaggcctgggagcggattgacaagaaagtggaaggcctgagcaagcacatcaagctggaagaggaacggagaagcgaggacgcccagagcaaggccgccctgaccgactggctgcgggctaaggccagcttcgtgatcgagggcctgaaggaggccgacaaggacgagttctgcagatgcgagctgaagctgcagaagtggtacggggacctgcggggaaagcccttcgccatcgaagccgagaacagcatcctggacatcagcggcttcagcaagcagtacaactgtgccttcatctggcagaaggacggcgtgaagaagctgaacctgtacctgatcatcaactacttcaagggcggcaagctgcggttcaagaagatcaaacctgaagccttcgaagccaacagattctacaccgtgatcaacaaaaagagcggcgagatcgtgcccatggaggtgaacttcaacttcgacgaccccaacctgatcatcctgcctctggcctttggcaagagacagggcagagaattcatctggaacgacctgctgtccctggaaaccggcagcctgaagctggccaacggaagagtgatcgagaagacactgtacaacagaagaacccggcaggatgagcctgccctgttcgtggccctgaccttcgagcggcgggaggtcctggactcctccaatatcaaaccaatgaacctgatcggcgtggcaagaggcgaaaacatccccgccgtgatcgccctgaccgaccccgagggctgcccactgagccggtttaaggatagcctgggaaacccaacccacatcctgagaatcggcgagagctataaggagaagcagcggaccatccaggccaagaaggaggtggagcagcggagagccggcggctacagccggaagtacgccagcaaagccaagaatctggcagacgatatggtgagaaacaccgctagagatctgctgtactacgccgtgacccaggatgccatgctgatcttcgccaacctgagccggggcttcggccggcagggcaagcggaccttcatggccgagagacagtacacacggatggaggactggctgaccgccaagctggcctacgagggcctgagcaagacctacctgtccaagacactggcccagtacacctccaagacatgcagcaactgtgggtttaccatcaccagcgccgactacgacagggtgctggagaagctgaagaagacagcaacaggctggatgaccacaattaacggcaaggagctgaaggtggagggccagattacctactacaacagatacaagagacagaacgtagtcaaggacctgtccgtcgagctggatagactgagcgaagaatctgtgaacaacgacatctcctcctggacaaagggcagaagcggagaagctctgagcctcctgaagaaaagattctcccatagacccgtgcaggagaagttcgtgtgcctgaactgcggcttcgagacacacgcagccgagcaagccgccctgaacatcgccagatcctggctgttcctgcggagccaggagtacaagaaataccagacaaacaagacaaccggcaacaccgataagagagccttcgtcgagacctggcagtccttttaccggaagaagcttaaggaggtgtggaaacctgccgtgcggtctggcggatctggcggaggctccacaagcatggagctgctgaccttcagggacgtggccatcgagttcagccccgaggagtggaagtgcctggaccccgaccagcagaacctgtacagggacgtgatgctggagaactacaggaacctggtgagcctgggcgtggccatcagcaaccccgacctggtgacctgcctggagcagaggaaggagccctacaacgtgaagatccacaagatcgtggccaggccccccgccgtgtgcagccacagcaccagccccaagaaaaagagaaaagtctaagctgccttctgcggggcttgccttctggccatgcccttcttctctcccttgcacctgtacctcttggtctttgaataaagcctgagtaggaaggctagcaaaaaaaaaaaaaaaaaaaaaaaaaaaaaaaaaaaaaaaaaaaaaaaaaaaaaaaaaaaaaaaaaaaaaaaaaaaaaaaa

SEQ ID NO: 3265 - RNA, 5419 nt, synthetic construct
  source 1..5419: mol_type = other RNA
aggaaataagagagaaaagaagagtaagaagaaatataagagccaccatggcccctaagaagaagcgtaaagtgagccgggtgaacggcagcggcagcggcggcggcatgaaccacgaccaggagttcgacccccctaaggtgtaccctcccgtccccgccgagaagagaaagcccatccgggtcctgagcctgttcgatggcatcgccaccggtctgctggtgctgaaggacctgggcatccaggtggataggtacattgcctccgaggtgtgcgaggactccatcaccgtgggaatggtgcgtcatcagggcaagatcatgtacgtgggcgacgtgcggagcgtgacacagaagcatatccaggagtggggccctttcgacctggtgatcggcggcagcccttgcaatgacctgagcatcgtgaacccagcccggaagggcctgtacgagggaaccggcagactgttcttcgagttttacagactgctgcacgacgcccggcctaaggaaggcgacgaccggcccttcttttggctgttcgagaatgtggtggccatgggagtcagcgacaagcgggatattagccggttcctggagagcaaccccgtgatgatcgatgccaaggaagtgagcgccgcccaccgggccagatacttctggggcaatctgcctggcatgaacagacccctggccagcaccgtgaacgacaagctggagctgcaggagtgcctggagcacggccggatcgccaagttcagcaaggtgagaaccatcaccacccgaagcaacagcatcaaacaaggcaaggaccagcactttcctgtgttcatgaacgagaaggaggacatcctgtggtgtaccgagatggagagagtgttcgggttcccagtccactacacagatgtcagcaacatgtctagactggccagacagagactgctgggaagaagctggtccgtccctgtgatcagacacctgttcgcccctctgaaggagtacttcgcctgcgtgagcagcggcaacagcaacgccaacagccggggccccagcttctctagcggcctggtgccactgtccctgagagggagccacatgggccccatggagatctacaaaaccgtgagcgcctggaagcggcagcctgtgcgcgtgctgagcctgtttcggaatatcgataaagtcctgaaaagcctgggattcctggagagcggctctggctccggcggtggcaccctgaagtacgtggaggatgtgacaaacgtggtcagacgggatgtggagaagtggggccccttcgatctggtgtacggcagcacccaacccctgggcagctcttgtgaccggtgccctggctggtacatgtttcagttccaccggatcctgcagtacgccctgccgagacaggagtcccagcggccattcttttggattttcatggacaacttgctgctgaccgaggatgaccaggaaactaccactcggttcctgcagaccgaagccgtgaccctgcaggacgtgagaggccgggactaccagaacgccatgcgggtgtggtccaacatccctggactgaaaagcaagcacgcacctctgacccctaaagaagaggagtacctgcaggcccaggtgcggagcagaagcaagctggacgcccctaaggtggatctgctggtgaagaattgcctcctgcccctgagagagtacttcaagtatttcagccagaatagtctgcccctgggcggcccaagcagcggcgcccctcctcccagcggcggcagcccagccggctccccaacctctaccgaggagggcacctctgagtccgccacccccgagagcggccctggcacctccaccgagcccagcgagggcagcgcacccggcagccctgccggcagccccacctccacagaggagggaaccagcaccgagcccagcgaaggcagcgccccaggcaccagcaccgagcctagtgagggcggctctggcggcggcagcgcccaggagattaaacggatcaacaagatcagaagaagacttgtgaaagacagcaacaccaagaaggccggcaagacaggccccatgaaaaccctgctggttagagtgatgacacccgatctgagagagcggctggaaaacctgagaaagaagcctgaaaatatcccccagcccatcagcaatacatctagagccaacctgaataagctgctgaccgattacaccgaaatgaagaaggcgatcctgcatgtgtactgggaagagttccagaaggaccctgtgggcctgatgagccgggtggcccagcctgccagcaagaagatcgatcagaacaagctgaaacctgagatggacgagaagggcaacctgaccaccgccggctttgcctgctctcagtgtggccagcccctgttcgtgtacaagctggagcaggtgtctgagaagggcaaggcttacaccaactacttcggacggtgcaatgtggccgagcacgaaaagctgatcctgctggcccagctgaagcccgagaaggatagcgacgaagccgtgacatatagcctgggaaagtttgggcagagggccctggatttctacagcattcatgtgaccaaggagtccacccaccccgtgaagcccctggcccagatcgccggaaacagatacgcctccggacctgtgggaaaggccctgagcgacgcatgtatgggcacaatcgcctccttcctgtctaagtaccaggacatcatcatcgaacaccagaaggtggtgaagggcaaccagaagagactggagagcctgcgggagctggccggcaaggaaaacctggaataccctagcgtgaccctgccacctcagcctcacaccaaggagggcgttgatgcctacaacgaagtgatcgcccgggtgcgaatgtgggtgaacctgaacctgtggcagaagctgaagctaagcagagatgatgccaagcctctgctgagactgaagggattcccttcctttcctctggtcgagagacaggccaacgaagtggactggtgggacatggtgtgtaacgtgaagaagctgatcaacgagaaaaaggaggatggcaaggtgttttggcagaatctggctggctacaagagacaggaagccctgagaccatacctgagcagcgaggaagatcggaagaagggaaagaaattcgctcggtaccagctgggcgacctgctgctgcacctggaaaagaagcacggcgaggactggggaaaggtgtacgacgaggcctgggagcggattgacaagaaagtggaaggcctgagcaagcacatcaagctggaagaggaacggagaagcgaggacgcccagagcaaggccgccctgaccgactggctgcgggctaaggccagcttcgtgatcgagggcctgaaggaggccgacaaggacgagttctgcagatgcgagctgaagctgcagaagtggtacggggacctgcggggaaagcccttcgccatcgaagccgagaacagcatcctggacatcagcggcttcagcaagcagtacaactgtgccttcatctggcagaaggacggcgtgaagaagctgaacctgtacctgatcatcaactacttcaagggcggcaagctgcggttcaagaagatcaaacctgaagccttcgaagccaacagattctacaccgtgatcaacaaaaagagcggcgagatcgtgcccatggaggtgaacttcaacttcgacgaccccaacctgatcatcctgcctctggcctttggcaagagacagggcagagaattcatctggaacgacctgctgtccctggaaaccggcagcctgaagctggccaacggaagagtgatcgagaagacactgtacaacagaagaacccggcaggatgagcctgccctgttcgtggccctgaccttcgagcggcgggaggtcctggactcctccaatatcaaaccaatgaacctgatcggcgtggcaagaggcgaaaacatccccgccgtgatcgccctgaccgaccccgagggctgcccactgagccggtttaaggatagcctgggaaacccaacccacatcctgagaatcggcgagagctataaggagaagcagcggaccatccaggccaagaaggaggtggagcagcggagagccggcggctacagccggaagtacgccagcaaagccaagaatctggcagacgatatggtgagaaacaccgctagagatctgctgtactacgccgtgacccaggatgccatgctgatcttcgccaacctgagccggggcttcggccggcagggcaagcggaccttcatggccgagagacagtacacacggatggaggactggctgaccgccaagctggcctacgagggcctgagcaagacctacctgtccaagacactggcccagtacacctccaagacatgcagcaactgtgggtttaccatcaccagcgccgactacgacagggtgctggagaagctgaagaagacagcaacaggctggatgaccacaattaacggcaaggagctgaaggtggagggccagattacctactacaacagatacaagagacagaacgtagtcaaggacctgtccgtcgagctggatagactgagcgaagaatctgtgaacaacgacatctcctcctggacaaagggcagaagcggagaagctctgagcctcctgaagaaaagattctcccatagacccgtgcaggagaagttcgtgtgcctgaactgcggcttcgagacacacgcagccgagcaagccgccctgaacatcgccagatcctggctgttcctgcggagccaggagtacaagaaataccagacaaacaagacaaccggcaacaccgataagagagccttcgtcgagacctggcagtccttttaccggaagaagcttaaggaggtgtggaaacctgccgtgcggtctggcggatctggcggaggctccacaagctggaaggagagcctgagcttcgaggacgtggccctgtacttcaccagggaggagtggagcaggctggactgggcccagaaggacctgtacagggacgtgatgctggagaactacaggaacatgatcgtgctgggcttccagttccccaagcccgaggtgatctgccagctggagcagtgggaggagccctggatcctggacctgcccagggccggcaccaggaaggccagcggcagcgcctgcaccagccccaagaaaaagagaaaagtctaagctgccttctgcggggcttgccttctggccatgcccttcttctctcccttgcacctgtacctcttggtctttgaataaagcctgagtaggaaggctagcaaaaaaaaaaaaaaaaaaaaaaaaaaaaaaaaaaaaaaaaaaaaaaaaaaaaaaaaaaaaaaaaaaaaaaaaaaaaaaaa

SEQ ID NO: 3266 - RNA, 5419 nt, synthetic construct
  source 1..5419: mol_type = other RNA
aggaaataagagagaaaagaagagtaagaagaaatataagagccaccatggcccctaagaagaagcgtaaagtgagccgggtgaacggcagcggcagcggcggcggcatgaaccacgaccaggagttcgacccccctaaggtgtaccctcccgtccccgccgagaagagaaagcccatccgggtcctgagcctgttcgatggcatcgccaccggtctgctggtgctgaaggacctgggcatccaggtggataggtacattgcctccgaggtgtgcgaggactccatcaccgtgggaatggtgcgtcatcagggcaagatcatgtacgtgggcgacgtgcggagcgtgacacagaagcatatccaggagtggggccctttcgacctggtgatcggcggcagcccttgcaatgacctgagcatcgtgaacccagcccggaagggcctgtacgagggaaccggcagactgttcttcgagttttacagactgctgcacgacgcccggcctaaggaaggcgacgaccggcccttcttttggctgttcgagaatgtggtggccatgggagtcagcgacaagcgggatattagccggttcctggagagcaaccccgtgatgatcgatgccaaggaagtgagcgccgcccaccgggccagatacttctggggcaatctgcctggcatgaacagacccctggccagcaccgtgaacgacaagctggagctgcaggagtgcctggagcacggccggatcgccaagttcagcaaggtgagaaccatcaccacccgaagcaacagcatcaaacaaggcaaggaccagcactttcctgtgttcatgaacgagaaggaggacatcctgtggtgtaccgagatggagagagtgttcgggttcccagtccactacacagatgtcagcaacatgtctagactggccagacagagactgctgggaagaagctggtccgtccctgtgatcagacacctgttcgcccctctgaaggagtacttcgcctgcgtgagcagcggcaacagcaacgccaacagccggggccccagcttctctagcggcctggtgccactgtccctgagagggagccacatgggccccatggagatctacaaaaccgtgagcgcctggaagcggcagcctgtgcgcgtgctgagcctgtttcggaatatcgataaagtcctgaaaagcctgggattcctggagagcggctctggctccggcggtggcaccctgaagtacgtggaggatgtgacaaacgtggtcagacgggatgtggagaagtggggccccttcgatctggtgtacggcagcacccaacccctgggcagctcttgtgaccggtgccctggctggtacatgtttcagttccaccggatcctgcagtacgccctgccgagacaggagtcccagcggccattcttttggattttcatggacaacttgctgctgaccgaggatgaccaggaaactaccactcggttcctgcagaccgaagccgtgaccctgcaggacgtgagaggccgggactaccagaacgccatgcgggtgtggtccaacatccctggactgaaaagcaagcacgcacctctgacccctaaagaagaggagtacctgcaggcccaggtgcggagcagaagcaagctggacgcccctaaggtggatctgctggtgaagaattgcctcctgcccctgagagagtacttcaagtatttcagccagaatagtctgcccctgggcggcccaagcagcggcgcccctcctcccagcggcggcagcccagccggctccccaacctctaccgaggagggcacctctgagtccgccacccccgagagcggccctggcacctccaccgagcccagcgagggcagcgcacccggcagccctgccggcagccccacctccacagaggagggaaccagcaccgagcccagcgaaggcagcgccccaggcaccagcaccgagcctagtgagggcggctctggcggcggcagcgcccaggagattaaacggatcaacaagatcagaagaagacttgtgaaagacagcaacaccaagaaggccggcaagacaggccccatgaaaaccctgctggttagagtgatgacacccgatctgagagagcggctggaaaacctgagaaagaagcctgaaaatatcccccagcccatcagcaatacatctagagccaacctgaataagctgctgaccgattacaccgaaatgaagaaggcgatcctgcatgtgtactgggaagagttccagaaggaccctgtgggcctgatgagccgggtggcccagcctgccagcaagaagatcgatcagaacaagctgaaacctgagatggacgagaagggcaacctgaccaccgccggctttgcctgctctcagtgtggccagcccctgttcgtgtacaagctggagcaggtgtctgagaagggcaaggcttacaccaactacttcggacggtgcaatgtggccgagcacgaaaagctgatcctgctggcccagctgaagcccgagaaggatagcgacgaagccgtgacatatagcctgggaaagtttgggcagagggccctggatttctacagcattcatgtgaccaaggagtccacccaccccgtgaagcccctggcccagatcgccggaaacagatacgcctccggacctgtgggaaaggccctgagcgacgcatgtatgggcacaatcgcctccttcctgtctaagtaccaggacatcatcatcgaacaccagaaggtggtgaagggcaaccagaagagactggagagcctgcgggagctggccggcaaggaaaacctggaataccctagcgtgaccctgccacctcagcctcacaccaaggagggcgttgatgcctacaacgaagtgatcgcccgggtgcgaatgtgggtgaacctgaacctgtggcagaagctgaagctaagcagagatgatgccaagcctctgctgagactgaagggattcccttcctttcctctggtcgagagacaggccaacgaagtggactggtgggacatggtgtgtaacgtgaagaagctgatcaacgagaaaaaggaggatggcaaggtgttttggcagaatctggctggctacaagagacaggaagccctgagaccatacctgagcagcgaggaagatcggaagaagggaaagaaattcgctcggtaccagctgggcgacctgctgctgcacctggaaaagaagcacggcgaggactggggaaaggtgtacgacgaggcctgggagcggattgacaagaaagtggaaggcctgagcaagcacatcaagctggaagaggaacggagaagcgaggacgcccagagcaaggccgccctgaccgactggctgcgggctaaggccagcttcgtgatcgagggcctgaaggaggccgacaaggacgagttctgcagatgcgagctgaagctgcagaagtggtacggggacctgcggggaaagcccttcgccatcgaagccgagaacagcatcctggacatcagcggcttcagcaagcagtacaactgtgccttcatctggcagaaggacggcgtgaagaagctgaacctgtacctgatcatcaactacttcaagggcggcaagctgcggttcaagaagatcaaacctgaagccttcgaagccaacagattctacaccgtgatcaacaaaaagagcggcgagatcgtgcccatggaggtgaacttcaacttcgacgaccccaacctgatcatcctgcctctggcctttggcaagagacagggcagagaattcatctggaacgacctgctgtccctggaaaccggcagcctgaagctggccaacggaagagtgatcgagaagacactgtacaacagaagaacccggcaggatgagcctgccctgttcgtggccctgaccttcgagcggcgggaggtcctggactcctccaatatcaaaccaatgaacctgatcggcgtggcaagaggcgaaaacatccccgccgtgatcgccctgaccgaccccgagggctgcccactgagccggtttaaggatagcctgggaaacccaacccacatcctgagaatcggcgagagctataaggagaagcagcggaccatccaggccaagaaggaggtggagcagcggagagccggcggctacagccggaagtacgccagcaaagccaagaatctggcagacgatatggtgagaaacaccgctagagatctgctgtactacgccgtgacccaggatgccatgctgatcttcgccaacctgagccggggcttcggccggcagggcaagcggaccttcatggccgagagacagtacacacggatggaggactggctgaccgccaagctggcctacgagggcctgagcaagacctacctgtccaagacactggcccagtacacctccaagacatgcagcaactgtgggtttaccatcaccagcgccgactacgacagggtgctggagaagctgaagaagacagcaacaggctggatgaccacaattaacggcaaggagctgaaggtggagggccagattacctactacaacagatacaagagacagaacgtagtcaaggacctgtccgtcgagctggatagactgagcgaagaatctgtgaacaacgacatctcctcctggacaaagggcagaagcggagaagctctgagcctcctgaagaaaagattctcccatagacccgtgcaggagaagttcgtgtgcctgaactgcggcttcgagacacacgcagccgagcaagccgccctgaacatcgccagatcctggctgttcctgcggagccaggagtacaagaaataccagacaaacaagacaaccggcaacaccgataagagagccttcgtcgagacctggcagtccttttaccggaagaagcttaaggaggtgtggaaacctgccgtgcggtctggcggatctggcggaggctccacaagcgcccccctgcccctgaccttcgaggacgtggccatctacttcagcgagcaggagtggcagcacctggagacctggcagaaggagctgtacaagcaggtgatgaggaccaactacgagaccctgatcagcctggacaacggcctgcccaagcccgagctgatcagctggatggagctgggcagggagaacttcggcagctggggcgagggccagaaggtggacaggggcatcaggtgcagcgtgaccagccccaagaaaaagagaaaagtctaagctgccttctgcggggcttgccttctggccatgcccttcttctctcccttgcacctgtacctcttggtctttgaataaagcctgagtaggaaggctagcaaaaaaaaaaaaaaaaaaaaaaaaaaaaaaaaaaaaaaaaaaaaaaaaaaaaaaaaaaaaaaaaaaaaaaaaaaaaaaaa

SEQ ID NO: 3267 - RNA, 5419 nt, synthetic construct
  source 1..5419: mol_type = other RNA
aggaaataagagagaaaagaagagtaagaagaaatataagagccaccatggcccctaagaagaagcgtaaagtgagccgggtgaacggcagcggcagcggcggcggcatgaaccacgaccaggagttcgacccccctaaggtgtaccctcccgtccccgccgagaagagaaagcccatccgggtcctgagcctgttcgatggcatcgccaccggtctgctggtgctgaaggacctgggcatccaggtggataggtacattgcctccgaggtgtgcgaggactccatcaccgtgggaatggtgcgtcatcagggcaagatcatgtacgtgggcgacgtgcggagcgtgacacagaagcatatccaggagtggggccctttcgacctggtgatcggcggcagcccttgcaatgacctgagcatcgtgaacccagcccggaagggcctgtacgagggaaccggcagactgttcttcgagttttacagactgctgcacgacgcccggcctaaggaaggcgacgaccggcccttcttttggctgttcgagaatgtggtggccatgggagtcagcgacaagcgggatattagccggttcctggagagcaaccccgtgatgatcgatgccaaggaagtgagcgccgcccaccgggccagatacttctggggcaatctgcctggcatgaacagacccctggccagcaccgtgaacgacaagctggagctgcaggagtgcctggagcacggccggatcgccaagttcagcaaggtgagaaccatcaccacccgaagcaacagcatcaaacaaggcaaggaccagcactttcctgtgttcatgaacgagaaggaggacatcctgtggtgtaccgagatggagagagtgttcgggttcccagtccactacacagatgtcagcaacatgtctagactggccagacagagactgctgggaagaagctggtccgtccctgtgatcagacacctgttcgcccctctgaaggagtacttcgcctgcgtgagcagcggcaacagcaacgccaacagccggggccccagcttctctagcggcctggtgccactgtccctgagagggagccacatgggccccatggagatctacaaaaccgtgagcgcctggaagcggcagcctgtgcgcgtgctgagcctgtttcggaatatcgataaagtcctgaaaagcctgggattcctggagagcggctctggctccggcggtggcaccctgaagtacgtggaggatgtgacaaacgtggtcagacgggatgtggagaagtggggccccttcgatctggtgtacggcagcacccaacccctgggcagctcttgtgaccggtgccctggctggtacatgtttcagttccaccggatcctgcagtacgccctgccgagacaggagtcccagcggccattcttttggattttcatggacaacttgctgctgaccgaggatgaccaggaaactaccactcggttcctgcagaccgaagccgtgaccctgcaggacgtgagaggccgggactaccagaacgccatgcgggtgtggtccaacatccctggactgaaaagcaagcacgcacctctgacccctaaagaagaggagtacctgcaggcccaggtgcggagcagaagcaagctggacgcccctaaggtggatctgctggtgaagaattgcctcctgcccctgagagagtacttcaagtatttcagccagaatagtctgcccctgggcggcccaagcagcggcgcccctcctcccagcggcggcagcccagccggctccccaacctctaccgaggagggcacctctgagtccgccacccccgagagcggccctggcacctccaccgagcccagcgagggcagcgcacccggcagccctgccggcagccccacctccacagaggagggaaccagcaccgagcccagcgaaggcagcgccccaggcaccagcaccgagcctagtgagggcggctctggcggcggcagcgcccaggagattaaacggatcaacaagatcagaagaagacttgtgaaagacagcaacaccaagaaggccggcaagacaggccccatgaaaaccctgctggttagagtgatgacacccgatctgagagagcggctggaaaacctgagaaagaagcctgaaaatatcccccagcccatcagcaatacatctagagccaacctgaataagctgctgaccgattacaccgaaatgaagaaggcgatcctgcatgtgtactgggaagagttccagaaggaccctgtgggcctgatgagccgggtggcccagcctgccagcaagaagatcgatcagaacaagctgaaacctgagatggacgagaagggcaacctgaccaccgccggctttgcctgctctcagtgtggccagcccctgttcgtgtacaagctggagcaggtgtctgagaagggcaaggcttacaccaactacttcggacggtgcaatgtggccgagcacgaaaagctgatcctgctggcccagctgaagcccgagaaggatagcgacgaagccgtgacatatagcctgggaaagtttgggcagagggccctggatttctacagcattcatgtgaccaaggagtccacccaccccgtgaagcccctggcccagatcgccggaaacagatacgcctccggacctgtgggaaaggccctgagcgacgcatgtatgggcacaatcgcctccttcctgtctaagtaccaggacatcatcatcgaacaccagaaggtggtgaagggcaaccagaagagactggagagcctgcgggagctggccggcaaggaaaacctggaataccctagcgtgaccctgccacctcagcctcacaccaaggagggcgttgatgcctacaacgaagtgatcgcccgggtgcgaatgtgggtgaacctgaacctgtggcagaagctgaagctaagcagagatgatgccaagcctctgctgagactgaagggattcccttcctttcctctggtcgagagacaggccaacgaagtggactggtgggacatggtgtgtaacgtgaagaagctgatcaacgagaaaaaggaggatggcaaggtgttttggcagaatctggctggctacaagagacaggaagccctgagaccatacctgagcagcgaggaagatcggaagaagggaaagaaattcgctcggtaccagctgggcgacctgctgctgcacctggaaaagaagcacggcgaggactggggaaaggtgtacgacgaggcctgggagcggattgacaagaaagtggaaggcctgagcaagcacatcaagctggaagaggaacggagaagcgaggacgcccagagcaaggccgccctgaccgactggctgcgggctaaggccagcttcgtgatcgagggcctgaaggaggccgacaaggacgagttctgcagatgcgagctgaagctgcagaagtggtacggggacctgcggggaaagcccttcgccatcgaagccgagaacagcatcctggacatcagcggcttcagcaagcagtacaactgtgccttcatctggcagaaggacggcgtgaagaagctgaacctgtacctgatcatcaactacttcaagggcggcaagctgcggttcaagaagatcaaacctgaagccttcgaagccaacagattctacaccgtgatcaacaaaaagagcggcgagatcgtgcccatggaggtgaacttcaacttcgacgaccccaacctgatcatcctgcctctggcctttggcaagagacagggcagagaattcatctggaacgacctgctgtccctggaaaccggcagcctgaagctggccaacggaagagtgatcgagaagacactgtacaacagaagaacccggcaggatgagcctgccctgttcgtggccctgaccttcgagcggcgggaggtcctggactcctccaatatcaaaccaatgaacctgatcggcgtggcaagaggcgaaaacatccccgccgtgatcgccctgaccgaccccgagggctgcccactgagccggtttaaggatagcctgggaaacccaacccacatcctgagaatcggcgagagctataaggagaagcagcggaccatccaggccaagaaggaggtggagcagcggagagccggcggctacagccggaagtacgccagcaaagccaagaatctggcagacgatatggtgagaaacaccgctagagatctgctgtactacgccgtgacccaggatgccatgctgatcttcgccaacctgagccggggcttcggccggcagggcaagcggaccttcatggccgagagacagtacacacggatggaggactggctgaccgccaagctggcctacgagggcctgagcaagacctacctgtccaagacactggcccagtacacctccaagacatgcagcaactgtgggtttaccatcaccagcgccgactacgacagggtgctggagaagctgaagaagacagcaacaggctggatgaccacaattaacggcaaggagctgaaggtggagggccagattacctactacaacagatacaagagacagaacgtagtcaaggacctgtccgtcgagctggatagactgagcgaagaatctgtgaacaacgacatctcctcctggacaaagggcagaagcggagaagctctgagcctcctgaagaaaagattctcccatagacccgtgcaggagaagttcgtgtgcctgaactgcggcttcgagacacacgcagccgagcaagccgccctgaacatcgccagatcctggctgttcctgcggagccaggagtacaagaaataccagacaaacaagacaaccggcaacaccgataagagagccttcgtcgagacctggcagtccttttaccggaagaagcttaaggaggtgtggaaacctgccgtgcggtctggcggatctggcggaggctccacaagctaccagacccccgtgagcttcaaggacgtggtggtgggcttcacccaggaggagtggcacaggctgagccccgcccagagggccctgtacagggacgtgatgctggagacctacagcaacctgctgagcgtgggctacgagggcaccaagcccgacgtgatcctgaggctggagcaggaggaggccccctggatcggcgaggccgcctgccccggctgccactgctgggaggacatctggcagaccagccccaagaaaaagagaaaagtctaagctgccttctgcggggcttgccttctggccatgcccttcttctctcccttgcacctgtacctcttggtctttgaataaagcctgagtaggaaggctagcaaaaaaaaaaaaaaaaaaaaaaaaaaaaaaaaaaaaaaaaaaaaaaaaaaaaaaaaaaaaaaaaaaaaaaaaaaaaaaaa

SEQ ID NO: 3268 - RNA, 5419 nt, synthetic construct
  source 1..5419: mol_type = other RNA
aggaaataagagagaaaagaagagtaagaagaaatataagagccaccatggcccctaagaagaagcgtaaagtgagccgggtgaacggcagcggcagcggcggcggcatgaaccacgaccaggagttcgacccccctaaggtgtaccctcccgtccccgccgagaagagaaagcccatccgggtcctgagcctgttcgatggcatcgccaccggtctgctggtgctgaaggacctgggcatccaggtggataggtacattgcctccgaggtgtgcgaggactccatcaccgtgggaatggtgcgtcatcagggcaagatcatgtacgtgggcgacgtgcggagcgtgacacagaagcatatccaggagtggggccctttcgacctggtgatcggcggcagcccttgcaatgacctgagcatcgtgaacccagcccggaagggcctgtacgagggaaccggcagactgttcttcgagttttacagactgctgcacgacgcccggcctaaggaaggcgacgaccggcccttcttttggctgttcgagaatgtggtggccatgggagtcagcgacaagcgggatattagccggttcctggagagcaaccccgtgatgatcgatgccaaggaagtgagcgccgcccaccgggccagatacttctggggcaatctgcctggcatgaacagacccctggccagcaccgtgaacgacaagctggagctgcaggagtgcctggagcacggccggatcgccaagttcagcaaggtgagaaccatcaccacccgaagcaacagcatcaaacaaggcaaggaccagcactttcctgtgttcatgaacgagaaggaggacatcctgtggtgtaccgagatggagagagtgttcgggttcccagtccactacacagatgtcagcaacatgtctagactggccagacagagactgctgggaagaagctggtccgtccctgtgatcagacacctgttcgcccctctgaaggagtacttcgcctgcgtgagcagcggcaacagcaacgccaacagccggggccccagcttctctagcggcctggtgccactgtccctgagagggagccacatgggccccatggagatctacaaaaccgtgagcgcctggaagcggcagcctgtgcgcgtgctgagcctgtttcggaatatcgataaagtcctgaaaagcctgggattcctggagagcggctctggctccggcggtggcaccctgaagtacgtggaggatgtgacaaacgtggtcagacgggatgtggagaagtggggccccttcgatctggtgtacggcagcacccaacccctgggcagctcttgtgaccggtgccctggctggtacatgtttcagttccaccggatcctgcagtacgccctgccgagacaggagtcccagcggccattcttttggattttcatggacaacttgctgctgaccgaggatgaccaggaaactaccactcggttcctgcagaccgaagccgtgaccctgcaggacgtgagaggccgggactaccagaacgccatgcgggtgtggtccaacatccctggactgaaaagcaagcacgcacctctgacccctaaagaagaggagtacctgcaggcccaggtgcggagcagaagcaagctggacgcccctaaggtggatctgctggtgaagaattgcctcctgcccctgagagagtacttcaagtatttcagccagaatagtctgcccctgggcggcccaagcagcggcgcccctcctcccagcggcggcagcccagccggctccccaacctctaccgaggagggcacctctgagtccgccacccccgagagcggccctggcacctccaccgagcccagcgagggcagcgcacccggcagccctgccggcagccccacctccacagaggagggaaccagcaccgagcccagcgaaggcagcgccccaggcaccagcaccgagcctagtgagggcggctctggcggcggcagcgcccaggagattaaacggatcaacaagatcagaagaagacttgtgaaagacagcaacaccaagaaggccggcaagacaggccccatgaaaaccctgctggttagagtgatgacacccgatctgagagagcggctggaaaacctgagaaagaagcctgaaaatatcccccagcccatcagcaatacatctagagccaacctgaataagctgctgaccgattacaccgaaatgaagaaggcgatcctgcatgtgtactgggaagagttccagaaggaccctgtgggcctgatgagccgggtggcccagcctgccagcaagaagatcgatcagaacaagctgaaacctgagatggacgagaagggcaacctgaccaccgccggctttgcctgctctcagtgtggccagcccctgttcgtgtacaagctggagcaggtgtctgagaagggcaaggcttacaccaactacttcggacggtgcaatgtggccgagcacgaaaagctgatcctgctggcccagctgaagcccgagaaggatagcgacgaagccgtgacatatagcctgggaaagtttgggcagagggccctggatttctacagcattcatgtgaccaaggagtccacccaccccgtgaagcccctggcccagatcgccggaaacagatacgcctccggacctgtgggaaaggccctgagcgacgcatgtatgggcacaatcgcctccttcctgtctaagtaccaggacatcatcatcgaacaccagaaggtggtgaagggcaaccagaagagactggagagcctgcgggagctggccggcaaggaaaacctggaataccctagcgtgaccctgccacctcagcctcacaccaaggagggcgttgatgcctacaacgaagtgatcgcccgggtgcgaatgtgggtgaacctgaacctgtggcagaagctgaagctaagcagagatgatgccaagcctctgctgagactgaagggattcccttcctttcctctggtcgagagacaggccaacgaagtggactggtgggacatggtgtgtaacgtgaagaagctgatcaacgagaaaaaggaggatggcaaggtgttttggcagaatctggctggctacaagagacaggaagccctgagaccatacctgagcagcgaggaagatcggaagaagggaaagaaattcgctcggtaccagctgggcgacctgctgctgcacctggaaaagaagcacggcgaggactggggaaaggtgtacgacgaggcctgggagcggattgacaagaaagtggaaggcctgagcaagcacatcaagctggaagaggaacggagaagcgaggacgcccagagcaaggccgccctgaccgactggctgcgggctaaggccagcttcgtgatcgagggcctgaaggaggccgacaaggacgagttctgcagatgcgagctgaagctgcagaagtggtacggggacctgcggggaaagcccttcgccatcgaagccgagaacagcatcctggacatcagcggcttcagcaagcagtacaactgtgccttcatctggcagaaggacggcgtgaagaagctgaacctgtacctgatcatcaactacttcaagggcggcaagctgcggttcaagaagatcaaacctgaagccttcgaagccaacagattctacaccgtgatcaacaaaaagagcggcgagatcgtgcccatggaggtgaacttcaacttcgacgaccccaacctgatcatcctgcctctggcctttggcaagagacagggcagagaattcatctggaacgacctgctgtccctggaaaccggcagcctgaagctggccaacggaagagtgatcgagaagacactgtacaacagaagaacccggcaggatgagcctgccctgttcgtggccctgaccttcgagcggcgggaggtcctggactcctccaatatcaaaccaatgaacctgatcggcgtggcaagaggcgaaaacatccccgccgtgatcgccctgaccgaccccgagggctgcccactgagccggtttaaggatagcctgggaaacccaacccacatcctgagaatcggcgagagctataaggagaagcagcggaccatccaggccaagaaggaggtggagcagcggagagccggcggctacagccggaagtacgccagcaaagccaagaatctggcagacgatatggtgagaaacaccgctagagatctgctgtactacgccgtgacccaggatgccatgctgatcttcgccaacctgagccggggcttcggccggcagggcaagcggaccttcatggccgagagacagtacacacggatggaggactggctgaccgccaagctggcctacgagggcctgagcaagacctacctgtccaagacactggcccagtacacctccaagacatgcagcaactgtgggtttaccatcaccagcgccgactacgacagggtgctggagaagctgaagaagacagcaacaggctggatgaccacaattaacggcaaggagctgaaggtggagggccagattacctactacaacagatacaagagacagaacgtagtcaaggacctgtccgtcgagctggatagactgagcgaagaatctgtgaacaacgacatctcctcctggacaaagggcagaagcggagaagctctgagcctcctgaagaaaagattctcccatagacccgtgcaggagaagttcgtgtgcctgaactgcggcttcgagacacacgcagccgagcaagccgccctgaacatcgccagatcctggctgttcctgcggagccaggagtacaagaaataccagacaaacaagacaaccggcaacaccgataagagagccttcgtcgagacctggcagtccttttaccggaagaagcttaaggaggtgtggaaacctgccgtgcggtctggcggatctggcggaggctccacaagcaaggaggccagcgtggccttcagggacgtggccgtggacttcacccaggaggagtggaggctgctgagccccgcccagaggaccctgcacagggaggtgatgctggagacctacaaccacctggtgagcctggagatccccagcagcaagcccaagctgatcgcccagctggagaggggcgaggagccctggagggaggagaggaagtgcagcctggacctgtgccccgagagcaagcccgagaccagccccaagaaaaagagaaaagtctaagctgccttctgcggggcttgccttctggccatgcccttcttctctcccttgcacctgtacctcttggtctttgaataaagcctgagtaggaaggctagcaaaaaaaaaaaaaaaaaaaaaaaaaaaaaaaaaaaaaaaaaaaaaaaaaaaaaaaaaaaaaaaaaaaaaaaaaaaaaaaa

SEQ ID NO: 3269 - RNA, 5419 nt, synthetic construct
  source 1..5419: mol_type = other RNA
aggaaataagagagaaaagaagagtaagaagaaatataagagccaccatggcccctaagaagaagcgtaaagtgagccgggtgaacggcagcggcagcggcggcggcatgaaccacgaccaggagttcgacccccctaaggtgtaccctcccgtccccgccgagaagagaaagcccatccgggtcctgagcctgttcgatggcatcgccaccggtctgctggtgctgaaggacctgggcatccaggtggataggtacattgcctccgaggtgtgcgaggactccatcaccgtgggaatggtgcgtcatcagggcaagatcatgtacgtgggcgacgtgcggagcgtgacacagaagcatatccaggagtggggccctttcgacctggtgatcggcggcagcccttgcaatgacctgagcatcgtgaacccagcccggaagggcctgtacgagggaaccggcagactgttcttcgagttttacagactgctgcacgacgcccggcctaaggaaggcgacgaccggcccttcttttggctgttcgagaatgtggtggccatgggagtcagcgacaagcgggatattagccggttcctggagagcaaccccgtgatgatcgatgccaaggaagtgagcgccgcccaccgggccagatacttctggggcaatctgcctggcatgaacagacccctggccagcaccgtgaacgacaagctggagctgcaggagtgcctggagcacggccggatcgccaagttcagcaaggtgagaaccatcaccacccgaagcaacagcatcaaacaaggcaaggaccagcactttcctgtgttcatgaacgagaaggaggacatcctgtggtgtaccgagatggagagagtgttcgggttcccagtccactacacagatgtcagcaacatgtctagactggccagacagagactgctgggaagaagctggtccgtccctgtgatcagacacctgttcgcccctctgaaggagtacttcgcctgcgtgagcagcggcaacagcaacgccaacagccggggccccagcttctctagcggcctggtgccactgtccctgagagggagccacatgggccccatggagatctacaaaaccgtgagcgcctggaagcggcagcctgtgcgcgtgctgagcctgtttcggaatatcgataaagtcctgaaaagcctgggattcctggagagcggctctggctccggcggtggcaccctgaagtacgtggaggatgtgacaaacgtggtcagacgggatgtggagaagtggggccccttcgatctggtgtacggcagcacccaacccctgggcagctcttgtgaccggtgccctggctggtacatgtttcagttccaccggatcctgcagtacgccctgccgagacaggagtcccagcggccattcttttggattttcatggacaacttgctgctgaccgaggatgaccaggaaactaccactcggttcctgcagaccgaagccgtgaccctgcaggacgtgagaggccgggactaccagaacgccatgcgggtgtggtccaacatccctggactgaaaagcaagcacgcacctctgacccctaaagaagaggagtacctgcaggcccaggtgcggagcagaagcaagctggacgcccctaaggtggatctgctggtgaagaattgcctcctgcccctgagagagtacttcaagtatttcagccagaatagtctgcccctgggcggcccaagcagcggcgcccctcctcccagcggcggcagcccagccggctccccaacctctaccgaggagggcacctctgagtccgccacccccgagagcggccctggcacctccaccgagcccagcgagggcagcgcacccggcagccctgccggcagccccacctccacagaggagggaaccagcaccgagcccagcgaaggcagcgccccaggcaccagcaccgagcctagtgagggcggctctggcggcggcagcgcccaggagattaaacggatcaacaagatcagaagaagacttgtgaaagacagcaacaccaagaaggccggcaagacaggccccatgaaaaccctgctggttagagtgatgacacccgatctgagagagcggctggaaaacctgagaaagaagcctgaaaatatcccccagcccatcagcaatacatctagagccaacctgaataagctgctgaccgattacaccgaaatgaagaaggcgatcctgcatgtgtactgggaagagttccagaaggaccctgtgggcctgatgagccgggtggcccagcctgccagcaagaagatcgatcagaacaagctgaaacctgagatggacgagaagggcaacctgaccaccgccggctttgcctgctctcagtgtggccagcccctgttcgtgtacaagctggagcaggtgtctgagaagggcaaggcttacaccaactacttcggacggtgcaatgtggccgagcacgaaaagctgatcctgctggcccagctgaagcccgagaaggatagcgacgaagccgtgacatatagcctgggaaagtttgggcagagggccctggatttctacagcattcatgtgaccaaggagtccacccaccccgtgaagcccctggcccagatcgccggaaacagatacgcctccggacctgtgggaaaggccctgagcgacgcatgtatgggcacaatcgcctccttcctgtctaagtaccaggacatcatcatcgaacaccagaaggtggtgaagggcaaccagaagagactggagagcctgcgggagctggccggcaaggaaaacctggaataccctagcgtgaccctgccacctcagcctcacaccaaggagggcgttgatgcctacaacgaagtgatcgcccgggtgcgaatgtgggtgaacctgaacctgtggcagaagctgaagctaagcagagatgatgccaagcctctgctgagactgaagggattcccttcctttcctctggtcgagagacaggccaacgaagtggactggtgggacatggtgtgtaacgtgaagaagctgatcaacgagaaaaaggaggatggcaaggtgttttggcagaatctggctggctacaagagacaggaagccctgagaccatacctgagcagcgaggaagatcggaagaagggaaagaaattcgctcggtaccagctgggcgacctgctgctgcacctggaaaagaagcacggcgaggactggggaaaggtgtacgacgaggcctgggagcggattgacaagaaagtggaaggcctgagcaagcacatcaagctggaagaggaacggagaagcgaggacgcccagagcaaggccgccctgaccgactggctgcgggctaaggccagcttcgtgatcgagggcctgaaggaggccgacaaggacgagttctgcagatgcgagctgaagctgcagaagtggtacggggacctgcggggaaagcccttcgccatcgaagccgagaacagcatcctggacatcagcggcttcagcaagcagtacaactgtgccttcatctggcagaaggacggcgtgaagaagctgaacctgtacctgatcatcaactacttcaagggcggcaagctgcggttcaagaagatcaaacctgaagccttcgaagccaacagattctacaccgtgatcaacaaaaagagcggcgagatcgtgcccatggaggtgaacttcaacttcgacgaccccaacctgatcatcctgcctctggcctttggcaagagacagggcagagaattcatctggaacgacctgctgtccctggaaaccggcagcctgaagctggccaacggaagagtgatcgagaagacactgtacaacagaagaacccggcaggatgagcctgccctgttcgtggccctgaccttcgagcggcgggaggtcctggactcctccaatatcaaaccaatgaacctgatcggcgtggcaagaggcgaaaacatccccgccgtgatcgccctgaccgaccccgagggctgcccactgagccggtttaaggatagcctgggaaacccaacccacatcctgagaatcggcgagagctataaggagaagcagcggaccatccaggccaagaaggaggtggagcagcggagagccggcggctacagccggaagtacgccagcaaagccaagaatctggcagacgatatggtgagaaacaccgctagagatctgctgtactacgccgtgacccaggatgccatgctgatcttcgccaacctgagccggggcttcggccggcagggcaagcggaccttcatggccgagagacagtacacacggatggaggactggctgaccgccaagctggcctacgagggcctgagcaagacctacctgtccaagacactggcccagtacacctccaagacatgcagcaactgtgggtttaccatcaccagcgccgactacgacagggtgctggagaagctgaagaagacagcaacaggctggatgaccacaattaacggcaaggagctgaaggtggagggccagattacctactacaacagatacaagagacagaacgtagtcaaggacctgtccgtcgagctggatagactgagcgaagaatctgtgaacaacgacatctcctcctggacaaagggcagaagcggagaagctctgagcctcctgaagaaaagattctcccatagacccgtgcaggagaagttcgtgtgcctgaactgcggcttcgagacacacgcagccgagcaagccgccctgaacatcgccagatcctggctgttcctgcggagccaggagtacaagaaataccagacaaacaagacaaccggcaacaccgataagagagccttcgtcgagacctggcagtccttttaccggaagaagcttaaggaggtgtggaaacctgccgtgcggtctggcggatctggcggaggctccacaagccacagcgagggcaggctgaccttccaggacgtggccatcgacttcacccaggaggagtgggagtgcctggaccccggccagaggaagctgtacagggacgtgatggtggagaactacaggaacctggccagcctgggcctggtgagcaaggtggacctggtgaccttcctggagctgctgaaggaccccaggaacatcaggaggatgaagaccaccgccatctaccccgccgtgagcccccagaccagccccaagaaaaagagaaaagtctaagctgccttctgcggggcttgccttctggccatgcccttcttctctcccttgcacctgtacctcttggtctttgaataaagcctgagtaggaaggctagcaaaaaaaaaaaaaaaaaaaaaaaaaaaaaaaaaaaaaaaaaaaaaaaaaaaaaaaaaaaaaaaaaaaaaaaaaaaaaaaa

SEQ ID NO: 3270 - RNA, 5419 nt, synthetic construct
  source 1..5419: mol_type = other RNA
aggaaataagagagaaaagaagagtaagaagaaatataagagccaccatggcccctaagaagaagcgtaaagtgagccgggtgaacggcagcggcagcggcggcggcatgaaccacgaccaggagttcgacccccctaaggtgtaccctcccgtccccgccgagaagagaaagcccatccgggtcctgagcctgttcgatggcatcgccaccggtctgctggtgctgaaggacctgggcatccaggtggataggtacattgcctccgaggtgtgcgaggactccatcaccgtgggaatggtgcgtcatcagggcaagatcatgtacgtgggcgacgtgcggagcgtgacacagaagcatatccaggagtggggccctttcgacctggtgatcggcggcagcccttgcaatgacctgagcatcgtgaacccagcccggaagggcctgtacgagggaaccggcagactgttcttcgagttttacagactgctgcacgacgcccggcctaaggaaggcgacgaccggcccttcttttggctgttcgagaatgtggtggccatgggagtcagcgacaagcgggatattagccggttcctggagagcaaccccgtgatgatcgatgccaaggaagtgagcgccgcccaccgggccagatacttctggggcaatctgcctggcatgaacagacccctggccagcaccgtgaacgacaagctggagctgcaggagtgcctggagcacggccggatcgccaagttcagcaaggtgagaaccatcaccacccgaagcaacagcatcaaacaaggcaaggaccagcactttcctgtgttcatgaacgagaaggaggacatcctgtggtgtaccgagatggagagagtgttcgggttcccagtccactacacagatgtcagcaacatgtctagactggccagacagagactgctgggaagaagctggtccgtccctgtgatcagacacctgttcgcccctctgaaggagtacttcgcctgcgtgagcagcggcaacagcaacgccaacagccggggccccagcttctctagcggcctggtgccactgtccctgagagggagccacatgggccccatggagatctacaaaaccgtgagcgcctggaagcggcagcctgtgcgcgtgctgagcctgtttcggaatatcgataaagtcctgaaaagcctgggattcctggagagcggctctggctccggcggtggcaccctgaagtacgtggaggatgtgacaaacgtggtcagacgggatgtggagaagtggggccccttcgatctggtgtacggcagcacccaacccctgggcagctcttgtgaccggtgccctggctggtacatgtttcagttccaccggatcctgcagtacgccctgccgagacaggagtcccagcggccattcttttggattttcatggacaacttgctgctgaccgaggatgaccaggaaactaccactcggttcctgcagaccgaagccgtgaccctgcaggacgtgagaggccgggactaccagaacgccatgcgggtgtggtccaacatccctggactgaaaagcaagcacgcacctctgacccctaaagaagaggagtacctgcaggcccaggtgcggagcagaagcaagctggacgcccctaaggtggatctgctggtgaagaattgcctcctgcccctgagagagtacttcaagtatttcagccagaatagtctgcccctgggcggcccaagcagcggcgcccctcctcccagcggcggcagcccagccggctccccaacctctaccgaggagggcacctctgagtccgccacccccgagagcggccctggcacctccaccgagcccagcgagggcagcgcacccggcagccctgccggcagccccacctccacagaggagggaaccagcaccgagcccagcgaaggcagcgccccaggcaccagcaccgagcctagtgagggcggctctggcggcggcagcgcccaggagattaaacggatcaacaagatcagaagaagacttgtgaaagacagcaacaccaagaaggccggcaagacaggccccatgaaaaccctgctggttagagtgatgacacccgatctgagagagcggctggaaaacctgagaaagaagcctgaaaatatcccccagcccatcagcaatacatctagagccaacctgaataagctgctgaccgattacaccgaaatgaagaaggcgatcctgcatgtgtactgggaagagttccagaaggaccctgtgggcctgatgagccgggtggcccagcctgccagcaagaagatcgatcagaacaagctgaaacctgagatggacgagaagggcaacctgaccaccgccggctttgcctgctctcagtgtggccagcccctgttcgtgtacaagctggagcaggtgtctgagaagggcaaggcttacaccaactacttcggacggtgcaatgtggccgagcacgaaaagctgatcctgctggcccagctgaagcccgagaaggatagcgacgaagccgtgacatatagcctgggaaagtttgggcagagggccctggatttctacagcattcatgtgaccaaggagtccacccaccccgtgaagcccctggcccagatcgccggaaacagatacgcctccggacctgtgggaaaggccctgagcgacgcatgtatgggcacaatcgcctccttcctgtctaagtaccaggacatcatcatcgaacaccagaaggtggtgaagggcaaccagaagagactggagagcctgcgggagctggccggcaaggaaaacctggaataccctagcgtgaccctgccacctcagcctcacaccaaggagggcgttgatgcctacaacgaagtgatcgcccgggtgcgaatgtgggtgaacctgaacctgtggcagaagctgaagctaagcagagatgatgccaagcctctgctgagactgaagggattcccttcctttcctctggtcgagagacaggccaacgaagtggactggtgggacatggtgtgtaacgtgaagaagctgatcaacgagaaaaaggaggatggcaaggtgttttggcagaatctggctggctacaagagacaggaagccctgagaccatacctgagcagcgaggaagatcggaagaagggaaagaaattcgctcggtaccagctgggcgacctgctgctgcacctggaaaagaagcacggcgaggactggggaaaggtgtacgacgaggcctgggagcggattgacaagaaagtggaaggcctgagcaagcacatcaagctggaagaggaacggagaagcgaggacgcccagagcaaggccgccctgaccgactggctgcgggctaaggccagcttcgtgatcgagggcctgaaggaggccgacaaggacgagttctgcagatgcgagctgaagctgcagaagtggtacggggacctgcggggaaagcccttcgccatcgaagccgagaacagcatcctggacatcagcggcttcagcaagcagtacaactgtgccttcatctggcagaaggacggcgtgaagaagctgaacctgtacctgatcatcaactacttcaagggcggcaagctgcggttcaagaagatcaaacctgaagccttcgaagccaacagattctacaccgtgatcaacaaaaagagcggcgagatcgtgcccatggaggtgaacttcaacttcgacgaccccaacctgatcatcctgcctctggcctttggcaagagacagggcagagaattcatctggaacgacctgctgtccctggaaaccggcagcctgaagctggccaacggaagagtgatcgagaagacactgtacaacagaagaacccggcaggatgagcctgccctgttcgtggccctgaccttcgagcggcgggaggtcctggactcctccaatatcaaaccaatgaacctgatcggcgtggcaagaggcgaaaacatccccgccgtgatcgccctgaccgaccccgagggctgcccactgagccggtttaaggatagcctgggaaacccaacccacatcctgagaatcggcgagagctataaggagaagcagcggaccatccaggccaagaaggaggtggagcagcggagagccggcggctacagccggaagtacgccagcaaagccaagaatctggcagacgatatggtgagaaacaccgctagagatctgctgtactacgccgtgacccaggatgccatgctgatcttcgccaacctgagccggggcttcggccggcagggcaagcggaccttcatggccgagagacagtacacacggatggaggactggctgaccgccaagctggcctacgagggcctgagcaagacctacctgtccaagacactggcccagtacacctccaagacatgcagcaactgtgggtttaccatcaccagcgccgactacgacagggtgctggagaagctgaagaagacagcaacaggctggatgaccacaattaacggcaaggagctgaaggtggagggccagattacctactacaacagatacaagagacagaacgtagtcaaggacctgtccgtcgagctggatagactgagcgaagaatctgtgaacaacgacatctcctcctggacaaagggcagaagcggagaagctctgagcctcctgaagaaaagattctcccatagacccgtgcaggagaagttcgtgtgcctgaactgcggcttcgagacacacgcagccgagcaagccgccctgaacatcgccagatcctggctgttcctgcggagccaggagtacaagaaataccagacaaacaagacaaccggcaacaccgataagagagccttcgtcgagacctggcagtccttttaccggaagaagcttaaggaggtgtggaaacctgccgtgcggtctggcggatctggcggaggctccacaagcatgaacatggagggcctggtgatgttccaggacctgagcatcgacttcagccaggaggagtgggagtgcctggacgccgcccagaaggacctgtacagggacgtgatgatggagaactacagcagcctggtgagcctgggcctgagcatccccaagcccgacgtgatcagcctgctggagcagggcaaggagccctggatggtgagcagggacgtgctgggcggctggtgcaggggcctggagaccagccccaagaaaaagagaaaagtctaagctgccttctgcggggcttgccttctggccatgcccttcttctctcccttgcacctgtacctcttggtctttgaataaagcctgagtaggaaggctagcaaaaaaaaaaaaaaaaaaaaaaaaaaaaaaaaaaaaaaaaaaaaaaaaaaaaaaaaaaaaaaaaaaaaaaaaaaaaaaaa

SEQ ID NO: 3271 - RNA, 5419 nt, synthetic construct
  source 1..5419: mol_type = other RNA
aggaaataagagagaaaagaagagtaagaagaaatataagagccaccatggcccctaagaagaagcgtaaagtgagccgggtgaacggcagcggcagcggcggcggcatgaaccacgaccaggagttcgacccccctaaggtgtaccctcccgtccccgccgagaagagaaagcccatccgggtcctgagcctgttcgatggcatcgccaccggtctgctggtgctgaaggacctgggcatccaggtggataggtacattgcctccgaggtgtgcgaggactccatcaccgtgggaatggtgcgtcatcagggcaagatcatgtacgtgggcgacgtgcggagcgtgacacagaagcatatccaggagtggggccctttcgacctggtgatcggcggcagcccttgcaatgacctgagcatcgtgaacccagcccggaagggcctgtacgagggaaccggcagactgttcttcgagttttacagactgctgcacgacgcccggcctaaggaaggcgacgaccggcccttcttttggctgttcgagaatgtggtggccatgggagtcagcgacaagcgggatattagccggttcctggagagcaaccccgtgatgatcgatgccaaggaagtgagcgccgcccaccgggccagatacttctggggcaatctgcctggcatgaacagacccctggccagcaccgtgaacgacaagctggagctgcaggagtgcctggagcacggccggatcgccaagttcagcaaggtgagaaccatcaccacccgaagcaacagcatcaaacaaggcaaggaccagcactttcctgtgttcatgaacgagaaggaggacatcctgtggtgtaccgagatggagagagtgttcgggttcccagtccactacacagatgtcagcaacatgtctagactggccagacagagactgctgggaagaagctggtccgtccctgtgatcagacacctgttcgcccctctgaaggagtacttcgcctgcgtgagcagcggcaacagcaacgccaacagccggggccccagcttctctagcggcctggtgccactgtccctgagagggagccacatgggccccatggagatctacaaaaccgtgagcgcctggaagcggcagcctgtgcgcgtgctgagcctgtttcggaatatcgataaagtcctgaaaagcctgggattcctggagagcggctctggctccggcggtggcaccctgaagtacgtggaggatgtgacaaacgtggtcagacgggatgtggagaagtggggccccttcgatctggtgtacggcagcacccaacccctgggcagctcttgtgaccggtgccctggctggtacatgtttcagttccaccggatcctgcagtacgccctgccgagacaggagtcccagcggccattcttttggattttcatggacaacttgctgctgaccgaggatgaccaggaaactaccactcggttcctgcagaccgaagccgtgaccctgcaggacgtgagaggccgggactaccagaacgccatgcgggtgtggtccaacatccctggactgaaaagcaagcacgcacctctgacccctaaagaagaggagtacctgcaggcccaggtgcggagcagaagcaagctggacgcccctaaggtggatctgctggtgaagaattgcctcctgcccctgagagagtacttcaagtatttcagccagaatagtctgcccctgggcggcccaagcagcggcgcccctcctcccagcggcggcagcccagccggctccccaacctctaccgaggagggcacctctgagtccgccacccccgagagcggccctggcacctccaccgagcccagcgagggcagcgcacccggcagccctgccggcagccccacctccacagaggagggaaccagcaccgagcccagcgaaggcagcgccccaggcaccagcaccgagcctagtgagggcggctctggcggcggcagcgcccaggagattaaacggatcaacaagatcagaagaagacttgtgaaagacagcaacaccaagaaggccggcaagacaggccccatgaaaaccctgctggttagagtgatgacacccgatctgagagagcggctggaaaacctgagaaagaagcctgaaaatatcccccagcccatcagcaatacatctagagccaacctgaataagctgctgaccgattacaccgaaatgaagaaggcgatcctgcatgtgtactgggaagagttccagaaggaccctgtgggcctgatgagccgggtggcccagcctgccagcaagaagatcgatcagaacaagctgaaacctgagatggacgagaagggcaacctgaccaccgccggctttgcctgctctcagtgtggccagcccctgttcgtgtacaagctggagcaggtgtctgagaagggcaaggcttacaccaactacttcggacggtgcaatgtggccgagcacgaaaagctgatcctgctggcccagctgaagcccgagaaggatagcgacgaagccgtgacatatagcctgggaaagtttgggcagagggccctggatttctacagcattcatgtgaccaaggagtccacccaccccgtgaagcccctggcccagatcgccggaaacagatacgcctccggacctgtgggaaaggccctgagcgacgcatgtatgggcacaatcgcctccttcctgtctaagtaccaggacatcatcatcgaacaccagaaggtggtgaagggcaaccagaagagactggagagcctgcgggagctggccggcaaggaaaacctggaataccctagcgtgaccctgccacctcagcctcacaccaaggagggcgttgatgcctacaacgaagtgatcgcccgggtgcgaatgtgggtgaacctgaacctgtggcagaagctgaagctaagcagagatgatgccaagcctctgctgagactgaagggattcccttcctttcctctggtcgagagacaggccaacgaagtggactggtgggacatggtgtgtaacgtgaagaagctgatcaacgagaaaaaggaggatggcaaggtgttttggcagaatctggctggctacaagagacaggaagccctgagaccatacctgagcagcgaggaagatcggaagaagggaaagaaattcgctcggtaccagctgggcgacctgctgctgcacctggaaaagaagcacggcgaggactggggaaaggtgtacgacgaggcctgggagcggattgacaagaaagtggaaggcctgagcaagcacatcaagctggaagaggaacggagaagcgaggacgcccagagcaaggccgccctgaccgactggctgcgggctaaggccagcttcgtgatcgagggcctgaaggaggccgacaaggacgagttctgcagatgcgagctgaagctgcagaagtggtacggggacctgcggggaaagcccttcgccatcgaagccgagaacagcatcctggacatcagcggcttcagcaagcagtacaactgtgccttcatctggcagaaggacggcgtgaagaagctgaacctgtacctgatcatcaactacttcaagggcggcaagctgcggttcaagaagatcaaacctgaagccttcgaagccaacagattctacaccgtgatcaacaaaaagagcggcgagatcgtgcccatggaggtgaacttcaacttcgacgaccccaacctgatcatcctgcctctggcctttggcaagagacagggcagagaattcatctggaacgacctgctgtccctggaaaccggcagcctgaagctggccaacggaagagtgatcgagaagacactgtacaacagaagaacccggcaggatgagcctgccctgttcgtggccctgaccttcgagcggcgggaggtcctggactcctccaatatcaaaccaatgaacctgatcggcgtggcaagaggcgaaaacatccccgccgtgatcgccctgaccgaccccgagggctgcccactgagccggtttaaggatagcctgggaaacccaacccacatcctgagaatcggcgagagctataaggagaagcagcggaccatccaggccaagaaggaggtggagcagcggagagccggcggctacagccggaagtacgccagcaaagccaagaatctggcagacgatatggtgagaaacaccgctagagatctgctgtactacgccgtgacccaggatgccatgctgatcttcgccaacctgagccggggcttcggccggcagggcaagcggaccttcatggccgagagacagtacacacggatggaggactggctgaccgccaagctggcctacgagggcctgagcaagacctacctgtccaagacactggcccagtacacctccaagacatgcagcaactgtgggtttaccatcaccagcgccgactacgacagggtgctggagaagctgaagaagacagcaacaggctggatgaccacaattaacggcaaggagctgaaggtggagggccagattacctactacaacagatacaagagacagaacgtagtcaaggacctgtccgtcgagctggatagactgagcgaagaatctgtgaacaacgacatctcctcctggacaaagggcagaagcggagaagctctgagcctcctgaagaaaagattctcccatagacccgtgcaggagaagttcgtgtgcctgaactgcggcttcgagacacacgcagccgagcaagccgccctgaacatcgccagatcctggctgttcctgcggagccaggagtacaagaaataccagacaaacaagacaaccggcaacaccgataagagagccttcgtcgagacctggcagtccttttaccggaagaagcttaaggaggtgtggaaacctgccgtgcggtctggcggatctggcggaggctccacaagcatcaagagccccctgaccttcggcgacgtggccgtggagttcagcggcgaggagtgggcctggctggacagcgcccagaggagcctgcacaggagcgtgatgctggagaactacaggaacctggccagcctgggcctgtgcctgagcaagcccgagatgatcagcagcctggagcagaggaaggagccctgggccgtgaagaggaagagcaccagcggcaagtgccccgacctgcagaccctgaccagccccaagaaaaagagaaaagtctaagctgccttctgcggggcttgccttctggccatgcccttcttctctcccttgcacctgtacctcttggtctttgaataaagcctgagtaggaaggctagcaaaaaaaaaaaaaaaaaaaaaaaaaaaaaaaaaaaaaaaaaaaaaaaaaaaaaaaaaaaaaaaaaaaaaaaaaaaaaaaa

SEQ ID NO: 3272 - RNA, 5419 nt, synthetic construct
  source 1..5419: mol_type = other RNA
aggaaataagagagaaaagaagagtaagaagaaatataagagccaccatggcccctaagaagaagcgtaaagtgagccgggtgaacggcagcggcagcggcggcggcatgaaccacgaccaggagttcgacccccctaaggtgtaccctcccgtccccgccgagaagagaaagcccatccgggtcctgagcctgttcgatggcatcgccaccggtctgctggtgctgaaggacctgggcatccaggtggataggtacattgcctccgaggtgtgcgaggactccatcaccgtgggaatggtgcgtcatcagggcaagatcatgtacgtgggcgacgtgcggagcgtgacacagaagcatatccaggagtggggccctttcgacctggtgatcggcggcagcccttgcaatgacctgagcatcgtgaacccagcccggaagggcctgtacgagggaaccggcagactgttcttcgagttttacagactgctgcacgacgcccggcctaaggaaggcgacgaccggcccttcttttggctgttcgagaatgtggtggccatgggagtcagcgacaagcgggatattagccggttcctggagagcaaccccgtgatgatcgatgccaaggaagtgagcgccgcccaccgggccagatacttctggggcaatctgcctggcatgaacagacccctggccagcaccgtgaacgacaagctggagctgcaggagtgcctggagcacggccggatcgccaagttcagcaaggtgagaaccatcaccacccgaagcaacagcatcaaacaaggcaaggaccagcactttcctgtgttcatgaacgagaaggaggacatcctgtggtgtaccgagatggagagagtgttcgggttcccagtccactacacagatgtcagcaacatgtctagactggccagacagagactgctgggaagaagctggtccgtccctgtgatcagacacctgttcgcccctctgaaggagtacttcgcctgcgtgagcagcggcaacagcaacgccaacagccggggccccagcttctctagcggcctggtgccactgtccctgagagggagccacatgggccccatggagatctacaaaaccgtgagcgcctggaagcggcagcctgtgcgcgtgctgagcctgtttcggaatatcgataaagtcctgaaaagcctgggattcctggagagcggctctggctccggcggtggcaccctgaagtacgtggaggatgtgacaaacgtggtcagacgggatgtggagaagtggggccccttcgatctggtgtacggcagcacccaacccctgggcagctcttgtgaccggtgccctggctggtacatgtttcagttccaccggatcctgcagtacgccctgccgagacaggagtcccagcggccattcttttggattttcatggacaacttgctgctgaccgaggatgaccaggaaactaccactcggttcctgcagaccgaagccgtgaccctgcaggacgtgagaggccgggactaccagaacgccatgcgggtgtggtccaacatccctggactgaaaagcaagcacgcacctctgacccctaaagaagaggagtacctgcaggcccaggtgcggagcagaagcaagctggacgcccctaaggtggatctgctggtgaagaattgcctcctgcccctgagagagtacttcaagtatttcagccagaatagtctgcccctgggcggcccaagcagcggcgcccctcctcccagcggcggcagcccagccggctccccaacctctaccgaggagggcacctctgagtccgccacccccgagagcggccctggcacctccaccgagcccagcgagggcagcgcacccggcagccctgccggcagccccacctccacagaggagggaaccagcaccgagcccagcgaaggcagcgccccaggcaccagcaccgagcctagtgagggcggctctggcggcggcagcgcccaggagattaaacggatcaacaagatcagaagaagacttgtgaaagacagcaacaccaagaaggccggcaagacaggccccatgaaaaccctgctggttagagtgatgacacccgatctgagagagcggctggaaaacctgagaaagaagcctgaaaatatcccccagcccatcagcaatacatctagagccaacctgaataagctgctgaccgattacaccgaaatgaagaaggcgatcctgcatgtgtactgggaagagttccagaaggaccctgtgggcctgatgagccgggtggcccagcctgccagcaagaagatcgatcagaacaagctgaaacctgagatggacgagaagggcaacctgaccaccgccggctttgcctgctctcagtgtggccagcccctgttcgtgtacaagctggagcaggtgtctgagaagggcaaggcttacaccaactacttcggacggtgcaatgtggccgagcacgaaaagctgatcctgctggcccagctgaagcccgagaaggatagcgacgaagccgtgacatatagcctgggaaagtttgggcagagggccctggatttctacagcattcatgtgaccaaggagtccacccaccccgtgaagcccctggcccagatcgccggaaacagatacgcctccggacctgtgggaaaggccctgagcgacgcatgtatgggcacaatcgcctccttcctgtctaagtaccaggacatcatcatcgaacaccagaaggtggtgaagggcaaccagaagagactggagagcctgcgggagctggccggcaaggaaaacctggaataccctagcgtgaccctgccacctcagcctcacaccaaggagggcgttgatgcctacaacgaagtgatcgcccgggtgcgaatgtgggtgaacctgaacctgtggcagaagctgaagctaagcagagatgatgccaagcctctgctgagactgaagggattcccttcctttcctctggtcgagagacaggccaacgaagtggactggtgggacatggtgtgtaacgtgaagaagctgatcaacgagaaaaaggaggatggcaaggtgttttggcagaatctggctggctacaagagacaggaagccctgagaccatacctgagcagcgaggaagatcggaagaagggaaagaaattcgctcggtaccagctgggcgacctgctgctgcacctggaaaagaagcacggcgaggactggggaaaggtgtacgacgaggcctgggagcggattgacaagaaagtggaaggcctgagcaagcacatcaagctggaagaggaacggagaagcgaggacgcccagagcaaggccgccctgaccgactggctgcgggctaaggccagcttcgtgatcgagggcctgaaggaggccgacaaggacgagttctgcagatgcgagctgaagctgcagaagtggtacggggacctgcggggaaagcccttcgccatcgaagccgagaacagcatcctggacatcagcggcttcagcaagcagtacaactgtgccttcatctggcagaaggacggcgtgaagaagctgaacctgtacctgatcatcaactacttcaagggcggcaagctgcggttcaagaagatcaaacctgaagccttcgaagccaacagattctacaccgtgatcaacaaaaagagcggcgagatcgtgcccatggaggtgaacttcaacttcgacgaccccaacctgatcatcctgcctctggcctttggcaagagacagggcagagaattcatctggaacgacctgctgtccctggaaaccggcagcctgaagctggccaacggaagagtgatcgagaagacactgtacaacagaagaacccggcaggatgagcctgccctgttcgtggccctgaccttcgagcggcgggaggtcctggactcctccaatatcaaaccaatgaacctgatcggcgtggcaagaggcgaaaacatccccgccgtgatcgccctgaccgaccccgagggctgcccactgagccggtttaaggatagcctgggaaacccaacccacatcctgagaatcggcgagagctataaggagaagcagcggaccatccaggccaagaaggaggtggagcagcggagagccggcggctacagccggaagtacgccagcaaagccaagaatctggcagacgatatggtgagaaacaccgctagagatctgctgtactacgccgtgacccaggatgccatgctgatcttcgccaacctgagccggggcttcggccggcagggcaagcggaccttcatggccgagagacagtacacacggatggaggactggctgaccgccaagctggcctacgagggcctgagcaagacctacctgtccaagacactggcccagtacacctccaagacatgcagcaactgtgggtttaccatcaccagcgccgactacgacagggtgctggagaagctgaagaagacagcaacaggctggatgaccacaattaacggcaaggagctgaaggtggagggccagattacctactacaacagatacaagagacagaacgtagtcaaggacctgtccgtcgagctggatagactgagcgaagaatctgtgaacaacgacatctcctcctggacaaagggcagaagcggagaagctctgagcctcctgaagaaaagattctcccatagacccgtgcaggagaagttcgtgtgcctgaactgcggcttcgagacacacgcagccgagcaagccgccctgaacatcgccagatcctggctgttcctgcggagccaggagtacaagaaataccagacaaacaagacaaccggcaacaccgataagagagccttcgtcgagacctggcagtccttttaccggaagaagcttaaggaggtgtggaaacctgccgtgcggtctggcggatctggcggaggctccacaagcctgcccctgaccttcgaggacgtggccgtgtacttcagcgagcaggagtggcagaacctggaggcctggcagaaggagctgtacaagcaggtgatgagggccaactacgagatcctgctgagcctggacaacggcctgcccaagcccgagctgatcagctggatcgagcagggcaaggagctgttcaagaagtggggcgagagccagcagagcaggagcatcatctgcagcagcgccgacctgaccagccccaagaaaaagagaaaagtctaagctgccttctgcggggcttgccttctggccatgcccttcttctctcccttgcacctgtacctcttggtctttgaataaagcctgagtaggaaggctagcaaaaaaaaaaaaaaaaaaaaaaaaaaaaaaaaaaaaaaaaaaaaaaaaaaaaaaaaaaaaaaaaaaaaaaaaaaaaaaaa

SEQ ID NO: 3273 - RNA, 5419 nt, synthetic construct
  source 1..5419: mol_type = other RNA
aggaaataagagagaaaagaagagtaagaagaaatataagagccaccatggcccctaagaagaagcgtaaagtgagccgggtgaacggcagcggcagcggcggcggcatgaaccacgaccaggagttcgacccccctaaggtgtaccctcccgtccccgccgagaagagaaagcccatccgggtcctgagcctgttcgatggcatcgccaccggtctgctggtgctgaaggacctgggcatccaggtggataggtacattgcctccgaggtgtgcgaggactccatcaccgtgggaatggtgcgtcatcagggcaagatcatgtacgtgggcgacgtgcggagcgtgacacagaagcatatccaggagtggggccctttcgacctggtgatcggcggcagcccttgcaatgacctgagcatcgtgaacccagcccggaagggcctgtacgagggaaccggcagactgttcttcgagttttacagactgctgcacgacgcccggcctaaggaaggcgacgaccggcccttcttttggctgttcgagaatgtggtggccatgggagtcagcgacaagcgggatattagccggttcctggagagcaaccccgtgatgatcgatgccaaggaagtgagcgccgcccaccgggccagatacttctggggcaatctgcctggcatgaacagacccctggccagcaccgtgaacgacaagctggagctgcaggagtgcctggagcacggccggatcgccaagttcagcaaggtgagaaccatcaccacccgaagcaacagcatcaaacaaggcaaggaccagcactttcctgtgttcatgaacgagaaggaggacatcctgtggtgtaccgagatggagagagtgttcgggttcccagtccactacacagatgtcagcaacatgtctagactggccagacagagactgctgggaagaagctggtccgtccctgtgatcagacacctgttcgcccctctgaaggagtacttcgcctgcgtgagcagcggcaacagcaacgccaacagccggggccccagcttctctagcggcctggtgccactgtccctgagagggagccacatgggccccatggagatctacaaaaccgtgagcgcctggaagcggcagcctgtgcgcgtgctgagcctgtttcggaatatcgataaagtcctgaaaagcctgggattcctggagagcggctctggctccggcggtggcaccctgaagtacgtggaggatgtgacaaacgtggtcagacgggatgtggagaagtggggccccttcgatctggtgtacggcagcacccaacccctgggcagctcttgtgaccggtgccctggctggtacatgtttcagttccaccggatcctgcagtacgccctgccgagacaggagtcccagcggccattcttttggattttcatggacaacttgctgctgaccgaggatgaccaggaaactaccactcggttcctgcagaccgaagccgtgaccctgcaggacgtgagaggccgggactaccagaacgccatgcgggtgtggtccaacatccctggactgaaaagcaagcacgcacctctgacccctaaagaagaggagtacctgcaggcccaggtgcggagcagaagcaagctggacgcccctaaggtggatctgctggtgaagaattgcctcctgcccctgagagagtacttcaagtatttcagccagaatagtctgcccctgggcggcccaagcagcggcgcccctcctcccagcggcggcagcccagccggctccccaacctctaccgaggagggcacctctgagtccgccacccccgagagcggccctggcacctccaccgagcccagcgagggcagcgcacccggcagccctgccggcagccccacctccacagaggagggaaccagcaccgagcccagcgaaggcagcgccccaggcaccagcaccgagcctagtgagggcggctctggcggcggcagcgcccaggagattaaacggatcaacaagatcagaagaagacttgtgaaagacagcaacaccaagaaggccggcaagacaggccccatgaaaaccctgctggttagagtgatgacacccgatctgagagagcggctggaaaacctgagaaagaagcctgaaaatatcccccagcccatcagcaatacatctagagccaacctgaataagctgctgaccgattacaccgaaatgaagaaggcgatcctgcatgtgtactgggaagagttccagaaggaccctgtgggcctgatgagccgggtggcccagcctgccagcaagaagatcgatcagaacaagctgaaacctgagatggacgagaagggcaacctgaccaccgccggctttgcctgctctcagtgtggccagcccctgttcgtgtacaagctggagcaggtgtctgagaagggcaaggcttacaccaactacttcggacggtgcaatgtggccgagcacgaaaagctgatcctgctggcccagctgaagcccgagaaggatagcgacgaagccgtgacatatagcctgggaaagtttgggcagagggccctggatttctacagcattcatgtgaccaaggagtccacccaccccgtgaagcccctggcccagatcgccggaaacagatacgcctccggacctgtgggaaaggccctgagcgacgcatgtatgggcacaatcgcctccttcctgtctaagtaccaggacatcatcatcgaacaccagaaggtggtgaagggcaaccagaagagactggagagcctgcgggagctggccggcaaggaaaacctggaataccctagcgtgaccctgccacctcagcctcacaccaaggagggcgttgatgcctacaacgaagtgatcgcccgggtgcgaatgtgggtgaacctgaacctgtggcagaagctgaagctaagcagagatgatgccaagcctctgctgagactgaagggattcccttcctttcctctggtcgagagacaggccaacgaagtggactggtgggacatggtgtgtaacgtgaagaagctgatcaacgagaaaaaggaggatggcaaggtgttttggcagaatctggctggctacaagagacaggaagccctgagaccatacctgagcagcgaggaagatcggaagaagggaaagaaattcgctcggtaccagctgggcgacctgctgctgcacctggaaaagaagcacggcgaggactggggaaaggtgtacgacgaggcctgggagcggattgacaagaaagtggaaggcctgagcaagcacatcaagctggaagaggaacggagaagcgaggacgcccagagcaaggccgccctgaccgactggctgcgggctaaggccagcttcgtgatcgagggcctgaaggaggccgacaaggacgagttctgcagatgcgagctgaagctgcagaagtggtacggggacctgcggggaaagcccttcgccatcgaagccgagaacagcatcctggacatcagcggcttcagcaagcagtacaactgtgccttcatctggcagaaggacggcgtgaagaagctgaacctgtacctgatcatcaactacttcaagggcggcaagctgcggttcaagaagatcaaacctgaagccttcgaagccaacagattctacaccgtgatcaacaaaaagagcggcgagatcgtgcccatggaggtgaacttcaacttcgacgaccccaacctgatcatcctgcctctggcctttggcaagagacagggcagagaattcatctggaacgacctgctgtccctggaaaccggcagcctgaagctggccaacggaagagtgatcgagaagacactgtacaacagaagaacccggcaggatgagcctgccctgttcgtggccctgaccttcgagcggcgggaggtcctggactcctccaatatcaaaccaatgaacctgatcggcgtggcaagaggcgaaaacatccccgccgtgatcgccctgaccgaccccgagggctgcccactgagccggtttaaggatagcctgggaaacccaacccacatcctgagaatcggcgagagctataaggagaagcagcggaccatccaggccaagaaggaggtggagcagcggagagccggcggctacagccggaagtacgccagcaaagccaagaatctggcagacgatatggtgagaaacaccgctagagatctgctgtactacgccgtgacccaggatgccatgctgatcttcgccaacctgagccggggcttcggccggcagggcaagcggaccttcatggccgagagacagtacacacggatggaggactggctgaccgccaagctggcctacgagggcctgagcaagacctacctgtccaagacactggcccagtacacctccaagacatgcagcaactgtgggtttaccatcaccagcgccgactacgacagggtgctggagaagctgaagaagacagcaacaggctggatgaccacaattaacggcaaggagctgaaggtggagggccagattacctactacaacagatacaagagacagaacgtagtcaaggacctgtccgtcgagctggatagactgagcgaagaatctgtgaacaacgacatctcctcctggacaaagggcagaagcggagaagctctgagcctcctgaagaaaagattctcccatagacccgtgcaggagaagttcgtgtgcctgaactgcggcttcgagacacacgcagccgagcaagccgccctgaacatcgccagatcctggctgttcctgcggagccaggagtacaagaaataccagacaaacaagacaaccggcaacaccgataagagagccttcgtcgagacctggcagtccttttaccggaagaagcttaaggaggtgtggaaacctgccgtgcggtctggcggatctggcggaggctccacaagcctgcaggacctggtgaccttcaaggacgtgaccgtggagttcaaccaggaggagtgggccctgctggacagcagccagcagaagctgtacagggacgtgatgctggagaactacggcaacctggccagcctgggctaccacgtggacaagcccagcctgatcagccagctggagcaggaggacaaggtgatgaccgaggagggcggcatcctgcccggcacctgccccgacctggagaccgtgaccagccccaagaaaaagagaaaagtctaagctgccttctgcggggcttgccttctggccatgcccttcttctctcccttgcacctgtacctcttggtctttgaataaagcctgagtaggaaggctagcaaaaaaaaaaaaaaaaaaaaaaaaaaaaaaaaaaaaaaaaaaaaaaaaaaaaaaaaaaaaaaaaaaaaaaaaaaaaaaaa

SEQ ID NO: 3274 - RNA, 5419 nt, synthetic construct
  source 1..5419: mol_type = other RNA
aggaaataagagagaaaagaagagtaagaagaaatataagagccaccatggcccctaagaagaagcgtaaagtgagccgggtgaacggcagcggcagcggcggcggcatgaaccacgaccaggagttcgacccccctaaggtgtaccctcccgtccccgccgagaagagaaagcccatccgggtcctgagcctgttcgatggcatcgccaccggtctgctggtgctgaaggacctgggcatccaggtggataggtacattgcctccgaggtgtgcgaggactccatcaccgtgggaatggtgcgtcatcagggcaagatcatgtacgtgggcgacgtgcggagcgtgacacagaagcatatccaggagtggggccctttcgacctggtgatcggcggcagcccttgcaatgacctgagcatcgtgaacccagcccggaagggcctgtacgagggaaccggcagactgttcttcgagttttacagactgctgcacgacgcccggcctaaggaaggcgacgaccggcccttcttttggctgttcgagaatgtggtggccatgggagtcagcgacaagcgggatattagccggttcctggagagcaaccccgtgatgatcgatgccaaggaagtgagcgccgcccaccgggccagatacttctggggcaatctgcctggcatgaacagacccctggccagcaccgtgaacgacaagctggagctgcaggagtgcctggagcacggccggatcgccaagttcagcaaggtgagaaccatcaccacccgaagcaacagcatcaaacaaggcaaggaccagcactttcctgtgttcatgaacgagaaggaggacatcctgtggtgtaccgagatggagagagtgttcgggttcccagtccactacacagatgtcagcaacatgtctagactggccagacagagactgctgggaagaagctggtccgtccctgtgatcagacacctgttcgcccctctgaaggagtacttcgcctgcgtgagcagcggcaacagcaacgccaacagccggggccccagcttctctagcggcctggtgccactgtccctgagagggagccacatgggccccatggagatctacaaaaccgtgagcgcctggaagcggcagcctgtgcgcgtgctgagcctgtttcggaatatcgataaagtcctgaaaagcctgggattcctggagagcggctctggctccggcggtggcaccctgaagtacgtggaggatgtgacaaacgtggtcagacgggatgtggagaagtggggccccttcgatctggtgtacggcagcacccaacccctgggcagctcttgtgaccggtgccctggctggtacatgtttcagttccaccggatcctgcagtacgccctgccgagacaggagtcccagcggccattcttttggattttcatggacaacttgctgctgaccgaggatgaccaggaaactaccactcggttcctgcagaccgaagccgtgaccctgcaggacgtgagaggccgggactaccagaacgccatgcgggtgtggtccaacatccctggactgaaaagcaagcacgcacctctgacccctaaagaagaggagtacctgcaggcccaggtgcggagcagaagcaagctggacgcccctaaggtggatctgctggtgaagaattgcctcctgcccctgagagagtacttcaagtatttcagccagaatagtctgcccctgggcggcccaagcagcggcgcccctcctcccagcggcggcagcccagccggctccccaacctctaccgaggagggcacctctgagtccgccacccccgagagcggccctggcacctccaccgagcccagcgagggcagcgcacccggcagccctgccggcagccccacctccacagaggagggaaccagcaccgagcccagcgaaggcagcgccccaggcaccagcaccgagcctagtgagggcggctctggcggcggcagcgcccaggagattaaacggatcaacaagatcagaagaagacttgtgaaagacagcaacaccaagaaggccggcaagacaggccccatgaaaaccctgctggttagagtgatgacacccgatctgagagagcggctggaaaacctgagaaagaagcctgaaaatatcccccagcccatcagcaatacatctagagccaacctgaataagctgctgaccgattacaccgaaatgaagaaggcgatcctgcatgtgtactgggaagagttccagaaggaccctgtgggcctgatgagccgggtggcccagcctgccagcaagaagatcgatcagaacaagctgaaacctgagatggacgagaagggcaacctgaccaccgccggctttgcctgctctcagtgtggccagcccctgttcgtgtacaagctggagcaggtgtctgagaagggcaaggcttacaccaactacttcggacggtgcaatgtggccgagcacgaaaagctgatcctgctggcccagctgaagcccgagaaggatagcgacgaagccgtgacatatagcctgggaaagtttgggcagagggccctggatttctacagcattcatgtgaccaaggagtccacccaccccgtgaagcccctggcccagatcgccggaaacagatacgcctccggacctgtgggaaaggccctgagcgacgcatgtatgggcacaatcgcctccttcctgtctaagtaccaggacatcatcatcgaacaccagaaggtggtgaagggcaaccagaagagactggagagcctgcgggagctggccggcaaggaaaacctggaataccctagcgtgaccctgccacctcagcctcacaccaaggagggcgttgatgcctacaacgaagtgatcgcccgggtgcgaatgtgggtgaacctgaacctgtggcagaagctgaagctaagcagagatgatgccaagcctctgctgagactgaagggattcccttcctttcctctggtcgagagacaggccaacgaagtggactggtgggacatggtgtgtaacgtgaagaagctgatcaacgagaaaaaggaggatggcaaggtgttttggcagaatctggctggctacaagagacaggaagccctgagaccatacctgagcagcgaggaagatcggaagaagggaaagaaattcgctcggtaccagctgggcgacctgctgctgcacctggaaaagaagcacggcgaggactggggaaaggtgtacgacgaggcctgggagcggattgacaagaaagtggaaggcctgagcaagcacatcaagctggaagaggaacggagaagcgaggacgcccagagcaaggccgccctgaccgactggctgcgggctaaggccagcttcgtgatcgagggcctgaaggaggccgacaaggacgagttctgcagatgcgagctgaagctgcagaagtggtacggggacctgcggggaaagcccttcgccatcgaagccgagaacagcatcctggacatcagcggcttcagcaagcagtacaactgtgccttcatctggcagaaggacggcgtgaagaagctgaacctgtacctgatcatcaactacttcaagggcggcaagctgcggttcaagaagatcaaacctgaagccttcgaagccaacagattctacaccgtgatcaacaaaaagagcggcgagatcgtgcccatggaggtgaacttcaacttcgacgaccccaacctgatcatcctgcctctggcctttggcaagagacagggcagagaattcatctggaacgacctgctgtccctggaaaccggcagcctgaagctggccaacggaagagtgatcgagaagacactgtacaacagaagaacccggcaggatgagcctgccctgttcgtggccctgaccttcgagcggcgggaggtcctggactcctccaatatcaaaccaatgaacctgatcggcgtggcaagaggcgaaaacatccccgccgtgatcgccctgaccgaccccgagggctgcccactgagccggtttaaggatagcctgggaaacccaacccacatcctgagaatcggcgagagctataaggagaagcagcggaccatccaggccaagaaggaggtggagcagcggagagccggcggctacagccggaagtacgccagcaaagccaagaatctggcagacgatatggtgagaaacaccgctagagatctgctgtactacgccgtgacccaggatgccatgctgatcttcgccaacctgagccggggcttcggccggcagggcaagcggaccttcatggccgagagacagtacacacggatggaggactggctgaccgccaagctggcctacgagggcctgagcaagacctacctgtccaagacactggcccagtacacctccaagacatgcagcaactgtgggtttaccatcaccagcgccgactacgacagggtgctggagaagctgaagaagacagcaacaggctggatgaccacaattaacggcaaggagctgaaggtggagggccagattacctactacaacagatacaagagacagaacgtagtcaaggacctgtccgtcgagctggatagactgagcgaagaatctgtgaacaacgacatctcctcctggacaaagggcagaagcggagaagctctgagcctcctgaagaaaagattctcccatagacccgtgcaggagaagttcgtgtgcctgaactgcggcttcgagacacacgcagccgagcaagccgccctgaacatcgccagatcctggctgttcctgcggagccaggagtacaagaaataccagacaaacaagacaaccggcaacaccgataagagagccttcgtcgagacctggcagtccttttaccggaagaagcttaaggaggtgtggaaacctgccgtgcggtctggcggatctggcggaggctccacaagcgagcaggagcccgtgaccttcaaggacgtggccgtggacttcacccaggaggagtggggccagctggacctggtgcagaggaccctgtacagggacgtgatgctggagacctacggccacctgctgagcgtgggcaaccagaccgccaagcccgaggtgatcagcctgctggagcagggcgaggagccctggagcgtggagcagacctgcccccagagggcctgccccgagtggatgaggaacaccagccccaagaaaaagagaaaagtctaagctgccttctgcggggcttgccttctggccatgcccttcttctctcccttgcacctgtacctcttggtctttgaataaagcctgagtaggaaggctagcaaaaaaaaaaaaaaaaaaaaaaaaaaaaaaaaaaaaaaaaaaaaaaaaaaaaaaaaaaaaaaaaaaaaaaaaaaaaaaaa

SEQ ID NO: 3275 - RNA, 5419 nt, synthetic construct
  source 1..5419: mol_type = other RNA
aggaaataagagagaaaagaagagtaagaagaaatataagagccaccatggcccctaagaagaagcgtaaagtgagccgggtgaacggcagcggcagcggcggcggcatgaaccacgaccaggagttcgacccccctaaggtgtaccctcccgtccccgccgagaagagaaagcccatccgggtcctgagcctgttcgatggcatcgccaccggtctgctggtgctgaaggacctgggcatccaggtggataggtacattgcctccgaggtgtgcgaggactccatcaccgtgggaatggtgcgtcatcagggcaagatcatgtacgtgggcgacgtgcggagcgtgacacagaagcatatccaggagtggggccctttcgacctggtgatcggcggcagcccttgcaatgacctgagcatcgtgaacccagcccggaagggcctgtacgagggaaccggcagactgttcttcgagttttacagactgctgcacgacgcccggcctaaggaaggcgacgaccggcccttcttttggctgttcgagaatgtggtggccatgggagtcagcgacaagcgggatattagccggttcctggagagcaaccccgtgatgatcgatgccaaggaagtgagcgccgcccaccgggccagatacttctggggcaatctgcctggcatgaacagacccctggccagcaccgtgaacgacaagctggagctgcaggagtgcctggagcacggccggatcgccaagttcagcaaggtgagaaccatcaccacccgaagcaacagcatcaaacaaggcaaggaccagcactttcctgtgttcatgaacgagaaggaggacatcctgtggtgtaccgagatggagagagtgttcgggttcccagtccactacacagatgtcagcaacatgtctagactggccagacagagactgctgggaagaagctggtccgtccctgtgatcagacacctgttcgcccctctgaaggagtacttcgcctgcgtgagcagcggcaacagcaacgccaacagccggggccccagcttctctagcggcctggtgccactgtccctgagagggagccacatgggccccatggagatctacaaaaccgtgagcgcctggaagcggcagcctgtgcgcgtgctgagcctgtttcggaatatcgataaagtcctgaaaagcctgggattcctggagagcggctctggctccggcggtggcaccctgaagtacgtggaggatgtgacaaacgtggtcagacgggatgtggagaagtggggccccttcgatctggtgtacggcagcacccaacccctgggcagctcttgtgaccggtgccctggctggtacatgtttcagttccaccggatcctgcagtacgccctgccgagacaggagtcccagcggccattcttttggattttcatggacaacttgctgctgaccgaggatgaccaggaaactaccactcggttcctgcagaccgaagccgtgaccctgcaggacgtgagaggccgggactaccagaacgccatgcgggtgtggtccaacatccctggactgaaaagcaagcacgcacctctgacccctaaagaagaggagtacctgcaggcccaggtgcggagcagaagcaagctggacgcccctaaggtggatctgctggtgaagaattgcctcctgcccctgagagagtacttcaagtatttcagccagaatagtctgcccctgggcggcccaagcagcggcgcccctcctcccagcggcggcagcccagccggctccccaacctctaccgaggagggcacctctgagtccgccacccccgagagcggccctggcacctccaccgagcccagcgagggcagcgcacccggcagccctgccggcagccccacctccacagaggagggaaccagcaccgagcccagcgaaggcagcgccccaggcaccagcaccgagcctagtgagggcggctctggcggcggcagcgcccaggagattaaacggatcaacaagatcagaagaagacttgtgaaagacagcaacaccaagaaggccggcaagacaggccccatgaaaaccctgctggttagagtgatgacacccgatctgagagagcggctggaaaacctgagaaagaagcctgaaaatatcccccagcccatcagcaatacatctagagccaacctgaataagctgctgaccgattacaccgaaatgaagaaggcgatcctgcatgtgtactgggaagagttccagaaggaccctgtgggcctgatgagccgggtggcccagcctgccagcaagaagatcgatcagaacaagctgaaacctgagatggacgagaagggcaacctgaccaccgccggctttgcctgctctcagtgtggccagcccctgttcgtgtacaagctggagcaggtgtctgagaagggcaaggcttacaccaactacttcggacggtgcaatgtggccgagcacgaaaagctgatcctgctggcccagctgaagcccgagaaggatagcgacgaagccgtgacatatagcctgggaaagtttgggcagagggccctggatttctacagcattcatgtgaccaaggagtccacccaccccgtgaagcccctggcccagatcgccggaaacagatacgcctccggacctgtgggaaaggccctgagcgacgcatgtatgggcacaatcgcctccttcctgtctaagtaccaggacatcatcatcgaacaccagaaggtggtgaagggcaaccagaagagactggagagcctgcgggagctggccggcaaggaaaacctggaataccctagcgtgaccctgccacctcagcctcacaccaaggagggcgttgatgcctacaacgaagtgatcgcccgggtgcgaatgtgggtgaacctgaacctgtggcagaagctgaagctaagcagagatgatgccaagcctctgctgagactgaagggattcccttcctttcctctggtcgagagacaggccaacgaagtggactggtgggacatggtgtgtaacgtgaagaagctgatcaacgagaaaaaggaggatggcaaggtgttttggcagaatctggctggctacaagagacaggaagccctgagaccatacctgagcagcgaggaagatcggaagaagggaaagaaattcgctcggtaccagctgggcgacctgctgctgcacctggaaaagaagcacggcgaggactggggaaaggtgtacgacgaggcctgggagcggattgacaagaaagtggaaggcctgagcaagcacatcaagctggaagaggaacggagaagcgaggacgcccagagcaaggccgccctgaccgactggctgcgggctaaggccagcttcgtgatcgagggcctgaaggaggccgacaaggacgagttctgcagatgcgagctgaagctgcagaagtggtacggggacctgcggggaaagcccttcgccatcgaagccgagaacagcatcctggacatcagcggcttcagcaagcagtacaactgtgccttcatctggcagaaggacggcgtgaagaagctgaacctgtacctgatcatcaactacttcaagggcggcaagctgcggttcaagaagatcaaacctgaagccttcgaagccaacagattctacaccgtgatcaacaaaaagagcggcgagatcgtgcccatggaggtgaacttcaacttcgacgaccccaacctgatcatcctgcctctggcctttggcaagagacagggcagagaattcatctggaacgacctgctgtccctggaaaccggcagcctgaagctggccaacggaagagtgatcgagaagacactgtacaacagaagaacccggcaggatgagcctgccctgttcgtggccctgaccttcgagcggcgggaggtcctggactcctccaatatcaaaccaatgaacctgatcggcgtggcaagaggcgaaaacatccccgccgtgatcgccctgaccgaccccgagggctgcccactgagccggtttaaggatagcctgggaaacccaacccacatcctgagaatcggcgagagctataaggagaagcagcggaccatccaggccaagaaggaggtggagcagcggagagccggcggctacagccggaagtacgccagcaaagccaagaatctggcagacgatatggtgagaaacaccgctagagatctgctgtactacgccgtgacccaggatgccatgctgatcttcgccaacctgagccggggcttcggccggcagggcaagcggaccttcatggccgagagacagtacacacggatggaggactggctgaccgccaagctggcctacgagggcctgagcaagacctacctgtccaagacactggcccagtacacctccaagacatgcagcaactgtgggtttaccatcaccagcgccgactacgacagggtgctggagaagctgaagaagacagcaacaggctggatgaccacaattaacggcaaggagctgaaggtggagggccagattacctactacaacagatacaagagacagaacgtagtcaaggacctgtccgtcgagctggatagactgagcgaagaatctgtgaacaacgacatctcctcctggacaaagggcagaagcggagaagctctgagcctcctgaagaaaagattctcccatagacccgtgcaggagaagttcgtgtgcctgaactgcggcttcgagacacacgcagccgagcaagccgccctgaacatcgccagatcctggctgttcctgcggagccaggagtacaagaaataccagacaaacaagacaaccggcaacaccgataagagagccttcgtcgagacctggcagtccttttaccggaagaagcttaaggaggtgtggaaacctgccgtgcggtctggcggatctggcggaggctccacaagcatgcccctgaaggcccagtaccaggagatggtgaccttcgaggacgtggccgtgcacttcaccaagaccgagtggaccggcctgagccccgcccagagggccctgtacaggagcgtgatgctggagaacttcggcaacctgaccgccctgggctaccccgtgcccaagcccgccctgatcagcctgctggagggcggcgacatggcctggggcctggaggcccaggacgacccccccgccgagaccagccccaagaaaaagagaaaagtctaagctgccttctgcggggcttgccttctggccatgcccttcttctctcccttgcacctgtacctcttggtctttgaataaagcctgagtaggaaggctagcaaaaaaaaaaaaaaaaaaaaaaaaaaaaaaaaaaaaaaaaaaaaaaaaaaaaaaaaaaaaaaaaaaaaaaaaaaaaaaaa

SEQ ID NO: 3276 - RNA, 5419 nt, synthetic construct
  source 1..5419: mol_type = other RNA
aggaaataagagagaaaagaagagtaagaagaaatataagagccaccatggcccctaagaagaagcgtaaagtgagccgggtgaacggcagcggcagcggcggcggcatgaaccacgaccaggagttcgacccccctaaggtgtaccctcccgtccccgccgagaagagaaagcccatccgggtcctgagcctgttcgatggcatcgccaccggtctgctggtgctgaaggacctgggcatccaggtggataggtacattgcctccgaggtgtgcgaggactccatcaccgtgggaatggtgcgtcatcagggcaagatcatgtacgtgggcgacgtgcggagcgtgacacagaagcatatccaggagtggggccctttcgacctggtgatcggcggcagcccttgcaatgacctgagcatcgtgaacccagcccggaagggcctgtacgagggaaccggcagactgttcttcgagttttacagactgctgcacgacgcccggcctaaggaaggcgacgaccggcccttcttttggctgttcgagaatgtggtggccatgggagtcagcgacaagcgggatattagccggttcctggagagcaaccccgtgatgatcgatgccaaggaagtgagcgccgcccaccgggccagatacttctggggcaatctgcctggcatgaacagacccctggccagcaccgtgaacgacaagctggagctgcaggagtgcctggagcacggccggatcgccaagttcagcaaggtgagaaccatcaccacccgaagcaacagcatcaaacaaggcaaggaccagcactttcctgtgttcatgaacgagaaggaggacatcctgtggtgtaccgagatggagagagtgttcgggttcccagtccactacacagatgtcagcaacatgtctagactggccagacagagactgctgggaagaagctggtccgtccctgtgatcagacacctgttcgcccctctgaaggagtacttcgcctgcgtgagcagcggcaacagcaacgccaacagccggggccccagcttctctagcggcctggtgccactgtccctgagagggagccacatgggccccatggagatctacaaaaccgtgagcgcctggaagcggcagcctgtgcgcgtgctgagcctgtttcggaatatcgataaagtcctgaaaagcctgggattcctggagagcggctctggctccggcggtggcaccctgaagtacgtggaggatgtgacaaacgtggtcagacgggatgtggagaagtggggccccttcgatctggtgtacggcagcacccaacccctgggcagctcttgtgaccggtgccctggctggtacatgtttcagttccaccggatcctgcagtacgccctgccgagacaggagtcccagcggccattcttttggattttcatggacaacttgctgctgaccgaggatgaccaggaaactaccactcggttcctgcagaccgaagccgtgaccctgcaggacgtgagaggccgggactaccagaacgccatgcgggtgtggtccaacatccctggactgaaaagcaagcacgcacctctgacccctaaagaagaggagtacctgcaggcccaggtgcggagcagaagcaagctggacgcccctaaggtggatctgctggtgaagaattgcctcctgcccctgagagagtacttcaagtatttcagccagaatagtctgcccctgggcggcccaagcagcggcgcccctcctcccagcggcggcagcccagccggctccccaacctctaccgaggagggcacctctgagtccgccacccccgagagcggccctggcacctccaccgagcccagcgagggcagcgcacccggcagccctgccggcagccccacctccacagaggagggaaccagcaccgagcccagcgaaggcagcgccccaggcaccagcaccgagcctagtgagggcggctctggcggcggcagcgcccaggagattaaacggatcaacaagatcagaagaagacttgtgaaagacagcaacaccaagaaggccggcaagacaggccccatgaaaaccctgctggttagagtgatgacacccgatctgagagagcggctggaaaacctgagaaagaagcctgaaaatatcccccagcccatcagcaatacatctagagccaacctgaataagctgctgaccgattacaccgaaatgaagaaggcgatcctgcatgtgtactgggaagagttccagaaggaccctgtgggcctgatgagccgggtggcccagcctgccagcaagaagatcgatcagaacaagctgaaacctgagatggacgagaagggcaacctgaccaccgccggctttgcctgctctcagtgtggccagcccctgttcgtgtacaagctggagcaggtgtctgagaagggcaaggcttacaccaactacttcggacggtgcaatgtggccgagcacgaaaagctgatcctgctggcccagctgaagcccgagaaggatagcgacgaagccgtgacatatagcctgggaaagtttgggcagagggccctggatttctacagcattcatgtgaccaaggagtccacccaccccgtgaagcccctggcccagatcgccggaaacagatacgcctccggacctgtgggaaaggccctgagcgacgcatgtatgggcacaatcgcctccttcctgtctaagtaccaggacatcatcatcgaacaccagaaggtggtgaagggcaaccagaagagactggagagcctgcgggagctggccggcaaggaaaacctggaataccctagcgtgaccctgccacctcagcctcacaccaaggagggcgttgatgcctacaacgaagtgatcgcccgggtgcgaatgtgggtgaacctgaacctgtggcagaagctgaagctaagcagagatgatgccaagcctctgctgagactgaagggattcccttcctttcctctggtcgagagacaggccaacgaagtggactggtgggacatggtgtgtaacgtgaagaagctgatcaacgagaaaaaggaggatggcaaggtgttttggcagaatctggctggctacaagagacaggaagccctgagaccatacctgagcagcgaggaagatcggaagaagggaaagaaattcgctcggtaccagctgggcgacctgctgctgcacctggaaaagaagcacggcgaggactggggaaaggtgtacgacgaggcctgggagcggattgacaagaaagtggaaggcctgagcaagcacatcaagctggaagaggaacggagaagcgaggacgcccagagcaaggccgccctgaccgactggctgcgggctaaggccagcttcgtgatcgagggcctgaaggaggccgacaaggacgagttctgcagatgcgagctgaagctgcagaagtggtacggggacctgcggggaaagcccttcgccatcgaagccgagaacagcatcctggacatcagcggcttcagcaagcagtacaactgtgccttcatctggcagaaggacggcgtgaagaagctgaacctgtacctgatcatcaactacttcaagggcggcaagctgcggttcaagaagatcaaacctgaagccttcgaagccaacagattctacaccgtgatcaacaaaaagagcggcgagatcgtgcccatggaggtgaacttcaacttcgacgaccccaacctgatcatcctgcctctggcctttggcaagagacagggcagagaattcatctggaacgacctgctgtccctggaaaccggcagcctgaagctggccaacggaagagtgatcgagaagacactgtacaacagaagaacccggcaggatgagcctgccctgttcgtggccctgaccttcgagcggcgggaggtcctggactcctccaatatcaaaccaatgaacctgatcggcgtggcaagaggcgaaaacatccccgccgtgatcgccctgaccgaccccgagggctgcccactgagccggtttaaggatagcctgggaaacccaacccacatcctgagaatcggcgagagctataaggagaagcagcggaccatccaggccaagaaggaggtggagcagcggagagccggcggctacagccggaagtacgccagcaaagccaagaatctggcagacgatatggtgagaaacaccgctagagatctgctgtactacgccgtgacccaggatgccatgctgatcttcgccaacctgagccggggcttcggccggcagggcaagcggaccttcatggccgagagacagtacacacggatggaggactggctgaccgccaagctggcctacgagggcctgagcaagacctacctgtccaagacactggcccagtacacctccaagacatgcagcaactgtgggtttaccatcaccagcgccgactacgacagggtgctggagaagctgaagaagacagcaacaggctggatgaccacaattaacggcaaggagctgaaggtggagggccagattacctactacaacagatacaagagacagaacgtagtcaaggacctgtccgtcgagctggatagactgagcgaagaatctgtgaacaacgacatctcctcctggacaaagggcagaagcggagaagctctgagcctcctgaagaaaagattctcccatagacccgtgcaggagaagttcgtgtgcctgaactgcggcttcgagacacacgcagccgagcaagccgccctgaacatcgccagatcctggctgttcctgcggagccaggagtacaagaaataccagacaaacaagacaaccggcaacaccgataagagagccttcgtcgagacctggcagtccttttaccggaagaagcttaaggaggtgtggaaacctgccgtgcggtctggcggatctggcggaggctccacaagcgtgcccgccctggtgaccttcagggacgtggccgtggacttcacccaggaggagtggaggcacctggagcccgcccagagggccctgcacagggacgtgatgctggagaacttccagaacctggtgagcgtgggcctgcccgtgagcaaggtggacgtgatcagcctgctggagaggggcgaggccccctggcagcccgagggcggcggcccccccgacccctgctacgactacctgaactggaccagccccaagaaaaagagaaaagtctaagctgccttctgcggggcttgccttctggccatgcccttcttctctcccttgcacctgtacctcttggtctttgaataaagcctgagtaggaaggctagcaaaaaaaaaaaaaaaaaaaaaaaaaaaaaaaaaaaaaaaaaaaaaaaaaaaaaaaaaaaaaaaaaaaaaaaaaaaaaaaa

SEQ ID NO: 3277 - RNA, 5419 nt, synthetic construct
  source 1..5419: mol_type = other RNA
aggaaataagagagaaaagaagagtaagaagaaatataagagccaccatggcccctaagaagaagcgtaaagtgagccgggtgaacggcagcggcagcggcggcggcatgaaccacgaccaggagttcgacccccctaaggtgtaccctcccgtccccgccgagaagagaaagcccatccgggtcctgagcctgttcgatggcatcgccaccggtctgctggtgctgaaggacctgggcatccaggtggataggtacattgcctccgaggtgtgcgaggactccatcaccgtgggaatggtgcgtcatcagggcaagatcatgtacgtgggcgacgtgcggagcgtgacacagaagcatatccaggagtggggccctttcgacctggtgatcggcggcagcccttgcaatgacctgagcatcgtgaacccagcccggaagggcctgtacgagggaaccggcagactgttcttcgagttttacagactgctgcacgacgcccggcctaaggaaggcgacgaccggcccttcttttggctgttcgagaatgtggtggccatgggagtcagcgacaagcgggatattagccggttcctggagagcaaccccgtgatgatcgatgccaaggaagtgagcgccgcccaccgggccagatacttctggggcaatctgcctggcatgaacagacccctggccagcaccgtgaacgacaagctggagctgcaggagtgcctggagcacggccggatcgccaagttcagcaaggtgagaaccatcaccacccgaagcaacagcatcaaacaaggcaaggaccagcactttcctgtgttcatgaacgagaaggaggacatcctgtggtgtaccgagatggagagagtgttcgggttcccagtccactacacagatgtcagcaacatgtctagactggccagacagagactgctgggaagaagctggtccgtccctgtgatcagacacctgttcgcccctctgaaggagtacttcgcctgcgtgagcagcggcaacagcaacgccaacagccggggccccagcttctctagcggcctggtgccactgtccctgagagggagccacatgggccccatggagatctacaaaaccgtgagcgcctggaagcggcagcctgtgcgcgtgctgagcctgtttcggaatatcgataaagtcctgaaaagcctgggattcctggagagcggctctggctccggcggtggcaccctgaagtacgtggaggatgtgacaaacgtggtcagacgggatgtggagaagtggggccccttcgatctggtgtacggcagcacccaacccctgggcagctcttgtgaccggtgccctggctggtacatgtttcagttccaccggatcctgcagtacgccctgccgagacaggagtcccagcggccattcttttggattttcatggacaacttgctgctgaccgaggatgaccaggaaactaccactcggttcctgcagaccgaagccgtgaccctgcaggacgtgagaggccgggactaccagaacgccatgcgggtgtggtccaacatccctggactgaaaagcaagcacgcacctctgacccctaaagaagaggagtacctgcaggcccaggtgcggagcagaagcaagctggacgcccctaaggtggatctgctggtgaagaattgcctcctgcccctgagagagtacttcaagtatttcagccagaatagtctgcccctgggcggcccaagcagcggcgcccctcctcccagcggcggcagcccagccggctccccaacctctaccgaggagggcacctctgagtccgccacccccgagagcggccctggcacctccaccgagcccagcgagggcagcgcacccggcagccctgccggcagccccacctccacagaggagggaaccagcaccgagcccagcgaaggcagcgccccaggcaccagcaccgagcctagtgagggcggctctggcggcggcagcgcccaggagattaaacggatcaacaagatcagaagaagacttgtgaaagacagcaacaccaagaaggccggcaagacaggccccatgaaaaccctgctggttagagtgatgacacccgatctgagagagcggctggaaaacctgagaaagaagcctgaaaatatcccccagcccatcagcaatacatctagagccaacctgaataagctgctgaccgattacaccgaaatgaagaaggcgatcctgcatgtgtactgggaagagttccagaaggaccctgtgggcctgatgagccgggtggcccagcctgccagcaagaagatcgatcagaacaagctgaaacctgagatggacgagaagggcaacctgaccaccgccggctttgcctgctctcagtgtggccagcccctgttcgtgtacaagctggagcaggtgtctgagaagggcaaggcttacaccaactacttcggacggtgcaatgtggccgagcacgaaaagctgatcctgctggcccagctgaagcccgagaaggatagcgacgaagccgtgacatatagcctgggaaagtttgggcagagggccctggatttctacagcattcatgtgaccaaggagtccacccaccccgtgaagcccctggcccagatcgccggaaacagatacgcctccggacctgtgggaaaggccctgagcgacgcatgtatgggcacaatcgcctccttcctgtctaagtaccaggacatcatcatcgaacaccagaaggtggtgaagggcaaccagaagagactggagagcctgcgggagctggccggcaaggaaaacctggaataccctagcgtgaccctgccacctcagcctcacaccaaggagggcgttgatgcctacaacgaagtgatcgcccgggtgcgaatgtgggtgaacctgaacctgtggcagaagctgaagctaagcagagatgatgccaagcctctgctgagactgaagggattcccttcctttcctctggtcgagagacaggccaacgaagtggactggtgggacatggtgtgtaacgtgaagaagctgatcaacgagaaaaaggaggatggcaaggtgttttggcagaatctggctggctacaagagacaggaagccctgagaccatacctgagcagcgaggaagatcggaagaagggaaagaaattcgctcggtaccagctgggcgacctgctgctgcacctggaaaagaagcacggcgaggactggggaaaggtgtacgacgaggcctgggagcggattgacaagaaagtggaaggcctgagcaagcacatcaagctggaagaggaacggagaagcgaggacgcccagagcaaggccgccctgaccgactggctgcgggctaaggccagcttcgtgatcgagggcctgaaggaggccgacaaggacgagttctgcagatgcgagctgaagctgcagaagtggtacggggacctgcggggaaagcccttcgccatcgaagccgagaacagcatcctggacatcagcggcttcagcaagcagtacaactgtgccttcatctggcagaaggacggcgtgaagaagctgaacctgtacctgatcatcaactacttcaagggcggcaagctgcggttcaagaagatcaaacctgaagccttcgaagccaacagattctacaccgtgatcaacaaaaagagcggcgagatcgtgcccatggaggtgaacttcaacttcgacgaccccaacctgatcatcctgcctctggcctttggcaagagacagggcagagaattcatctggaacgacctgctgtccctggaaaccggcagcctgaagctggccaacggaagagtgatcgagaagacactgtacaacagaagaacccggcaggatgagcctgccctgttcgtggccctgaccttcgagcggcgggaggtcctggactcctccaatatcaaaccaatgaacctgatcggcgtggcaagaggcgaaaacatccccgccgtgatcgccctgaccgaccccgagggctgcccactgagccggtttaaggatagcctgggaaacccaacccacatcctgagaatcggcgagagctataaggagaagcagcggaccatccaggccaagaaggaggtggagcagcggagagccggcggctacagccggaagtacgccagcaaagccaagaatctggcagacgatatggtgagaaacaccgctagagatctgctgtactacgccgtgacccaggatgccatgctgatcttcgccaacctgagccggggcttcggccggcagggcaagcggaccttcatggccgagagacagtacacacggatggaggactggctgaccgccaagctggcctacgagggcctgagcaagacctacctgtccaagacactggcccagtacacctccaagacatgcagcaactgtgggtttaccatcaccagcgccgactacgacagggtgctggagaagctgaagaagacagcaacaggctggatgaccacaattaacggcaaggagctgaaggtggagggccagattacctactacaacagatacaagagacagaacgtagtcaaggacctgtccgtcgagctggatagactgagcgaagaatctgtgaacaacgacatctcctcctggacaaagggcagaagcggagaagctctgagcctcctgaagaaaagattctcccatagacccgtgcaggagaagttcgtgtgcctgaactgcggcttcgagacacacgcagccgagcaagccgccctgaacatcgccagatcctggctgttcctgcggagccaggagtacaagaaataccagacaaacaagacaaccggcaacaccgataagagagccttcgtcgagacctggcagtccttttaccggaagaagcttaaggaggtgtggaaacctgccgtgcggtctggcggatctggcggaggctccacaagcgcccaggagagcctgaccttcgacgacgtggccgtggagttcacctgggaggagtggcagctgctggcccccgcccagaaggacctgtacagggacgtgatgctggagaactacagcaacctggtgagcgtgggctaccaggccagcaagcccgacgccctgagcaagctggtgcagggcgagcccccctggaccatggaggacgagatccactgcaggacccacagcgagatctgggaggtgaccagccccaagaaaaagagaaaagtctaagctgccttctgcggggcttgccttctggccatgcccttcttctctcccttgcacctgtacctcttggtctttgaataaagcctgagtaggaaggctagcaaaaaaaaaaaaaaaaaaaaaaaaaaaaaaaaaaaaaaaaaaaaaaaaaaaaaaaaaaaaaaaaaaaaaaaaaaaaaaaa

SEQ ID NO: 3278 - RNA, 5419 nt, synthetic construct
  source 1..5419: mol_type = other RNA
aggaaataagagagaaaagaagagtaagaagaaatataagagccaccatggcccctaagaagaagcgtaaagtgagccgggtgaacggcagcggcagcggcggcggcatgaaccacgaccaggagttcgacccccctaaggtgtaccctcccgtccccgccgagaagagaaagcccatccgggtcctgagcctgttcgatggcatcgccaccggtctgctggtgctgaaggacctgggcatccaggtggataggtacattgcctccgaggtgtgcgaggactccatcaccgtgggaatggtgcgtcatcagggcaagatcatgtacgtgggcgacgtgcggagcgtgacacagaagcatatccaggagtggggccctttcgacctggtgatcggcggcagcccttgcaatgacctgagcatcgtgaacccagcccggaagggcctgtacgagggaaccggcagactgttcttcgagttttacagactgctgcacgacgcccggcctaaggaaggcgacgaccggcccttcttttggctgttcgagaatgtggtggccatgggagtcagcgacaagcgggatattagccggttcctggagagcaaccccgtgatgatcgatgccaaggaagtgagcgccgcccaccgggccagatacttctggggcaatctgcctggcatgaacagacccctggccagcaccgtgaacgacaagctggagctgcaggagtgcctggagcacggccggatcgccaagttcagcaaggtgagaaccatcaccacccgaagcaacagcatcaaacaaggcaaggaccagcactttcctgtgttcatgaacgagaaggaggacatcctgtggtgtaccgagatggagagagtgttcgggttcccagtccactacacagatgtcagcaacatgtctagactggccagacagagactgctgggaagaagctggtccgtccctgtgatcagacacctgttcgcccctctgaaggagtacttcgcctgcgtgagcagcggcaacagcaacgccaacagccggggccccagcttctctagcggcctggtgccactgtccctgagagggagccacatgggccccatggagatctacaaaaccgtgagcgcctggaagcggcagcctgtgcgcgtgctgagcctgtttcggaatatcgataaagtcctgaaaagcctgggattcctggagagcggctctggctccggcggtggcaccctgaagtacgtggaggatgtgacaaacgtggtcagacgggatgtggagaagtggggccccttcgatctggtgtacggcagcacccaacccctgggcagctcttgtgaccggtgccctggctggtacatgtttcagttccaccggatcctgcagtacgccctgccgagacaggagtcccagcggccattcttttggattttcatggacaacttgctgctgaccgaggatgaccaggaaactaccactcggttcctgcagaccgaagccgtgaccctgcaggacgtgagaggccgggactaccagaacgccatgcgggtgtggtccaacatccctggactgaaaagcaagcacgcacctctgacccctaaagaagaggagtacctgcaggcccaggtgcggagcagaagcaagctggacgcccctaaggtggatctgctggtgaagaattgcctcctgcccctgagagagtacttcaagtatttcagccagaatagtctgcccctgggcggcccaagcagcggcgcccctcctcccagcggcggcagcccagccggctccccaacctctaccgaggagggcacctctgagtccgccacccccgagagcggccctggcacctccaccgagcccagcgagggcagcgcacccggcagccctgccggcagccccacctccacagaggagggaaccagcaccgagcccagcgaaggcagcgccccaggcaccagcaccgagcctagtgagggcggctctggcggcggcagcgcccaggagattaaacggatcaacaagatcagaagaagacttgtgaaagacagcaacaccaagaaggccggcaagacaggccccatgaaaaccctgctggttagagtgatgacacccgatctgagagagcggctggaaaacctgagaaagaagcctgaaaatatcccccagcccatcagcaatacatctagagccaacctgaataagctgctgaccgattacaccgaaatgaagaaggcgatcctgcatgtgtactgggaagagttccagaaggaccctgtgggcctgatgagccgggtggcccagcctgccagcaagaagatcgatcagaacaagctgaaacctgagatggacgagaagggcaacctgaccaccgccggctttgcctgctctcagtgtggccagcccctgttcgtgtacaagctggagcaggtgtctgagaagggcaaggcttacaccaactacttcggacggtgcaatgtggccgagcacgaaaagctgatcctgctggcccagctgaagcccgagaaggatagcgacgaagccgtgacatatagcctgggaaagtttgggcagagggccctggatttctacagcattcatgtgaccaaggagtccacccaccccgtgaagcccctggcccagatcgccggaaacagatacgcctccggacctgtgggaaaggccctgagcgacgcatgtatgggcacaatcgcctccttcctgtctaagtaccaggacatcatcatcgaacaccagaaggtggtgaagggcaaccagaagagactggagagcctgcgggagctggccggcaaggaaaacctggaataccctagcgtgaccctgccacctcagcctcacaccaaggagggcgttgatgcctacaacgaagtgatcgcccgggtgcgaatgtgggtgaacctgaacctgtggcagaagctgaagctaagcagagatgatgccaagcctctgctgagactgaagggattcccttcctttcctctggtcgagagacaggccaacgaagtggactggtgggacatggtgtgtaacgtgaagaagctgatcaacgagaaaaaggaggatggcaaggtgttttggcagaatctggctggctacaagagacaggaagccctgagaccatacctgagcagcgaggaagatcggaagaagggaaagaaattcgctcggtaccagctgggcgacctgctgctgcacctggaaaagaagcacggcgaggactggggaaaggtgtacgacgaggcctgggagcggattgacaagaaagtggaaggcctgagcaagcacatcaagctggaagaggaacggagaagcgaggacgcccagagcaaggccgccctgaccgactggctgcgggctaaggccagcttcgtgatcgagggcctgaaggaggccgacaaggacgagttctgcagatgcgagctgaagctgcagaagtggtacggggacctgcggggaaagcccttcgccatcgaagccgagaacagcatcctggacatcagcggcttcagcaagcagtacaactgtgccttcatctggcagaaggacggcgtgaagaagctgaacctgtacctgatcatcaactacttcaagggcggcaagctgcggttcaagaagatcaaacctgaagccttcgaagccaacagattctacaccgtgatcaacaaaaagagcggcgagatcgtgcccatggaggtgaacttcaacttcgacgaccccaacctgatcatcctgcctctggcctttggcaagagacagggcagagaattcatctggaacgacctgctgtccctggaaaccggcagcctgaagctggccaacggaagagtgatcgagaagacactgtacaacagaagaacccggcaggatgagcctgccctgttcgtggccctgaccttcgagcggcgggaggtcctggactcctccaatatcaaaccaatgaacctgatcggcgtggcaagaggcgaaaacatccccgccgtgatcgccctgaccgaccccgagggctgcccactgagccggtttaaggatagcctgggaaacccaacccacatcctgagaatcggcgagagctataaggagaagcagcggaccatccaggccaagaaggaggtggagcagcggagagccggcggctacagccggaagtacgccagcaaagccaagaatctggcagacgatatggtgagaaacaccgctagagatctgctgtactacgccgtgacccaggatgccatgctgatcttcgccaacctgagccggggcttcggccggcagggcaagcggaccttcatggccgagagacagtacacacggatggaggactggctgaccgccaagctggcctacgagggcctgagcaagacctacctgtccaagacactggcccagtacacctccaagacatgcagcaactgtgggtttaccatcaccagcgccgactacgacagggtgctggagaagctgaagaagacagcaacaggctggatgaccacaattaacggcaaggagctgaaggtggagggccagattacctactacaacagatacaagagacagaacgtagtcaaggacctgtccgtcgagctggatagactgagcgaagaatctgtgaacaacgacatctcctcctggacaaagggcagaagcggagaagctctgagcctcctgaagaaaagattctcccatagacccgtgcaggagaagttcgtgtgcctgaactgcggcttcgagacacacgcagccgagcaagccgccctgaacatcgccagatcctggctgttcctgcggagccaggagtacaagaaataccagacaaacaagacaaccggcaacaccgataagagagccttcgtcgagacctggcagtccttttaccggaagaagcttaaggaggtgtggaaacctgccgtgcggtctggcggatctggcggaggctccacaagcttccaggagagcgtgaccttcaaggacgtgaccgtgaacttcacccaggaggagtgggagcagctgaaccccgcccagagggagctgtacagggacgtgatgctggagaactacaggaacctgatcagcctgggcctgcccatcagcaagcccgacgtgatcttccagctggagcagggccaggagccctggatgctggacgtgcagggcaccgagaggcaggccgtgcccaggagcaccagcaccagccccaagaaaaagagaaaagtctaagctgccttctgcggggcttgccttctggccatgcccttcttctctcccttgcacctgtacctcttggtctttgaataaagcctgagtaggaaggctagcaaaaaaaaaaaaaaaaaaaaaaaaaaaaaaaaaaaaaaaaaaaaaaaaaaaaaaaaaaaaaaaaaaaaaaaaaaaaaaaa

SEQ ID NO: 3279 - RNA, 5419 nt, synthetic construct
  source 1..5419: mol_type = other RNA
aggaaataagagagaaaagaagagtaagaagaaatataagagccaccatggcccctaagaagaagcgtaaagtgagccgggtgaacggcagcggcagcggcggcggcatgaaccacgaccaggagttcgacccccctaaggtgtaccctcccgtccccgccgagaagagaaagcccatccgggtcctgagcctgttcgatggcatcgccaccggtctgctggtgctgaaggacctgggcatccaggtggataggtacattgcctccgaggtgtgcgaggactccatcaccgtgggaatggtgcgtcatcagggcaagatcatgtacgtgggcgacgtgcggagcgtgacacagaagcatatccaggagtggggccctttcgacctggtgatcggcggcagcccttgcaatgacctgagcatcgtgaacccagcccggaagggcctgtacgagggaaccggcagactgttcttcgagttttacagactgctgcacgacgcccggcctaaggaaggcgacgaccggcccttcttttggctgttcgagaatgtggtggccatgggagtcagcgacaagcgggatattagccggttcctggagagcaaccccgtgatgatcgatgccaaggaagtgagcgccgcccaccgggccagatacttctggggcaatctgcctggcatgaacagacccctggccagcaccgtgaacgacaagctggagctgcaggagtgcctggagcacggccggatcgccaagttcagcaaggtgagaaccatcaccacccgaagcaacagcatcaaacaaggcaaggaccagcactttcctgtgttcatgaacgagaaggaggacatcctgtggtgtaccgagatggagagagtgttcgggttcccagtccactacacagatgtcagcaacatgtctagactggccagacagagactgctgggaagaagctggtccgtccctgtgatcagacacctgttcgcccctctgaaggagtacttcgcctgcgtgagcagcggcaacagcaacgccaacagccggggccccagcttctctagcggcctggtgccactgtccctgagagggagccacatgggccccatggagatctacaaaaccgtgagcgcctggaagcggcagcctgtgcgcgtgctgagcctgtttcggaatatcgataaagtcctgaaaagcctgggattcctggagagcggctctggctccggcggtggcaccctgaagtacgtggaggatgtgacaaacgtggtcagacgggatgtggagaagtggggccccttcgatctggtgtacggcagcacccaacccctgggcagctcttgtgaccggtgccctggctggtacatgtttcagttccaccggatcctgcagtacgccctgccgagacaggagtcccagcggccattcttttggattttcatggacaacttgctgctgaccgaggatgaccaggaaactaccactcggttcctgcagaccgaagccgtgaccctgcaggacgtgagaggccgggactaccagaacgccatgcgggtgtggtccaacatccctggactgaaaagcaagcacgcacctctgacccctaaagaagaggagtacctgcaggcccaggtgcggagcagaagcaagctggacgcccctaaggtggatctgctggtgaagaattgcctcctgcccctgagagagtacttcaagtatttcagccagaatagtctgcccctgggcggcccaagcagcggcgcccctcctcccagcggcggcagcccagccggctccccaacctctaccgaggagggcacctctgagtccgccacccccgagagcggccctggcacctccaccgagcccagcgagggcagcgcacccggcagccctgccggcagccccacctccacagaggagggaaccagcaccgagcccagcgaaggcagcgccccaggcaccagcaccgagcctagtgagggcggctctggcggcggcagcgcccaggagattaaacggatcaacaagatcagaagaagacttgtgaaagacagcaacaccaagaaggccggcaagacaggccccatgaaaaccctgctggttagagtgatgacacccgatctgagagagcggctggaaaacctgagaaagaagcctgaaaatatcccccagcccatcagcaatacatctagagccaacctgaataagctgctgaccgattacaccgaaatgaagaaggcgatcctgcatgtgtactgggaagagttccagaaggaccctgtgggcctgatgagccgggtggcccagcctgccagcaagaagatcgatcagaacaagctgaaacctgagatggacgagaagggcaacctgaccaccgccggctttgcctgctctcagtgtggccagcccctgttcgtgtacaagctggagcaggtgtctgagaagggcaaggcttacaccaactacttcggacggtgcaatgtggccgagcacgaaaagctgatcctgctggcccagctgaagcccgagaaggatagcgacgaagccgtgacatatagcctgggaaagtttgggcagagggccctggatttctacagcattcatgtgaccaaggagtccacccaccccgtgaagcccctggcccagatcgccggaaacagatacgcctccggacctgtgggaaaggccctgagcgacgcatgtatgggcacaatcgcctccttcctgtctaagtaccaggacatcatcatcgaacaccagaaggtggtgaagggcaaccagaagagactggagagcctgcgggagctggccggcaaggaaaacctggaataccctagcgtgaccctgccacctcagcctcacaccaaggagggcgttgatgcctacaacgaagtgatcgcccgggtgcgaatgtgggtgaacctgaacctgtggcagaagctgaagctaagcagagatgatgccaagcctctgctgagactgaagggattcccttcctttcctctggtcgagagacaggccaacgaagtggactggtgggacatggtgtgtaacgtgaagaagctgatcaacgagaaaaaggaggatggcaaggtgttttggcagaatctggctggctacaagagacaggaagccctgagaccatacctgagcagcgaggaagatcggaagaagggaaagaaattcgctcggtaccagctgggcgacctgctgctgcacctggaaaagaagcacggcgaggactggggaaaggtgtacgacgaggcctgggagcggattgacaagaaagtggaaggcctgagcaagcacatcaagctggaagaggaacggagaagcgaggacgcccagagcaaggccgccctgaccgactggctgcgggctaaggccagcttcgtgatcgagggcctgaaggaggccgacaaggacgagttctgcagatgcgagctgaagctgcagaagtggtacggggacctgcggggaaagcccttcgccatcgaagccgagaacagcatcctggacatcagcggcttcagcaagcagtacaactgtgccttcatctggcagaaggacggcgtgaagaagctgaacctgtacctgatcatcaactacttcaagggcggcaagctgcggttcaagaagatcaaacctgaagccttcgaagccaacagattctacaccgtgatcaacaaaaagagcggcgagatcgtgcccatggaggtgaacttcaacttcgacgaccccaacctgatcatcctgcctctggcctttggcaagagacagggcagagaattcatctggaacgacctgctgtccctggaaaccggcagcctgaagctggccaacggaagagtgatcgagaagacactgtacaacagaagaacccggcaggatgagcctgccctgttcgtggccctgaccttcgagcggcgggaggtcctggactcctccaatatcaaaccaatgaacctgatcggcgtggcaagaggcgaaaacatccccgccgtgatcgccctgaccgaccccgagggctgcccactgagccggtttaaggatagcctgggaaacccaacccacatcctgagaatcggcgagagctataaggagaagcagcggaccatccaggccaagaaggaggtggagcagcggagagccggcggctacagccggaagtacgccagcaaagccaagaatctggcagacgatatggtgagaaacaccgctagagatctgctgtactacgccgtgacccaggatgccatgctgatcttcgccaacctgagccggggcttcggccggcagggcaagcggaccttcatggccgagagacagtacacacggatggaggactggctgaccgccaagctggcctacgagggcctgagcaagacctacctgtccaagacactggcccagtacacctccaagacatgcagcaactgtgggtttaccatcaccagcgccgactacgacagggtgctggagaagctgaagaagacagcaacaggctggatgaccacaattaacggcaaggagctgaaggtggagggccagattacctactacaacagatacaagagacagaacgtagtcaaggacctgtccgtcgagctggatagactgagcgaagaatctgtgaacaacgacatctcctcctggacaaagggcagaagcggagaagctctgagcctcctgaagaaaagattctcccatagacccgtgcaggagaagttcgtgtgcctgaactgcggcttcgagacacacgcagccgagcaagccgccctgaacatcgccagatcctggctgttcctgcggagccaggagtacaagaaataccagacaaacaagacaaccggcaacaccgataagagagccttcgtcgagacctggcagtccttttaccggaagaagcttaaggaggtgtggaaacctgccgtgcggtctggcggatctggcggaggctccacaagcgtggccttcgaggacgtggccgtgtacttcaccgccgaggagtgggacctgctgggccccaaccagaagagcctgtacagcgaggtgatgatggagaactacgagaacgtgagctacctggccgacaactggaagaagaccatcgccttcgcccacagccagaaggacttcatccacaagctgcaccagaggacccacaaggaggacgagcaccacaccagggccgagccctgcgagagcaccaccagccccaagaaaaagagaaaagtctaagctgccttctgcggggcttgccttctggccatgcccttcttctctcccttgcacctgtacctcttggtctttgaataaagcctgagtaggaaggctagcaaaaaaaaaaaaaaaaaaaaaaaaaaaaaaaaaaaaaaaaaaaaaaaaaaaaaaaaaaaaaaaaaaaaaaaaaaaaaaaa

SEQ ID NO: 3280 - RNA, 5419 nt, synthetic construct
  source 1..5419: mol_type = other RNA
aggaaataagagagaaaagaagagtaagaagaaatataagagccaccatggcccctaagaagaagcgtaaagtgagccgggtgaacggcagcggcagcggcggcggcatgaaccacgaccaggagttcgacccccctaaggtgtaccctcccgtccccgccgagaagagaaagcccatccgggtcctgagcctgttcgatggcatcgccaccggtctgctggtgctgaaggacctgggcatccaggtggataggtacattgcctccgaggtgtgcgaggactccatcaccgtgggaatggtgcgtcatcagggcaagatcatgtacgtgggcgacgtgcggagcgtgacacagaagcatatccaggagtggggccctttcgacctggtgatcggcggcagcccttgcaatgacctgagcatcgtgaacccagcccggaagggcctgtacgagggaaccggcagactgttcttcgagttttacagactgctgcacgacgcccggcctaaggaaggcgacgaccggcccttcttttggctgttcgagaatgtggtggccatgggagtcagcgacaagcgggatattagccggttcctggagagcaaccccgtgatgatcgatgccaaggaagtgagcgccgcccaccgggccagatacttctggggcaatctgcctggcatgaacagacccctggccagcaccgtgaacgacaagctggagctgcaggagtgcctggagcacggccggatcgccaagttcagcaaggtgagaaccatcaccacccgaagcaacagcatcaaacaaggcaaggaccagcactttcctgtgttcatgaacgagaaggaggacatcctgtggtgtaccgagatggagagagtgttcgggttcccagtccactacacagatgtcagcaacatgtctagactggccagacagagactgctgggaagaagctggtccgtccctgtgatcagacacctgttcgcccctctgaaggagtacttcgcctgcgtgagcagcggcaacagcaacgccaacagccggggccccagcttctctagcggcctggtgccactgtccctgagagggagccacatgggccccatggagatctacaaaaccgtgagcgcctggaagcggcagcctgtgcgcgtgctgagcctgtttcggaatatcgataaagtcctgaaaagcctgggattcctggagagcggctctggctccggcggtggcaccctgaagtacgtggaggatgtgacaaacgtggtcagacgggatgtggagaagtggggccccttcgatctggtgtacggcagcacccaacccctgggcagctcttgtgaccggtgccctggctggtacatgtttcagttccaccggatcctgcagtacgccctgccgagacaggagtcccagcggccattcttttggattttcatggacaacttgctgctgaccgaggatgaccaggaaactaccactcggttcctgcagaccgaagccgtgaccctgcaggacgtgagaggccgggactaccagaacgccatgcgggtgtggtccaacatccctggactgaaaagcaagcacgcacctctgacccctaaagaagaggagtacctgcaggcccaggtgcggagcagaagcaagctggacgcccctaaggtggatctgctggtgaagaattgcctcctgcccctgagagagtacttcaagtatttcagccagaatagtctgcccctgggcggcccaagcagcggcgcccctcctcccagcggcggcagcccagccggctccccaacctctaccgaggagggcacctctgagtccgccacccccgagagcggccctggcacctccaccgagcccagcgagggcagcgcacccggcagccctgccggcagccccacctccacagaggagggaaccagcaccgagcccagcgaaggcagcgccccaggcaccagcaccgagcctagtgagggcggctctggcggcggcagcgcccaggagattaaacggatcaacaagatcagaagaagacttgtgaaagacagcaacaccaagaaggccggcaagacaggccccatgaaaaccctgctggttagagtgatgacacccgatctgagagagcggctggaaaacctgagaaagaagcctgaaaatatcccccagcccatcagcaatacatctagagccaacctgaataagctgctgaccgattacaccgaaatgaagaaggcgatcctgcatgtgtactgggaagagttccagaaggaccctgtgggcctgatgagccgggtggcccagcctgccagcaagaagatcgatcagaacaagctgaaacctgagatggacgagaagggcaacctgaccaccgccggctttgcctgctctcagtgtggccagcccctgttcgtgtacaagctggagcaggtgtctgagaagggcaaggcttacaccaactacttcggacggtgcaatgtggccgagcacgaaaagctgatcctgctggcccagctgaagcccgagaaggatagcgacgaagccgtgacatatagcctgggaaagtttgggcagagggccctggatttctacagcattcatgtgaccaaggagtccacccaccccgtgaagcccctggcccagatcgccggaaacagatacgcctccggacctgtgggaaaggccctgagcgacgcatgtatgggcacaatcgcctccttcctgtctaagtaccaggacatcatcatcgaacaccagaaggtggtgaagggcaaccagaagagactggagagcctgcgggagctggccggcaaggaaaacctggaataccctagcgtgaccctgccacctcagcctcacaccaaggagggcgttgatgcctacaacgaagtgatcgcccgggtgcgaatgtgggtgaacctgaacctgtggcagaagctgaagctaagcagagatgatgccaagcctctgctgagactgaagggattcccttcctttcctctggtcgagagacaggccaacgaagtggactggtgggacatggtgtgtaacgtgaagaagctgatcaacgagaaaaaggaggatggcaaggtgttttggcagaatctggctggctacaagagacaggaagccctgagaccatacctgagcagcgaggaagatcggaagaagggaaagaaattcgctcggtaccagctgggcgacctgctgctgcacctggaaaagaagcacggcgaggactggggaaaggtgtacgacgaggcctgggagcggattgacaagaaagtggaaggcctgagcaagcacatcaagctggaagaggaacggagaagcgaggacgcccagagcaaggccgccctgaccgactggctgcgggctaaggccagcttcgtgatcgagggcctgaaggaggccgacaaggacgagttctgcagatgcgagctgaagctgcagaagtggtacggggacctgcggggaaagcccttcgccatcgaagccgagaacagcatcctggacatcagcggcttcagcaagcagtacaactgtgccttcatctggcagaaggacggcgtgaagaagctgaacctgtacctgatcatcaactacttcaagggcggcaagctgcggttcaagaagatcaaacctgaagccttcgaagccaacagattctacaccgtgatcaacaaaaagagcggcgagatcgtgcccatggaggtgaacttcaacttcgacgaccccaacctgatcatcctgcctctggcctttggcaagagacagggcagagaattcatctggaacgacctgctgtccctggaaaccggcagcctgaagctggccaacggaagagtgatcgagaagacactgtacaacagaagaacccggcaggatgagcctgccctgttcgtggccctgaccttcgagcggcgggaggtcctggactcctccaatatcaaaccaatgaacctgatcggcgtggcaagaggcgaaaacatccccgccgtgatcgccctgaccgaccccgagggctgcccactgagccggtttaaggatagcctgggaaacccaacccacatcctgagaatcggcgagagctataaggagaagcagcggaccatccaggccaagaaggaggtggagcagcggagagccggcggctacagccggaagtacgccagcaaagccaagaatctggcagacgatatggtgagaaacaccgctagagatctgctgtactacgccgtgacccaggatgccatgctgatcttcgccaacctgagccggggcttcggccggcagggcaagcggaccttcatggccgagagacagtacacacggatggaggactggctgaccgccaagctggcctacgagggcctgagcaagacctacctgtccaagacactggcccagtacacctccaagacatgcagcaactgtgggtttaccatcaccagcgccgactacgacagggtgctggagaagctgaagaagacagcaacaggctggatgaccacaattaacggcaaggagctgaaggtggagggccagattacctactacaacagatacaagagacagaacgtagtcaaggacctgtccgtcgagctggatagactgagcgaagaatctgtgaacaacgacatctcctcctggacaaagggcagaagcggagaagctctgagcctcctgaagaaaagattctcccatagacccgtgcaggagaagttcgtgtgcctgaactgcggcttcgagacacacgcagccgagcaagccgccctgaacatcgccagatcctggctgttcctgcggagccaggagtacaagaaataccagacaaacaagacaaccggcaacaccgataagagagccttcgtcgagacctggcagtccttttaccggaagaagcttaaggaggtgtggaaacctgccgtgcggtctggcggatctggcggaggctccacaagccagcagaggcccgtgagcttcaaggacgtggtggtgggcttcacccaggaggagtggaggaggctgaaccccgcccagagggccctgtacagggacgtgatgctggagacctacagcaacctggtgagcgtgggctacgagggcaccaagcccgacgtgatcctgaggctggagcaggaggaggccccctggatctgcgaggccgtgtgccccggctgccactgccaggaggacttcctgagcaccagccccaagaaaaagagaaaagtctaagctgccttctgcggggcttgccttctggccatgcccttcttctctcccttgcacctgtacctcttggtctttgaataaagcctgagtaggaaggctagcaaaaaaaaaaaaaaaaaaaaaaaaaaaaaaaaaaaaaaaaaaaaaaaaaaaaaaaaaaaaaaaaaaaaaaaaaaaaaaaa

SEQ ID NO: 3281 - RNA, 5419 nt, synthetic construct
  source 1..5419: mol_type = other RNA
aggaaataagagagaaaagaagagtaagaagaaatataagagccaccatggcccctaagaagaagcgtaaagtgagccgggtgaacggcagcggcagcggcggcggcatgaaccacgaccaggagttcgacccccctaaggtgtaccctcccgtccccgccgagaagagaaagcccatccgggtcctgagcctgttcgatggcatcgccaccggtctgctggtgctgaaggacctgggcatccaggtggataggtacattgcctccgaggtgtgcgaggactccatcaccgtgggaatggtgcgtcatcagggcaagatcatgtacgtgggcgacgtgcggagcgtgacacagaagcatatccaggagtggggccctttcgacctggtgatcggcggcagcccttgcaatgacctgagcatcgtgaacccagcccggaagggcctgtacgagggaaccggcagactgttcttcgagttttacagactgctgcacgacgcccggcctaaggaaggcgacgaccggcccttcttttggctgttcgagaatgtggtggccatgggagtcagcgacaagcgggatattagccggttcctggagagcaaccccgtgatgatcgatgccaaggaagtgagcgccgcccaccgggccagatacttctggggcaatctgcctggcatgaacagacccctggccagcaccgtgaacgacaagctggagctgcaggagtgcctggagcacggccggatcgccaagttcagcaaggtgagaaccatcaccacccgaagcaacagcatcaaacaaggcaaggaccagcactttcctgtgttcatgaacgagaaggaggacatcctgtggtgtaccgagatggagagagtgttcgggttcccagtccactacacagatgtcagcaacatgtctagactggccagacagagactgctgggaagaagctggtccgtccctgtgatcagacacctgttcgcccctctgaaggagtacttcgcctgcgtgagcagcggcaacagcaacgccaacagccggggccccagcttctctagcggcctggtgccactgtccctgagagggagccacatgggccccatggagatctacaaaaccgtgagcgcctggaagcggcagcctgtgcgcgtgctgagcctgtttcggaatatcgataaagtcctgaaaagcctgggattcctggagagcggctctggctccggcggtggcaccctgaagtacgtggaggatgtgacaaacgtggtcagacgggatgtggagaagtggggccccttcgatctggtgtacggcagcacccaacccctgggcagctcttgtgaccggtgccctggctggtacatgtttcagttccaccggatcctgcagtacgccctgccgagacaggagtcccagcggccattcttttggattttcatggacaacttgctgctgaccgaggatgaccaggaaactaccactcggttcctgcagaccgaagccgtgaccctgcaggacgtgagaggccgggactaccagaacgccatgcgggtgtggtccaacatccctggactgaaaagcaagcacgcacctctgacccctaaagaagaggagtacctgcaggcccaggtgcggagcagaagcaagctggacgcccctaaggtggatctgctggtgaagaattgcctcctgcccctgagagagtacttcaagtatttcagccagaatagtctgcccctgggcggcccaagcagcggcgcccctcctcccagcggcggcagcccagccggctccccaacctctaccgaggagggcacctctgagtccgccacccccgagagcggccctggcacctccaccgagcccagcgagggcagcgcacccggcagccctgccggcagccccacctccacagaggagggaaccagcaccgagcccagcgaaggcagcgccccaggcaccagcaccgagcctagtgagggcggctctggcggcggcagcgcccaggagattaaacggatcaacaagatcagaagaagacttgtgaaagacagcaacaccaagaaggccggcaagacaggccccatgaaaaccctgctggttagagtgatgacacccgatctgagagagcggctggaaaacctgagaaagaagcctgaaaatatcccccagcccatcagcaatacatctagagccaacctgaataagctgctgaccgattacaccgaaatgaagaaggcgatcctgcatgtgtactgggaagagttccagaaggaccctgtgggcctgatgagccgggtggcccagcctgccagcaagaagatcgatcagaacaagctgaaacctgagatggacgagaagggcaacctgaccaccgccggctttgcctgctctcagtgtggccagcccctgttcgtgtacaagctggagcaggtgtctgagaagggcaaggcttacaccaactacttcggacggtgcaatgtggccgagcacgaaaagctgatcctgctggcccagctgaagcccgagaaggatagcgacgaagccgtgacatatagcctgggaaagtttgggcagagggccctggatttctacagcattcatgtgaccaaggagtccacccaccccgtgaagcccctggcccagatcgccggaaacagatacgcctccggacctgtgggaaaggccctgagcgacgcatgtatgggcacaatcgcctccttcctgtctaagtaccaggacatcatcatcgaacaccagaaggtggtgaagggcaaccagaagagactggagagcctgcgggagctggccggcaaggaaaacctggaataccctagcgtgaccctgccacctcagcctcacaccaaggagggcgttgatgcctacaacgaagtgatcgcccgggtgcgaatgtgggtgaacctgaacctgtggcagaagctgaagctaagcagagatgatgccaagcctctgctgagactgaagggattcccttcctttcctctggtcgagagacaggccaacgaagtggactggtgggacatggtgtgtaacgtgaagaagctgatcaacgagaaaaaggaggatggcaaggtgttttggcagaatctggctggctacaagagacaggaagccctgagaccatacctgagcagcgaggaagatcggaagaagggaaagaaattcgctcggtaccagctgggcgacctgctgctgcacctggaaaagaagcacggcgaggactggggaaaggtgtacgacgaggcctgggagcggattgacaagaaagtggaaggcctgagcaagcacatcaagctggaagaggaacggagaagcgaggacgcccagagcaaggccgccctgaccgactggctgcgggctaaggccagcttcgtgatcgagggcctgaaggaggccgacaaggacgagttctgcagatgcgagctgaagctgcagaagtggtacggggacctgcggggaaagcccttcgccatcgaagccgagaacagcatcctggacatcagcggcttcagcaagcagtacaactgtgccttcatctggcagaaggacggcgtgaagaagctgaacctgtacctgatcatcaactacttcaagggcggcaagctgcggttcaagaagatcaaacctgaagccttcgaagccaacagattctacaccgtgatcaacaaaaagagcggcgagatcgtgcccatggaggtgaacttcaacttcgacgaccccaacctgatcatcctgcctctggcctttggcaagagacagggcagagaattcatctggaacgacctgctgtccctggaaaccggcagcctgaagctggccaacggaagagtgatcgagaagacactgtacaacagaagaacccggcaggatgagcctgccctgttcgtggccctgaccttcgagcggcgggaggtcctggactcctccaatatcaaaccaatgaacctgatcggcgtggcaagaggcgaaaacatccccgccgtgatcgccctgaccgaccccgagggctgcccactgagccggtttaaggatagcctgggaaacccaacccacatcctgagaatcggcgagagctataaggagaagcagcggaccatccaggccaagaaggaggtggagcagcggagagccggcggctacagccggaagtacgccagcaaagccaagaatctggcagacgatatggtgagaaacaccgctagagatctgctgtactacgccgtgacccaggatgccatgctgatcttcgccaacctgagccggggcttcggccggcagggcaagcggaccttcatggccgagagacagtacacacggatggaggactggctgaccgccaagctggcctacgagggcctgagcaagacctacctgtccaagacactggcccagtacacctccaagacatgcagcaactgtgggtttaccatcaccagcgccgactacgacagggtgctggagaagctgaagaagacagcaacaggctggatgaccacaattaacggcaaggagctgaaggtggagggccagattacctactacaacagatacaagagacagaacgtagtcaaggacctgtccgtcgagctggatagactgagcgaagaatctgtgaacaacgacatctcctcctggacaaagggcagaagcggagaagctctgagcctcctgaagaaaagattctcccatagacccgtgcaggagaagttcgtgtgcctgaactgcggcttcgagacacacgcagccgagcaagccgccctgaacatcgccagatcctggctgttcctgcggagccaggagtacaagaaataccagacaaacaagacaaccggcaacaccgataagagagccttcgtcgagacctggcagtccttttaccggaagaagcttaaggaggtgtggaaacctgccgtgcggtctggcggatctggcggaggctccacaagcatggccttcagggacgtggccgtggacttcacccaggacgagtgggtgctgctgagccccgcccagaggagcctgtacagggaggtgatgctggagaactacagcaacctggtgagcctgggcatccccttcagcaagcccaagctgatcacccagctggagcagggcaaggagagctggagggaggagaggaagtgcagccccgtgagctgcctgggcgagtggggccactgggtggtgcagaccagccccaagaaaaagagaaaagtctaagctgccttctgcggggcttgccttctggccatgcccttcttctctcccttgcacctgtacctcttggtctttgaataaagcctgagtaggaaggctagcaaaaaaaaaaaaaaaaaaaaaaaaaaaaaaaaaaaaaaaaaaaaaaaaaaaaaaaaaaaaaaaaaaaaaaaaaaaaaaaa

SEQ ID NO: 3282 - RNA, 5419 nt, synthetic construct
  source 1..5419: mol_type = other RNA
aggaaataagagagaaaagaagagtaagaagaaatataagagccaccatggcccctaagaagaagcgtaaagtgagccgggtgaacggcagcggcagcggcggcggcatgaaccacgaccaggagttcgacccccctaaggtgtaccctcccgtccccgccgagaagagaaagcccatccgggtcctgagcctgttcgatggcatcgccaccggtctgctggtgctgaaggacctgggcatccaggtggataggtacattgcctccgaggtgtgcgaggactccatcaccgtgggaatggtgcgtcatcagggcaagatcatgtacgtgggcgacgtgcggagcgtgacacagaagcatatccaggagtggggccctttcgacctggtgatcggcggcagcccttgcaatgacctgagcatcgtgaacccagcccggaagggcctgtacgagggaaccggcagactgttcttcgagttttacagactgctgcacgacgcccggcctaaggaaggcgacgaccggcccttcttttggctgttcgagaatgtggtggccatgggagtcagcgacaagcgggatattagccggttcctggagagcaaccccgtgatgatcgatgccaaggaagtgagcgccgcccaccgggccagatacttctggggcaatctgcctggcatgaacagacccctggccagcaccgtgaacgacaagctggagctgcaggagtgcctggagcacggccggatcgccaagttcagcaaggtgagaaccatcaccacccgaagcaacagcatcaaacaaggcaaggaccagcactttcctgtgttcatgaacgagaaggaggacatcctgtggtgtaccgagatggagagagtgttcgggttcccagtccactacacagatgtcagcaacatgtctagactggccagacagagactgctgggaagaagctggtccgtccctgtgatcagacacctgttcgcccctctgaaggagtacttcgcctgcgtgagcagcggcaacagcaacgccaacagccggggccccagcttctctagcggcctggtgccactgtccctgagagggagccacatgggccccatggagatctacaaaaccgtgagcgcctggaagcggcagcctgtgcgcgtgctgagcctgtttcggaatatcgataaagtcctgaaaagcctgggattcctggagagcggctctggctccggcggtggcaccctgaagtacgtggaggatgtgacaaacgtggtcagacgggatgtggagaagtggggccccttcgatctggtgtacggcagcacccaacccctgggcagctcttgtgaccggtgccctggctggtacatgtttcagttccaccggatcctgcagtacgccctgccgagacaggagtcccagcggccattcttttggattttcatggacaacttgctgctgaccgaggatgaccaggaaactaccactcggttcctgcagaccgaagccgtgaccctgcaggacgtgagaggccgggactaccagaacgccatgcgggtgtggtccaacatccctggactgaaaagcaagcacgcacctctgacccctaaagaagaggagtacctgcaggcccaggtgcggagcagaagcaagctggacgcccctaaggtggatctgctggtgaagaattgcctcctgcccctgagagagtacttcaagtatttcagccagaatagtctgcccctgggcggcccaagcagcggcgcccctcctcccagcggcggcagcccagccggctccccaacctctaccgaggagggcacctctgagtccgccacccccgagagcggccctggcacctccaccgagcccagcgagggcagcgcacccggcagccctgccggcagccccacctccacagaggagggaaccagcaccgagcccagcgaaggcagcgccccaggcaccagcaccgagcctagtgagggcggctctggcggcggcagcgcccaggagattaaacggatcaacaagatcagaagaagacttgtgaaagacagcaacaccaagaaggccggcaagacaggccccatgaaaaccctgctggttagagtgatgacacccgatctgagagagcggctggaaaacctgagaaagaagcctgaaaatatcccccagcccatcagcaatacatctagagccaacctgaataagctgctgaccgattacaccgaaatgaagaaggcgatcctgcatgtgtactgggaagagttccagaaggaccctgtgggcctgatgagccgggtggcccagcctgccagcaagaagatcgatcagaacaagctgaaacctgagatggacgagaagggcaacctgaccaccgccggctttgcctgctctcagtgtggccagcccctgttcgtgtacaagctggagcaggtgtctgagaagggcaaggcttacaccaactacttcggacggtgcaatgtggccgagcacgaaaagctgatcctgctggcccagctgaagcccgagaaggatagcgacgaagccgtgacatatagcctgggaaagtttgggcagagggccctggatttctacagcattcatgtgaccaaggagtccacccaccccgtgaagcccctggcccagatcgccggaaacagatacgcctccggacctgtgggaaaggccctgagcgacgcatgtatgggcacaatcgcctccttcctgtctaagtaccaggacatcatcatcgaacaccagaaggtggtgaagggcaaccagaagagactggagagcctgcgggagctggccggcaaggaaaacctggaataccctagcgtgaccctgccacctcagcctcacaccaaggagggcgttgatgcctacaacgaagtgatcgcccgggtgcgaatgtgggtgaacctgaacctgtggcagaagctgaagctaagcagagatgatgccaagcctctgctgagactgaagggattcccttcctttcctctggtcgagagacaggccaacgaagtggactggtgggacatggtgtgtaacgtgaagaagctgatcaacgagaaaaaggaggatggcaaggtgttttggcagaatctggctggctacaagagacaggaagccctgagaccatacctgagcagcgaggaagatcggaagaagggaaagaaattcgctcggtaccagctgggcgacctgctgctgcacctggaaaagaagcacggcgaggactggggaaaggtgtacgacgaggcctgggagcggattgacaagaaagtggaaggcctgagcaagcacatcaagctggaagaggaacggagaagcgaggacgcccagagcaaggccgccctgaccgactggctgcgggctaaggccagcttcgtgatcgagggcctgaaggaggccgacaaggacgagttctgcagatgcgagctgaagctgcagaagtggtacggggacctgcggggaaagcccttcgccatcgaagccgagaacagcatcctggacatcagcggcttcagcaagcagtacaactgtgccttcatctggcagaaggacggcgtgaagaagctgaacctgtacctgatcatcaactacttcaagggcggcaagctgcggttcaagaagatcaaacctgaagccttcgaagccaacagattctacaccgtgatcaacaaaaagagcggcgagatcgtgcccatggaggtgaacttcaacttcgacgaccccaacctgatcatcctgcctctggcctttggcaagagacagggcagagaattcatctggaacgacctgctgtccctggaaaccggcagcctgaagctggccaacggaagagtgatcgagaagacactgtacaacagaagaacccggcaggatgagcctgccctgttcgtggccctgaccttcgagcggcgggaggtcctggactcctccaatatcaaaccaatgaacctgatcggcgtggcaagaggcgaaaacatccccgccgtgatcgccctgaccgaccccgagggctgcccactgagccggtttaaggatagcctgggaaacccaacccacatcctgagaatcggcgagagctataaggagaagcagcggaccatccaggccaagaaggaggtggagcagcggagagccggcggctacagccggaagtacgccagcaaagccaagaatctggcagacgatatggtgagaaacaccgctagagatctgctgtactacgccgtgacccaggatgccatgctgatcttcgccaacctgagccggggcttcggccggcagggcaagcggaccttcatggccgagagacagtacacacggatggaggactggctgaccgccaagctggcctacgagggcctgagcaagacctacctgtccaagacactggcccagtacacctccaagacatgcagcaactgtgggtttaccatcaccagcgccgactacgacagggtgctggagaagctgaagaagacagcaacaggctggatgaccacaattaacggcaaggagctgaaggtggagggccagattacctactacaacagatacaagagacagaacgtagtcaaggacctgtccgtcgagctggatagactgagcgaagaatctgtgaacaacgacatctcctcctggacaaagggcagaagcggagaagctctgagcctcctgaagaaaagattctcccatagacccgtgcaggagaagttcgtgtgcctgaactgcggcttcgagacacacgcagccgagcaagccgccctgaacatcgccagatcctggctgttcctgcggagccaggagtacaagaaataccagacaaacaagacaaccggcaacaccgataagagagccttcgtcgagacctggcagtccttttaccggaagaagcttaaggaggtgtggaaacctgccgtgcggtctggcggatctggcggaggctccacaagcgccgcccaggagctggtgaccttccaggacgtgttcgtggacttcagccaggaggagctgaacagcctgagcgccgcccagaggaggctgcacagggaggtgaccctggagaactacaggagcctggtgagcctgggctacaggttccccaagcccgacatcatcgcccagctggaggaggaggagagcagggccatggaggaggacggcgacaccaagaccggccccgactgggagaccggcaccagccccaagaaaaagagaaaagtctaagctgccttctgcggggcttgccttctggccatgcccttcttctctcccttgcacctgtacctcttggtctttgaataaagcctgagtaggaaggctagcaaaaaaaaaaaaaaaaaaaaaaaaaaaaaaaaaaaaaaaaaaaaaaaaaaaaaaaaaaaaaaaaaaaaaaaaaaaaaaaa

SEQ ID NO: 3283 - RNA, 5419 nt, synthetic construct
  source 1..5419: mol_type = other RNA
aggaaataagagagaaaagaagagtaagaagaaatataagagccaccatggcccctaagaagaagcgtaaagtgagccgggtgaacggcagcggcagcggcggcggcatgaaccacgaccaggagttcgacccccctaaggtgtaccctcccgtccccgccgagaagagaaagcccatccgggtcctgagcctgttcgatggcatcgccaccggtctgctggtgctgaaggacctgggcatccaggtggataggtacattgcctccgaggtgtgcgaggactccatcaccgtgggaatggtgcgtcatcagggcaagatcatgtacgtgggcgacgtgcggagcgtgacacagaagcatatccaggagtggggccctttcgacctggtgatcggcggcagcccttgcaatgacctgagcatcgtgaacccagcccggaagggcctgtacgagggaaccggcagactgttcttcgagttttacagactgctgcacgacgcccggcctaaggaaggcgacgaccggcccttcttttggctgttcgagaatgtggtggccatgggagtcagcgacaagcgggatattagccggttcctggagagcaaccccgtgatgatcgatgccaaggaagtgagcgccgcccaccgggccagatacttctggggcaatctgcctggcatgaacagacccctggccagcaccgtgaacgacaagctggagctgcaggagtgcctggagcacggccggatcgccaagttcagcaaggtgagaaccatcaccacccgaagcaacagcatcaaacaaggcaaggaccagcactttcctgtgttcatgaacgagaaggaggacatcctgtggtgtaccgagatggagagagtgttcgggttcccagtccactacacagatgtcagcaacatgtctagactggccagacagagactgctgggaagaagctggtccgtccctgtgatcagacacctgttcgcccctctgaaggagtacttcgcctgcgtgagcagcggcaacagcaacgccaacagccggggccccagcttctctagcggcctggtgccactgtccctgagagggagccacatgggccccatggagatctacaaaaccgtgagcgcctggaagcggcagcctgtgcgcgtgctgagcctgtttcggaatatcgataaagtcctgaaaagcctgggattcctggagagcggctctggctccggcggtggcaccctgaagtacgtggaggatgtgacaaacgtggtcagacgggatgtggagaagtggggccccttcgatctggtgtacggcagcacccaacccctgggcagctcttgtgaccggtgccctggctggtacatgtttcagttccaccggatcctgcagtacgccctgccgagacaggagtcccagcggccattcttttggattttcatggacaacttgctgctgaccgaggatgaccaggaaactaccactcggttcctgcagaccgaagccgtgaccctgcaggacgtgagaggccgggactaccagaacgccatgcgggtgtggtccaacatccctggactgaaaagcaagcacgcacctctgacccctaaagaagaggagtacctgcaggcccaggtgcggagcagaagcaagctggacgcccctaaggtggatctgctggtgaagaattgcctcctgcccctgagagagtacttcaagtatttcagccagaatagtctgcccctgggcggcccaagcagcggcgcccctcctcccagcggcggcagcccagccggctccccaacctctaccgaggagggcacctctgagtccgccacccccgagagcggccctggcacctccaccgagcccagcgagggcagcgcacccggcagccctgccggcagccccacctccacagaggagggaaccagcaccgagcccagcgaaggcagcgccccaggcaccagcaccgagcctagtgagggcggctctggcggcggcagcgcccaggagattaaacggatcaacaagatcagaagaagacttgtgaaagacagcaacaccaagaaggccggcaagacaggccccatgaaaaccctgctggttagagtgatgacacccgatctgagagagcggctggaaaacctgagaaagaagcctgaaaatatcccccagcccatcagcaatacatctagagccaacctgaataagctgctgaccgattacaccgaaatgaagaaggcgatcctgcatgtgtactgggaagagttccagaaggaccctgtgggcctgatgagccgggtggcccagcctgccagcaagaagatcgatcagaacaagctgaaacctgagatggacgagaagggcaacctgaccaccgccggctttgcctgctctcagtgtggccagcccctgttcgtgtacaagctggagcaggtgtctgagaagggcaaggcttacaccaactacttcggacggtgcaatgtggccgagcacgaaaagctgatcctgctggcccagctgaagcccgagaaggatagcgacgaagccgtgacatatagcctgggaaagtttgggcagagggccctggatttctacagcattcatgtgaccaaggagtccacccaccccgtgaagcccctggcccagatcgccggaaacagatacgcctccggacctgtgggaaaggccctgagcgacgcatgtatgggcacaatcgcctccttcctgtctaagtaccaggacatcatcatcgaacaccagaaggtggtgaagggcaaccagaagagactggagagcctgcgggagctggccggcaaggaaaacctggaataccctagcgtgaccctgccacctcagcctcacaccaaggagggcgttgatgcctacaacgaagtgatcgcccgggtgcgaatgtgggtgaacctgaacctgtggcagaagctgaagctaagcagagatgatgccaagcctctgctgagactgaagggattcccttcctttcctctggtcgagagacaggccaacgaagtggactggtgggacatggtgtgtaacgtgaagaagctgatcaacgagaaaaaggaggatggcaaggtgttttggcagaatctggctggctacaagagacaggaagccctgagaccatacctgagcagcgaggaagatcggaagaagggaaagaaattcgctcggtaccagctgggcgacctgctgctgcacctggaaaagaagcacggcgaggactggggaaaggtgtacgacgaggcctgggagcggattgacaagaaagtggaaggcctgagcaagcacatcaagctggaagaggaacggagaagcgaggacgcccagagcaaggccgccctgaccgactggctgcgggctaaggccagcttcgtgatcgagggcctgaaggaggccgacaaggacgagttctgcagatgcgagctgaagctgcagaagtggtacggggacctgcggggaaagcccttcgccatcgaagccgagaacagcatcctggacatcagcggcttcagcaagcagtacaactgtgccttcatctggcagaaggacggcgtgaagaagctgaacctgtacctgatcatcaactacttcaagggcggcaagctgcggttcaagaagatcaaacctgaagccttcgaagccaacagattctacaccgtgatcaacaaaaagagcggcgagatcgtgcccatggaggtgaacttcaacttcgacgaccccaacctgatcatcctgcctctggcctttggcaagagacagggcagagaattcatctggaacgacctgctgtccctggaaaccggcagcctgaagctggccaacggaagagtgatcgagaagacactgtacaacagaagaacccggcaggatgagcctgccctgttcgtggccctgaccttcgagcggcgggaggtcctggactcctccaatatcaaaccaatgaacctgatcggcgtggcaagaggcgaaaacatccccgccgtgatcgccctgaccgaccccgagggctgcccactgagccggtttaaggatagcctgggaaacccaacccacatcctgagaatcggcgagagctataaggagaagcagcggaccatccaggccaagaaggaggtggagcagcggagagccggcggctacagccggaagtacgccagcaaagccaagaatctggcagacgatatggtgagaaacaccgctagagatctgctgtactacgccgtgacccaggatgccatgctgatcttcgccaacctgagccggggcttcggccggcagggcaagcggaccttcatggccgagagacagtacacacggatggaggactggctgaccgccaagctggcctacgagggcctgagcaagacctacctgtccaagacactggcccagtacacctccaagacatgcagcaactgtgggtttaccatcaccagcgccgactacgacagggtgctggagaagctgaagaagacagcaacaggctggatgaccacaattaacggcaaggagctgaaggtggagggccagattacctactacaacagatacaagagacagaacgtagtcaaggacctgtccgtcgagctggatagactgagcgaagaatctgtgaacaacgacatctcctcctggacaaagggcagaagcggagaagctctgagcctcctgaagaaaagattctcccatagacccgtgcaggagaagttcgtgtgcctgaactgcggcttcgagacacacgcagccgagcaagccgccctgaacatcgccagatcctggctgttcctgcggagccaggagtacaagaaataccagacaaacaagacaaccggcaacaccgataagagagccttcgtcgagacctggcagtccttttaccggaagaagcttaaggaggtgtggaaacctgccgtgcggtctggcggatctggcggaggctccacaagcggcaagatgagcgtgaccttcgaggacgtggccctgtacttcagccccgaggagtgggccaagctgagcggctgccagaggcagctgtacagggaggtgatgctggagaactaccagatggtggccagcctgggctgggccaccgtgaagcccgagatcatctgcaagatggagagggaggagaccccctgcgtgctggacccccccggcgagcagcagatgcaccagagccccgtgcccgccaccagccccaagaaaaagagaaaagtctaagctgccttctgcggggcttgccttctggccatgcccttcttctctcccttgcacctgtacctcttggtctttgaataaagcctgagtaggaaggctagcaaaaaaaaaaaaaaaaaaaaaaaaaaaaaaaaaaaaaaaaaaaaaaaaaaaaaaaaaaaaaaaaaaaaaaaaaaaaaaaa

SEQ ID NO: 3284 - RNA, 5419 nt, synthetic construct
  source 1..5419: mol_type = other RNA
aggaaataagagagaaaagaagagtaagaagaaatataagagccaccatggcccctaagaagaagcgtaaagtgagccgggtgaacggcagcggcagcggcggcggcatgaaccacgaccaggagttcgacccccctaaggtgtaccctcccgtccccgccgagaagagaaagcccatccgggtcctgagcctgttcgatggcatcgccaccggtctgctggtgctgaaggacctgggcatccaggtggataggtacattgcctccgaggtgtgcgaggactccatcaccgtgggaatggtgcgtcatcagggcaagatcatgtacgtgggcgacgtgcggagcgtgacacagaagcatatccaggagtggggccctttcgacctggtgatcggcggcagcccttgcaatgacctgagcatcgtgaacccagcccggaagggcctgtacgagggaaccggcagactgttcttcgagttttacagactgctgcacgacgcccggcctaaggaaggcgacgaccggcccttcttttggctgttcgagaatgtggtggccatgggagtcagcgacaagcgggatattagccggttcctggagagcaaccccgtgatgatcgatgccaaggaagtgagcgccgcccaccgggccagatacttctggggcaatctgcctggcatgaacagacccctggccagcaccgtgaacgacaagctggagctgcaggagtgcctggagcacggccggatcgccaagttcagcaaggtgagaaccatcaccacccgaagcaacagcatcaaacaaggcaaggaccagcactttcctgtgttcatgaacgagaaggaggacatcctgtggtgtaccgagatggagagagtgttcgggttcccagtccactacacagatgtcagcaacatgtctagactggccagacagagactgctgggaagaagctggtccgtccctgtgatcagacacctgttcgcccctctgaaggagtacttcgcctgcgtgagcagcggcaacagcaacgccaacagccggggccccagcttctctagcggcctggtgccactgtccctgagagggagccacatgggccccatggagatctacaaaaccgtgagcgcctggaagcggcagcctgtgcgcgtgctgagcctgtttcggaatatcgataaagtcctgaaaagcctgggattcctggagagcggctctggctccggcggtggcaccctgaagtacgtggaggatgtgacaaacgtggtcagacgggatgtggagaagtggggccccttcgatctggtgtacggcagcacccaacccctgggcagctcttgtgaccggtgccctggctggtacatgtttcagttccaccggatcctgcagtacgccctgccgagacaggagtcccagcggccattcttttggattttcatggacaacttgctgctgaccgaggatgaccaggaaactaccactcggttcctgcagaccgaagccgtgaccctgcaggacgtgagaggccgggactaccagaacgccatgcgggtgtggtccaacatccctggactgaaaagcaagcacgcacctctgacccctaaagaagaggagtacctgcaggcccaggtgcggagcagaagcaagctggacgcccctaaggtggatctgctggtgaagaattgcctcctgcccctgagagagtacttcaagtatttcagccagaatagtctgcccctgggcggcccaagcagcggcgcccctcctcccagcggcggcagcccagccggctccccaacctctaccgaggagggcacctctgagtccgccacccccgagagcggccctggcacctccaccgagcccagcgagggcagcgcacccggcagccctgccggcagccccacctccacagaggagggaaccagcaccgagcccagcgaaggcagcgccccaggcaccagcaccgagcctagtgagggcggctctggcggcggcagcgcccaggagattaaacggatcaacaagatcagaagaagacttgtgaaagacagcaacaccaagaaggccggcaagacaggccccatgaaaaccctgctggttagagtgatgacacccgatctgagagagcggctggaaaacctgagaaagaagcctgaaaatatcccccagcccatcagcaatacatctagagccaacctgaataagctgctgaccgattacaccgaaatgaagaaggcgatcctgcatgtgtactgggaagagttccagaaggaccctgtgggcctgatgagccgggtggcccagcctgccagcaagaagatcgatcagaacaagctgaaacctgagatggacgagaagggcaacctgaccaccgccggctttgcctgctctcagtgtggccagcccctgttcgtgtacaagctggagcaggtgtctgagaagggcaaggcttacaccaactacttcggacggtgcaatgtggccgagcacgaaaagctgatcctgctggcccagctgaagcccgagaaggatagcgacgaagccgtgacatatagcctgggaaagtttgggcagagggccctggatttctacagcattcatgtgaccaaggagtccacccaccccgtgaagcccctggcccagatcgccggaaacagatacgcctccggacctgtgggaaaggccctgagcgacgcatgtatgggcacaatcgcctccttcctgtctaagtaccaggacatcatcatcgaacaccagaaggtggtgaagggcaaccagaagagactggagagcctgcgggagctggccggcaaggaaaacctggaataccctagcgtgaccctgccacctcagcctcacaccaaggagggcgttgatgcctacaacgaagtgatcgcccgggtgcgaatgtgggtgaacctgaacctgtggcagaagctgaagctaagcagagatgatgccaagcctctgctgagactgaagggattcccttcctttcctctggtcgagagacaggccaacgaagtggactggtgggacatggtgtgtaacgtgaagaagctgatcaacgagaaaaaggaggatggcaaggtgttttggcagaatctggctggctacaagagacaggaagccctgagaccatacctgagcagcgaggaagatcggaagaagggaaagaaattcgctcggtaccagctgggcgacctgctgctgcacctggaaaagaagcacggcgaggactggggaaaggtgtacgacgaggcctgggagcggattgacaagaaagtggaaggcctgagcaagcacatcaagctggaagaggaacggagaagcgaggacgcccagagcaaggccgccctgaccgactggctgcgggctaaggccagcttcgtgatcgagggcctgaaggaggccgacaaggacgagttctgcagatgcgagctgaagctgcagaagtggtacggggacctgcggggaaagcccttcgccatcgaagccgagaacagcatcctggacatcagcggcttcagcaagcagtacaactgtgccttcatctggcagaaggacggcgtgaagaagctgaacctgtacctgatcatcaactacttcaagggcggcaagctgcggttcaagaagatcaaacctgaagccttcgaagccaacagattctacaccgtgatcaacaaaaagagcggcgagatcgtgcccatggaggtgaacttcaacttcgacgaccccaacctgatcatcctgcctctggcctttggcaagagacagggcagagaattcatctggaacgacctgctgtccctggaaaccggcagcctgaagctggccaacggaagagtgatcgagaagacactgtacaacagaagaacccggcaggatgagcctgccctgttcgtggccctgaccttcgagcggcgggaggtcctggactcctccaatatcaaaccaatgaacctgatcggcgtggcaagaggcgaaaacatccccgccgtgatcgccctgaccgaccccgagggctgcccactgagccggtttaaggatagcctgggaaacccaacccacatcctgagaatcggcgagagctataaggagaagcagcggaccatccaggccaagaaggaggtggagcagcggagagccggcggctacagccggaagtacgccagcaaagccaagaatctggcagacgatatggtgagaaacaccgctagagatctgctgtactacgccgtgacccaggatgccatgctgatcttcgccaacctgagccggggcttcggccggcagggcaagcggaccttcatggccgagagacagtacacacggatggaggactggctgaccgccaagctggcctacgagggcctgagcaagacctacctgtccaagacactggcccagtacacctccaagacatgcagcaactgtgggtttaccatcaccagcgccgactacgacagggtgctggagaagctgaagaagacagcaacaggctggatgaccacaattaacggcaaggagctgaaggtggagggccagattacctactacaacagatacaagagacagaacgtagtcaaggacctgtccgtcgagctggatagactgagcgaagaatctgtgaacaacgacatctcctcctggacaaagggcagaagcggagaagctctgagcctcctgaagaaaagattctcccatagacccgtgcaggagaagttcgtgtgcctgaactgcggcttcgagacacacgcagccgagcaagccgccctgaacatcgccagatcctggctgttcctgcggagccaggagtacaagaaataccagacaaacaagacaaccggcaacaccgataagagagccttcgtcgagacctggcagtccttttaccggaagaagcttaaggaggtgtggaaacctgccgtgcggtctggcggatctggcggaggctccacaagcagccaggagcccgtgagcttcgccgaggtggccgtgtacttcagcagggaggagtgggccctgctggaccccgcccagagggccctgtacagggacgtgatgctggagacctaccagtgcgtggccagcctggcccccctgcccgcccccaagcccatgctgatcagcctgctggagggcggcgaggagccctggatccccgacgtgaggagccccgaggccgtgcccggcgacctgagccccaccagccccaagaaaaagagaaaagtctaagctgccttctgcggggcttgccttctggccatgcccttcttctctcccttgcacctgtacctcttggtctttgaataaagcctgagtaggaaggctagcaaaaaaaaaaaaaaaaaaaaaaaaaaaaaaaaaaaaaaaaaaaaaaaaaaaaaaaaaaaaaaaaaaaaaaaaaaaaaaaa

SEQ ID NO: 3285 - RNA, 5419 nt, synthetic construct
  source 1..5419: mol_type = other RNA
aggaaataagagagaaaagaagagtaagaagaaatataagagccaccatggcccctaagaagaagcgtaaagtgagccgggtgaacggcagcggcagcggcggcggcatgaaccacgaccaggagttcgacccccctaaggtgtaccctcccgtccccgccgagaagagaaagcccatccgggtcctgagcctgttcgatggcatcgccaccggtctgctggtgctgaaggacctgggcatccaggtggataggtacattgcctccgaggtgtgcgaggactccatcaccgtgggaatggtgcgtcatcagggcaagatcatgtacgtgggcgacgtgcggagcgtgacacagaagcatatccaggagtggggccctttcgacctggtgatcggcggcagcccttgcaatgacctgagcatcgtgaacccagcccggaagggcctgtacgagggaaccggcagactgttcttcgagttttacagactgctgcacgacgcccggcctaaggaaggcgacgaccggcccttcttttggctgttcgagaatgtggtggccatgggagtcagcgacaagcgggatattagccggttcctggagagcaaccccgtgatgatcgatgccaaggaagtgagcgccgcccaccgggccagatacttctggggcaatctgcctggcatgaacagacccctggccagcaccgtgaacgacaagctggagctgcaggagtgcctggagcacggccggatcgccaagttcagcaaggtgagaaccatcaccacccgaagcaacagcatcaaacaaggcaaggaccagcactttcctgtgttcatgaacgagaaggaggacatcctgtggtgtaccgagatggagagagtgttcgggttcccagtccactacacagatgtcagcaacatgtctagactggccagacagagactgctgggaagaagctggtccgtccctgtgatcagacacctgttcgcccctctgaaggagtacttcgcctgcgtgagcagcggcaacagcaacgccaacagccggggccccagcttctctagcggcctggtgccactgtccctgagagggagccacatgggccccatggagatctacaaaaccgtgagcgcctggaagcggcagcctgtgcgcgtgctgagcctgtttcggaatatcgataaagtcctgaaaagcctgggattcctggagagcggctctggctccggcggtggcaccctgaagtacgtggaggatgtgacaaacgtggtcagacgggatgtggagaagtggggccccttcgatctggtgtacggcagcacccaacccctgggcagctcttgtgaccggtgccctggctggtacatgtttcagttccaccggatcctgcagtacgccctgccgagacaggagtcccagcggccattcttttggattttcatggacaacttgctgctgaccgaggatgaccaggaaactaccactcggttcctgcagaccgaagccgtgaccctgcaggacgtgagaggccgggactaccagaacgccatgcgggtgtggtccaacatccctggactgaaaagcaagcacgcacctctgacccctaaagaagaggagtacctgcaggcccaggtgcggagcagaagcaagctggacgcccctaaggtggatctgctggtgaagaattgcctcctgcccctgagagagtacttcaagtatttcagccagaatagtctgcccctgggcggcccaagcagcggcgcccctcctcccagcggcggcagcccagccggctccccaacctctaccgaggagggcacctctgagtccgccacccccgagagcggccctggcacctccaccgagcccagcgagggcagcgcacccggcagccctgccggcagccccacctccacagaggagggaaccagcaccgagcccagcgaaggcagcgccccaggcaccagcaccgagcctagtgagggcggctctggcggcggcagcgcccaggagattaaacggatcaacaagatcagaagaagacttgtgaaagacagcaacaccaagaaggccggcaagacaggccccatgaaaaccctgctggttagagtgatgacacccgatctgagagagcggctggaaaacctgagaaagaagcctgaaaatatcccccagcccatcagcaatacatctagagccaacctgaataagctgctgaccgattacaccgaaatgaagaaggcgatcctgcatgtgtactgggaagagttccagaaggaccctgtgggcctgatgagccgggtggcccagcctgccagcaagaagatcgatcagaacaagctgaaacctgagatggacgagaagggcaacctgaccaccgccggctttgcctgctctcagtgtggccagcccctgttcgtgtacaagctggagcaggtgtctgagaagggcaaggcttacaccaactacttcggacggtgcaatgtggccgagcacgaaaagctgatcctgctggcccagctgaagcccgagaaggatagcgacgaagccgtgacatatagcctgggaaagtttgggcagagggccctggatttctacagcattcatgtgaccaaggagtccacccaccccgtgaagcccctggcccagatcgccggaaacagatacgcctccggacctgtgggaaaggccctgagcgacgcatgtatgggcacaatcgcctccttcctgtctaagtaccaggacatcatcatcgaacaccagaaggtggtgaagggcaaccagaagagactggagagcctgcgggagctggccggcaaggaaaacctggaataccctagcgtgaccctgccacctcagcctcacaccaaggagggcgttgatgcctacaacgaagtgatcgcccgggtgcgaatgtgggtgaacctgaacctgtggcagaagctgaagctaagcagagatgatgccaagcctctgctgagactgaagggattcccttcctttcctctggtcgagagacaggccaacgaagtggactggtgggacatggtgtgtaacgtgaagaagctgatcaacgagaaaaaggaggatggcaaggtgttttggcagaatctggctggctacaagagacaggaagccctgagaccatacctgagcagcgaggaagatcggaagaagggaaagaaattcgctcggtaccagctgggcgacctgctgctgcacctggaaaagaagcacggcgaggactggggaaaggtgtacgacgaggcctgggagcggattgacaagaaagtggaaggcctgagcaagcacatcaagctggaagaggaacggagaagcgaggacgcccagagcaaggccgccctgaccgactggctgcgggctaaggccagcttcgtgatcgagggcctgaaggaggccgacaaggacgagttctgcagatgcgagctgaagctgcagaagtggtacggggacctgcggggaaagcccttcgccatcgaagccgagaacagcatcctggacatcagcggcttcagcaagcagtacaactgtgccttcatctggcagaaggacggcgtgaagaagctgaacctgtacctgatcatcaactacttcaagggcggcaagctgcggttcaagaagatcaaacctgaagccttcgaagccaacagattctacaccgtgatcaacaaaaagagcggcgagatcgtgcccatggaggtgaacttcaacttcgacgaccccaacctgatcatcctgcctctggcctttggcaagagacagggcagagaattcatctggaacgacctgctgtccctggaaaccggcagcctgaagctggccaacggaagagtgatcgagaagacactgtacaacagaagaacccggcaggatgagcctgccctgttcgtggccctgaccttcgagcggcgggaggtcctggactcctccaatatcaaaccaatgaacctgatcggcgtggcaagaggcgaaaacatccccgccgtgatcgccctgaccgaccccgagggctgcccactgagccggtttaaggatagcctgggaaacccaacccacatcctgagaatcggcgagagctataaggagaagcagcggaccatccaggccaagaaggaggtggagcagcggagagccggcggctacagccggaagtacgccagcaaagccaagaatctggcagacgatatggtgagaaacaccgctagagatctgctgtactacgccgtgacccaggatgccatgctgatcttcgccaacctgagccggggcttcggccggcagggcaagcggaccttcatggccgagagacagtacacacggatggaggactggctgaccgccaagctggcctacgagggcctgagcaagacctacctgtccaagacactggcccagtacacctccaagacatgcagcaactgtgggtttaccatcaccagcgccgactacgacagggtgctggagaagctgaagaagacagcaacaggctggatgaccacaattaacggcaaggagctgaaggtggagggccagattacctactacaacagatacaagagacagaacgtagtcaaggacctgtccgtcgagctggatagactgagcgaagaatctgtgaacaacgacatctcctcctggacaaagggcagaagcggagaagctctgagcctcctgaagaaaagattctcccatagacccgtgcaggagaagttcgtgtgcctgaactgcggcttcgagacacacgcagccgagcaagccgccctgaacatcgccagatcctggctgttcctgcggagccaggagtacaagaaataccagacaaacaagacaaccggcaacaccgataagagagccttcgtcgagacctggcagtccttttaccggaagaagcttaaggaggtgtggaaacctgccgtgcggtctggcggatctggcggaggctccacaagcctgaggggcctggtgaccttcgaggacgtggccgtggagttcacccaggaggagtgggccctgctggaccccgcccagaggaccctgtacagggacgtgatgctggagaactgcaggaacctggccagcctgggctgcagggtgaacaagcccagcctgatcagccagctggagcaggacaagaaggtgatcaccgaggagaggggcatcctgcccagcacctgccccgacctggagaccctgaccagccccaagaaaaagagaaaagtctaagctgccttctgcggggcttgccttctggccatgcccttcttctctcccttgcacctgtacctcttggtctttgaataaagcctgagtaggaaggctagcaaaaaaaaaaaaaaaaaaaaaaaaaaaaaaaaaaaaaaaaaaaaaaaaaaaaaaaaaaaaaaaaaaaaaaaaaaaaaaaa

SEQ ID NO: 3286 - RNA, 5419 nt, synthetic construct
  source 1..5419: mol_type = other RNA
aggaaataagagagaaaagaagagtaagaagaaatataagagccaccatggcccctaagaagaagcgtaaagtgagccgggtgaacggcagcggcagcggcggcggcatgaaccacgaccaggagttcgacccccctaaggtgtaccctcccgtccccgccgagaagagaaagcccatccgggtcctgagcctgttcgatggcatcgccaccggtctgctggtgctgaaggacctgggcatccaggtggataggtacattgcctccgaggtgtgcgaggactccatcaccgtgggaatggtgcgtcatcagggcaagatcatgtacgtgggcgacgtgcggagcgtgacacagaagcatatccaggagtggggccctttcgacctggtgatcggcggcagcccttgcaatgacctgagcatcgtgaacccagcccggaagggcctgtacgagggaaccggcagactgttcttcgagttttacagactgctgcacgacgcccggcctaaggaaggcgacgaccggcccttcttttggctgttcgagaatgtggtggccatgggagtcagcgacaagcgggatattagccggttcctggagagcaaccccgtgatgatcgatgccaaggaagtgagcgccgcccaccgggccagatacttctggggcaatctgcctggcatgaacagacccctggccagcaccgtgaacgacaagctggagctgcaggagtgcctggagcacggccggatcgccaagttcagcaaggtgagaaccatcaccacccgaagcaacagcatcaaacaaggcaaggaccagcactttcctgtgttcatgaacgagaaggaggacatcctgtggtgtaccgagatggagagagtgttcgggttcccagtccactacacagatgtcagcaacatgtctagactggccagacagagactgctgggaagaagctggtccgtccctgtgatcagacacctgttcgcccctctgaaggagtacttcgcctgcgtgagcagcggcaacagcaacgccaacagccggggccccagcttctctagcggcctggtgccactgtccctgagagggagccacatgggccccatggagatctacaaaaccgtgagcgcctggaagcggcagcctgtgcgcgtgctgagcctgtttcggaatatcgataaagtcctgaaaagcctgggattcctggagagcggctctggctccggcggtggcaccctgaagtacgtggaggatgtgacaaacgtggtcagacgggatgtggagaagtggggccccttcgatctggtgtacggcagcacccaacccctgggcagctcttgtgaccggtgccctggctggtacatgtttcagttccaccggatcctgcagtacgccctgccgagacaggagtcccagcggccattcttttggattttcatggacaacttgctgctgaccgaggatgaccaggaaactaccactcggttcctgcagaccgaagccgtgaccctgcaggacgtgagaggccgggactaccagaacgccatgcgggtgtggtccaacatccctggactgaaaagcaagcacgcacctctgacccctaaagaagaggagtacctgcaggcccaggtgcggagcagaagcaagctggacgcccctaaggtggatctgctggtgaagaattgcctcctgcccctgagagagtacttcaagtatttcagccagaatagtctgcccctgggcggcccaagcagcggcgcccctcctcccagcggcggcagcccagccggctccccaacctctaccgaggagggcacctctgagtccgccacccccgagagcggccctggcacctccaccgagcccagcgagggcagcgcacccggcagccctgccggcagccccacctccacagaggagggaaccagcaccgagcccagcgaaggcagcgccccaggcaccagcaccgagcctagtgagggcggctctggcggcggcagcgcccaggagattaaacggatcaacaagatcagaagaagacttgtgaaagacagcaacaccaagaaggccggcaagacaggccccatgaaaaccctgctggttagagtgatgacacccgatctgagagagcggctggaaaacctgagaaagaagcctgaaaatatcccccagcccatcagcaatacatctagagccaacctgaataagctgctgaccgattacaccgaaatgaagaaggcgatcctgcatgtgtactgggaagagttccagaaggaccctgtgggcctgatgagccgggtggcccagcctgccagcaagaagatcgatcagaacaagctgaaacctgagatggacgagaagggcaacctgaccaccgccggctttgcctgctctcagtgtggccagcccctgttcgtgtacaagctggagcaggtgtctgagaagggcaaggcttacaccaactacttcggacggtgcaatgtggccgagcacgaaaagctgatcctgctggcccagctgaagcccgagaaggatagcgacgaagccgtgacatatagcctgggaaagtttgggcagagggccctggatttctacagcattcatgtgaccaaggagtccacccaccccgtgaagcccctggcccagatcgccggaaacagatacgcctccggacctgtgggaaaggccctgagcgacgcatgtatgggcacaatcgcctccttcctgtctaagtaccaggacatcatcatcgaacaccagaaggtggtgaagggcaaccagaagagactggagagcctgcgggagctggccggcaaggaaaacctggaataccctagcgtgaccctgccacctcagcctcacaccaaggagggcgttgatgcctacaacgaagtgatcgcccgggtgcgaatgtgggtgaacctgaacctgtggcagaagctgaagctaagcagagatgatgccaagcctctgctgagactgaagggattcccttcctttcctctggtcgagagacaggccaacgaagtggactggtgggacatggtgtgtaacgtgaagaagctgatcaacgagaaaaaggaggatggcaaggtgttttggcagaatctggctggctacaagagacaggaagccctgagaccatacctgagcagcgaggaagatcggaagaagggaaagaaattcgctcggtaccagctgggcgacctgctgctgcacctggaaaagaagcacggcgaggactggggaaaggtgtacgacgaggcctgggagcggattgacaagaaagtggaaggcctgagcaagcacatcaagctggaagaggaacggagaagcgaggacgcccagagcaaggccgccctgaccgactggctgcgggctaaggccagcttcgtgatcgagggcctgaaggaggccgacaaggacgagttctgcagatgcgagctgaagctgcagaagtggtacggggacctgcggggaaagcccttcgccatcgaagccgagaacagcatcctggacatcagcggcttcagcaagcagtacaactgtgccttcatctggcagaaggacggcgtgaagaagctgaacctgtacctgatcatcaactacttcaagggcggcaagctgcggttcaagaagatcaaacctgaagccttcgaagccaacagattctacaccgtgatcaacaaaaagagcggcgagatcgtgcccatggaggtgaacttcaacttcgacgaccccaacctgatcatcctgcctctggcctttggcaagagacagggcagagaattcatctggaacgacctgctgtccctggaaaccggcagcctgaagctggccaacggaagagtgatcgagaagacactgtacaacagaagaacccggcaggatgagcctgccctgttcgtggccctgaccttcgagcggcgggaggtcctggactcctccaatatcaaaccaatgaacctgatcggcgtggcaagaggcgaaaacatccccgccgtgatcgccctgaccgaccccgagggctgcccactgagccggtttaaggatagcctgggaaacccaacccacatcctgagaatcggcgagagctataaggagaagcagcggaccatccaggccaagaaggaggtggagcagcggagagccggcggctacagccggaagtacgccagcaaagccaagaatctggcagacgatatggtgagaaacaccgctagagatctgctgtactacgccgtgacccaggatgccatgctgatcttcgccaacctgagccggggcttcggccggcagggcaagcggaccttcatggccgagagacagtacacacggatggaggactggctgaccgccaagctggcctacgagggcctgagcaagacctacctgtccaagacactggcccagtacacctccaagacatgcagcaactgtgggtttaccatcaccagcgccgactacgacagggtgctggagaagctgaagaagacagcaacaggctggatgaccacaattaacggcaaggagctgaaggtggagggccagattacctactacaacagatacaagagacagaacgtagtcaaggacctgtccgtcgagctggatagactgagcgaagaatctgtgaacaacgacatctcctcctggacaaagggcagaagcggagaagctctgagcctcctgaagaaaagattctcccatagacccgtgcaggagaagttcgtgtgcctgaactgcggcttcgagacacacgcagccgagcaagccgccctgaacatcgccagatcctggctgttcctgcggagccaggagtacaagaaataccagacaaacaagacaaccggcaacaccgataagagagccttcgtcgagacctggcagtccttttaccggaagaagcttaaggaggtgtggaaacctgccgtgcggtctggcggatctggcggaggctccacaagcagcctggagcaggtgagcttcaaggacgtgtgcgtggacttcacccaggaggagtggtacctgctggaccccgcccagaagatcctgtacagggacgtgatcctggagaactacagcaacatcgtgagcgtgggccactgcggcaccaagcccgaggtgatcttcaagatcgagcagggcgaggagccctgggtgctgggcgagggcttcagcagcctgcagcaccccgagaggaactggaagaccagccccaagaaaaagagaaaagtctaagctgccttctgcggggcttgccttctggccatgcccttcttctctcccttgcacctgtacctcttggtctttgaataaagcctgagtaggaaggctagcaaaaaaaaaaaaaaaaaaaaaaaaaaaaaaaaaaaaaaaaaaaaaaaaaaaaaaaaaaaaaaaaaaaaaaaaaaaaaaaa

SEQ ID NO: 3287 - RNA, 5419 nt, synthetic construct
  source 1..5419: mol_type = other RNA
aggaaataagagagaaaagaagagtaagaagaaatataagagccaccatggcccctaagaagaagcgtaaagtgagccgggtgaacggcagcggcagcggcggcggcatgaaccacgaccaggagttcgacccccctaaggtgtaccctcccgtccccgccgagaagagaaagcccatccgggtcctgagcctgttcgatggcatcgccaccggtctgctggtgctgaaggacctgggcatccaggtggataggtacattgcctccgaggtgtgcgaggactccatcaccgtgggaatggtgcgtcatcagggcaagatcatgtacgtgggcgacgtgcggagcgtgacacagaagcatatccaggagtggggccctttcgacctggtgatcggcggcagcccttgcaatgacctgagcatcgtgaacccagcccggaagggcctgtacgagggaaccggcagactgttcttcgagttttacagactgctgcacgacgcccggcctaaggaaggcgacgaccggcccttcttttggctgttcgagaatgtggtggccatgggagtcagcgacaagcgggatattagccggttcctggagagcaaccccgtgatgatcgatgccaaggaagtgagcgccgcccaccgggccagatacttctggggcaatctgcctggcatgaacagacccctggccagcaccgtgaacgacaagctggagctgcaggagtgcctggagcacggccggatcgccaagttcagcaaggtgagaaccatcaccacccgaagcaacagcatcaaacaaggcaaggaccagcactttcctgtgttcatgaacgagaaggaggacatcctgtggtgtaccgagatggagagagtgttcgggttcccagtccactacacagatgtcagcaacatgtctagactggccagacagagactgctgggaagaagctggtccgtccctgtgatcagacacctgttcgcccctctgaaggagtacttcgcctgcgtgagcagcggcaacagcaacgccaacagccggggccccagcttctctagcggcctggtgccactgtccctgagagggagccacatgggccccatggagatctacaaaaccgtgagcgcctggaagcggcagcctgtgcgcgtgctgagcctgtttcggaatatcgataaagtcctgaaaagcctgggattcctggagagcggctctggctccggcggtggcaccctgaagtacgtggaggatgtgacaaacgtggtcagacgggatgtggagaagtggggccccttcgatctggtgtacggcagcacccaacccctgggcagctcttgtgaccggtgccctggctggtacatgtttcagttccaccggatcctgcagtacgccctgccgagacaggagtcccagcggccattcttttggattttcatggacaacttgctgctgaccgaggatgaccaggaaactaccactcggttcctgcagaccgaagccgtgaccctgcaggacgtgagaggccgggactaccagaacgccatgcgggtgtggtccaacatccctggactgaaaagcaagcacgcacctctgacccctaaagaagaggagtacctgcaggcccaggtgcggagcagaagcaagctggacgcccctaaggtggatctgctggtgaagaattgcctcctgcccctgagagagtacttcaagtatttcagccagaatagtctgcccctgggcggcccaagcagcggcgcccctcctcccagcggcggcagcccagccggctccccaacctctaccgaggagggcacctctgagtccgccacccccgagagcggccctggcacctccaccgagcccagcgagggcagcgcacccggcagccctgccggcagccccacctccacagaggagggaaccagcaccgagcccagcgaaggcagcgccccaggcaccagcaccgagcctagtgagggcggctctggcggcggcagcgcccaggagattaaacggatcaacaagatcagaagaagacttgtgaaagacagcaacaccaagaaggccggcaagacaggccccatgaaaaccctgctggttagagtgatgacacccgatctgagagagcggctggaaaacctgagaaagaagcctgaaaatatcccccagcccatcagcaatacatctagagccaacctgaataagctgctgaccgattacaccgaaatgaagaaggcgatcctgcatgtgtactgggaagagttccagaaggaccctgtgggcctgatgagccgggtggcccagcctgccagcaagaagatcgatcagaacaagctgaaacctgagatggacgagaagggcaacctgaccaccgccggctttgcctgctctcagtgtggccagcccctgttcgtgtacaagctggagcaggtgtctgagaagggcaaggcttacaccaactacttcggacggtgcaatgtggccgagcacgaaaagctgatcctgctggcccagctgaagcccgagaaggatagcgacgaagccgtgacatatagcctgggaaagtttgggcagagggccctggatttctacagcattcatgtgaccaaggagtccacccaccccgtgaagcccctggcccagatcgccggaaacagatacgcctccggacctgtgggaaaggccctgagcgacgcatgtatgggcacaatcgcctccttcctgtctaagtaccaggacatcatcatcgaacaccagaaggtggtgaagggcaaccagaagagactggagagcctgcgggagctggccggcaaggaaaacctggaataccctagcgtgaccctgccacctcagcctcacaccaaggagggcgttgatgcctacaacgaagtgatcgcccgggtgcgaatgtgggtgaacctgaacctgtggcagaagctgaagctaagcagagatgatgccaagcctctgctgagactgaagggattcccttcctttcctctggtcgagagacaggccaacgaagtggactggtgggacatggtgtgtaacgtgaagaagctgatcaacgagaaaaaggaggatggcaaggtgttttggcagaatctggctggctacaagagacaggaagccctgagaccatacctgagcagcgaggaagatcggaagaagggaaagaaattcgctcggtaccagctgggcgacctgctgctgcacctggaaaagaagcacggcgaggactggggaaaggtgtacgacgaggcctgggagcggattgacaagaaagtggaaggcctgagcaagcacatcaagctggaagaggaacggagaagcgaggacgcccagagcaaggccgccctgaccgactggctgcgggctaaggccagcttcgtgatcgagggcctgaaggaggccgacaaggacgagttctgcagatgcgagctgaagctgcagaagtggtacggggacctgcggggaaagcccttcgccatcgaagccgagaacagcatcctggacatcagcggcttcagcaagcagtacaactgtgccttcatctggcagaaggacggcgtgaagaagctgaacctgtacctgatcatcaactacttcaagggcggcaagctgcggttcaagaagatcaaacctgaagccttcgaagccaacagattctacaccgtgatcaacaaaaagagcggcgagatcgtgcccatggaggtgaacttcaacttcgacgaccccaacctgatcatcctgcctctggcctttggcaagagacagggcagagaattcatctggaacgacctgctgtccctggaaaccggcagcctgaagctggccaacggaagagtgatcgagaagacactgtacaacagaagaacccggcaggatgagcctgccctgttcgtggccctgaccttcgagcggcgggaggtcctggactcctccaatatcaaaccaatgaacctgatcggcgtggcaagaggcgaaaacatccccgccgtgatcgccctgaccgaccccgagggctgcccactgagccggtttaaggatagcctgggaaacccaacccacatcctgagaatcggcgagagctataaggagaagcagcggaccatccaggccaagaaggaggtggagcagcggagagccggcggctacagccggaagtacgccagcaaagccaagaatctggcagacgatatggtgagaaacaccgctagagatctgctgtactacgccgtgacccaggatgccatgctgatcttcgccaacctgagccggggcttcggccggcagggcaagcggaccttcatggccgagagacagtacacacggatggaggactggctgaccgccaagctggcctacgagggcctgagcaagacctacctgtccaagacactggcccagtacacctccaagacatgcagcaactgtgggtttaccatcaccagcgccgactacgacagggtgctggagaagctgaagaagacagcaacaggctggatgaccacaattaacggcaaggagctgaaggtggagggccagattacctactacaacagatacaagagacagaacgtagtcaaggacctgtccgtcgagctggatagactgagcgaagaatctgtgaacaacgacatctcctcctggacaaagggcagaagcggagaagctctgagcctcctgaagaaaagattctcccatagacccgtgcaggagaagttcgtgtgcctgaactgcggcttcgagacacacgcagccgagcaagccgccctgaacatcgccagatcctggctgttcctgcggagccaggagtacaagaaataccagacaaacaagacaaccggcaacaccgataagagagccttcgtcgagacctggcagtccttttaccggaagaagcttaaggaggtgtggaaacctgccgtgcggtctggcggatctggcggaggctccacaagcctgaagggcctggtgaccttcgaggacgtggccgtggagttcacccaggaggagtgggccctgctggaccccgcccagaggaccctgtacagggacgtgatgctggagaacttcaggaacctggccagcctgggcaaccaggtggacaagcccggcctgatcagccagctggagcaggaggacaaggtgatgaccgaggagaggggcatcttccccggcgcctgccccgacgtggagaaccccaccagccccaagaaaaagagaaaagtctaagctgccttctgcggggcttgccttctggccatgcccttcttctctcccttgcacctgtacctcttggtctttgaataaagcctgagtaggaaggctagcaaaaaaaaaaaaaaaaaaaaaaaaaaaaaaaaaaaaaaaaaaaaaaaaaaaaaaaaaaaaaaaaaaaaaaaaaaaaaaaa

SEQ ID NO: 3288 - RNA, 5419 nt, synthetic construct
  source 1..5419: mol_type = other RNA
aggaaataagagagaaaagaagagtaagaagaaatataagagccaccatggcccctaagaagaagcgtaaagtgagccgggtgaacggcagcggcagcggcggcggcatgaaccacgaccaggagttcgacccccctaaggtgtaccctcccgtccccgccgagaagagaaagcccatccgggtcctgagcctgttcgatggcatcgccaccggtctgctggtgctgaaggacctgggcatccaggtggataggtacattgcctccgaggtgtgcgaggactccatcaccgtgggaatggtgcgtcatcagggcaagatcatgtacgtgggcgacgtgcggagcgtgacacagaagcatatccaggagtggggccctttcgacctggtgatcggcggcagcccttgcaatgacctgagcatcgtgaacccagcccggaagggcctgtacgagggaaccggcagactgttcttcgagttttacagactgctgcacgacgcccggcctaaggaaggcgacgaccggcccttcttttggctgttcgagaatgtggtggccatgggagtcagcgacaagcgggatattagccggttcctggagagcaaccccgtgatgatcgatgccaaggaagtgagcgccgcccaccgggccagatacttctggggcaatctgcctggcatgaacagacccctggccagcaccgtgaacgacaagctggagctgcaggagtgcctggagcacggccggatcgccaagttcagcaaggtgagaaccatcaccacccgaagcaacagcatcaaacaaggcaaggaccagcactttcctgtgttcatgaacgagaaggaggacatcctgtggtgtaccgagatggagagagtgttcgggttcccagtccactacacagatgtcagcaacatgtctagactggccagacagagactgctgggaagaagctggtccgtccctgtgatcagacacctgttcgcccctctgaaggagtacttcgcctgcgtgagcagcggcaacagcaacgccaacagccggggccccagcttctctagcggcctggtgccactgtccctgagagggagccacatgggccccatggagatctacaaaaccgtgagcgcctggaagcggcagcctgtgcgcgtgctgagcctgtttcggaatatcgataaagtcctgaaaagcctgggattcctggagagcggctctggctccggcggtggcaccctgaagtacgtggaggatgtgacaaacgtggtcagacgggatgtggagaagtggggccccttcgatctggtgtacggcagcacccaacccctgggcagctcttgtgaccggtgccctggctggtacatgtttcagttccaccggatcctgcagtacgccctgccgagacaggagtcccagcggccattcttttggattttcatggacaacttgctgctgaccgaggatgaccaggaaactaccactcggttcctgcagaccgaagccgtgaccctgcaggacgtgagaggccgggactaccagaacgccatgcgggtgtggtccaacatccctggactgaaaagcaagcacgcacctctgacccctaaagaagaggagtacctgcaggcccaggtgcggagcagaagcaagctggacgcccctaaggtggatctgctggtgaagaattgcctcctgcccctgagagagtacttcaagtatttcagccagaatagtctgcccctgggcggcccaagcagcggcgcccctcctcccagcggcggcagcccagccggctccccaacctctaccgaggagggcacctctgagtccgccacccccgagagcggccctggcacctccaccgagcccagcgagggcagcgcacccggcagccctgccggcagccccacctccacagaggagggaaccagcaccgagcccagcgaaggcagcgccccaggcaccagcaccgagcctagtgagggcggctctggcggcggcagcgcccaggagattaaacggatcaacaagatcagaagaagacttgtgaaagacagcaacaccaagaaggccggcaagacaggccccatgaaaaccctgctggttagagtgatgacacccgatctgagagagcggctggaaaacctgagaaagaagcctgaaaatatcccccagcccatcagcaatacatctagagccaacctgaataagctgctgaccgattacaccgaaatgaagaaggcgatcctgcatgtgtactgggaagagttccagaaggaccctgtgggcctgatgagccgggtggcccagcctgccagcaagaagatcgatcagaacaagctgaaacctgagatggacgagaagggcaacctgaccaccgccggctttgcctgctctcagtgtggccagcccctgttcgtgtacaagctggagcaggtgtctgagaagggcaaggcttacaccaactacttcggacggtgcaatgtggccgagcacgaaaagctgatcctgctggcccagctgaagcccgagaaggatagcgacgaagccgtgacatatagcctgggaaagtttgggcagagggccctggatttctacagcattcatgtgaccaaggagtccacccaccccgtgaagcccctggcccagatcgccggaaacagatacgcctccggacctgtgggaaaggccctgagcgacgcatgtatgggcacaatcgcctccttcctgtctaagtaccaggacatcatcatcgaacaccagaaggtggtgaagggcaaccagaagagactggagagcctgcgggagctggccggcaaggaaaacctggaataccctagcgtgaccctgccacctcagcctcacaccaaggagggcgttgatgcctacaacgaagtgatcgcccgggtgcgaatgtgggtgaacctgaacctgtggcagaagctgaagctaagcagagatgatgccaagcctctgctgagactgaagggattcccttcctttcctctggtcgagagacaggccaacgaagtggactggtgggacatggtgtgtaacgtgaagaagctgatcaacgagaaaaaggaggatggcaaggtgttttggcagaatctggctggctacaagagacaggaagccctgagaccatacctgagcagcgaggaagatcggaagaagggaaagaaattcgctcggtaccagctgggcgacctgctgctgcacctggaaaagaagcacggcgaggactggggaaaggtgtacgacgaggcctgggagcggattgacaagaaagtggaaggcctgagcaagcacatcaagctggaagaggaacggagaagcgaggacgcccagagcaaggccgccctgaccgactggctgcgggctaaggccagcttcgtgatcgagggcctgaaggaggccgacaaggacgagttctgcagatgcgagctgaagctgcagaagtggtacggggacctgcggggaaagcccttcgccatcgaagccgagaacagcatcctggacatcagcggcttcagcaagcagtacaactgtgccttcatctggcagaaggacggcgtgaagaagctgaacctgtacctgatcatcaactacttcaagggcggcaagctgcggttcaagaagatcaaacctgaagccttcgaagccaacagattctacaccgtgatcaacaaaaagagcggcgagatcgtgcccatggaggtgaacttcaacttcgacgaccccaacctgatcatcctgcctctggcctttggcaagagacagggcagagaattcatctggaacgacctgctgtccctggaaaccggcagcctgaagctggccaacggaagagtgatcgagaagacactgtacaacagaagaacccggcaggatgagcctgccctgttcgtggccctgaccttcgagcggcgggaggtcctggactcctccaatatcaaaccaatgaacctgatcggcgtggcaagaggcgaaaacatccccgccgtgatcgccctgaccgaccccgagggctgcccactgagccggtttaaggatagcctgggaaacccaacccacatcctgagaatcggcgagagctataaggagaagcagcggaccatccaggccaagaaggaggtggagcagcggagagccggcggctacagccggaagtacgccagcaaagccaagaatctggcagacgatatggtgagaaacaccgctagagatctgctgtactacgccgtgacccaggatgccatgctgatcttcgccaacctgagccggggcttcggccggcagggcaagcggaccttcatggccgagagacagtacacacggatggaggactggctgaccgccaagctggcctacgagggcctgagcaagacctacctgtccaagacactggcccagtacacctccaagacatgcagcaactgtgggtttaccatcaccagcgccgactacgacagggtgctggagaagctgaagaagacagcaacaggctggatgaccacaattaacggcaaggagctgaaggtggagggccagattacctactacaacagatacaagagacagaacgtagtcaaggacctgtccgtcgagctggatagactgagcgaagaatctgtgaacaacgacatctcctcctggacaaagggcagaagcggagaagctctgagcctcctgaagaaaagattctcccatagacccgtgcaggagaagttcgtgtgcctgaactgcggcttcgagacacacgcagccgagcaagccgccctgaacatcgccagatcctggctgttcctgcggagccaggagtacaagaaataccagacaaacaagacaaccggcaacaccgataagagagccttcgtcgagacctggcagtccttttaccggaagaagcttaaggaggtgtggaaacctgccgtgcggtctggcggatctggcggaggctccacaagcgacaagaccatcatcgccttcggcgacgtggccgtggccttcaccgagagggagtggaagctgctgagccccgcccagaggaccctgtacagggacgtgatgctggagacctacagccacctggtgagcctgggcatcgccttcagcaagcccaagttcatcacccagctggagcagggcgacgagccctggagggaggagagcgagtgcctgctggagctgtgccccgagcccaggaccgagaccagccccaagaaaaagagaaaagtctaagctgccttctgcggggcttgccttctggccatgcccttcttctctcccttgcacctgtacctcttggtctttgaataaagcctgagtaggaaggctagcaaaaaaaaaaaaaaaaaaaaaaaaaaaaaaaaaaaaaaaaaaaaaaaaaaaaaaaaaaaaaaaaaaaaaaaaaaaaaaaa

SEQ ID NO: 3289 - RNA, 5419 nt, synthetic construct
  source 1..5419: mol_type = other RNA
aggaaataagagagaaaagaagagtaagaagaaatataagagccaccatggcccctaagaagaagcgtaaagtgagccgggtgaacggcagcggcagcggcggcggcatgaaccacgaccaggagttcgacccccctaaggtgtaccctcccgtccccgccgagaagagaaagcccatccgggtcctgagcctgttcgatggcatcgccaccggtctgctggtgctgaaggacctgggcatccaggtggataggtacattgcctccgaggtgtgcgaggactccatcaccgtgggaatggtgcgtcatcagggcaagatcatgtacgtgggcgacgtgcggagcgtgacacagaagcatatccaggagtggggccctttcgacctggtgatcggcggcagcccttgcaatgacctgagcatcgtgaacccagcccggaagggcctgtacgagggaaccggcagactgttcttcgagttttacagactgctgcacgacgcccggcctaaggaaggcgacgaccggcccttcttttggctgttcgagaatgtggtggccatgggagtcagcgacaagcgggatattagccggttcctggagagcaaccccgtgatgatcgatgccaaggaagtgagcgccgcccaccgggccagatacttctggggcaatctgcctggcatgaacagacccctggccagcaccgtgaacgacaagctggagctgcaggagtgcctggagcacggccggatcgccaagttcagcaaggtgagaaccatcaccacccgaagcaacagcatcaaacaaggcaaggaccagcactttcctgtgttcatgaacgagaaggaggacatcctgtggtgtaccgagatggagagagtgttcgggttcccagtccactacacagatgtcagcaacatgtctagactggccagacagagactgctgggaagaagctggtccgtccctgtgatcagacacctgttcgcccctctgaaggagtacttcgcctgcgtgagcagcggcaacagcaacgccaacagccggggccccagcttctctagcggcctggtgccactgtccctgagagggagccacatgggccccatggagatctacaaaaccgtgagcgcctggaagcggcagcctgtgcgcgtgctgagcctgtttcggaatatcgataaagtcctgaaaagcctgggattcctggagagcggctctggctccggcggtggcaccctgaagtacgtggaggatgtgacaaacgtggtcagacgggatgtggagaagtggggccccttcgatctggtgtacggcagcacccaacccctgggcagctcttgtgaccggtgccctggctggtacatgtttcagttccaccggatcctgcagtacgccctgccgagacaggagtcccagcggccattcttttggattttcatggacaacttgctgctgaccgaggatgaccaggaaactaccactcggttcctgcagaccgaagccgtgaccctgcaggacgtgagaggccgggactaccagaacgccatgcgggtgtggtccaacatccctggactgaaaagcaagcacgcacctctgacccctaaagaagaggagtacctgcaggcccaggtgcggagcagaagcaagctggacgcccctaaggtggatctgctggtgaagaattgcctcctgcccctgagagagtacttcaagtatttcagccagaatagtctgcccctgggcggcccaagcagcggcgcccctcctcccagcggcggcagcccagccggctccccaacctctaccgaggagggcacctctgagtccgccacccccgagagcggccctggcacctccaccgagcccagcgagggcagcgcacccggcagccctgccggcagccccacctccacagaggagggaaccagcaccgagcccagcgaaggcagcgccccaggcaccagcaccgagcctagtgagggcggctctggcggcggcagcgcccaggagattaaacggatcaacaagatcagaagaagacttgtgaaagacagcaacaccaagaaggccggcaagacaggccccatgaaaaccctgctggttagagtgatgacacccgatctgagagagcggctggaaaacctgagaaagaagcctgaaaatatcccccagcccatcagcaatacatctagagccaacctgaataagctgctgaccgattacaccgaaatgaagaaggcgatcctgcatgtgtactgggaagagttccagaaggaccctgtgggcctgatgagccgggtggcccagcctgccagcaagaagatcgatcagaacaagctgaaacctgagatggacgagaagggcaacctgaccaccgccggctttgcctgctctcagtgtggccagcccctgttcgtgtacaagctggagcaggtgtctgagaagggcaaggcttacaccaactacttcggacggtgcaatgtggccgagcacgaaaagctgatcctgctggcccagctgaagcccgagaaggatagcgacgaagccgtgacatatagcctgggaaagtttgggcagagggccctggatttctacagcattcatgtgaccaaggagtccacccaccccgtgaagcccctggcccagatcgccggaaacagatacgcctccggacctgtgggaaaggccctgagcgacgcatgtatgggcacaatcgcctccttcctgtctaagtaccaggacatcatcatcgaacaccagaaggtggtgaagggcaaccagaagagactggagagcctgcgggagctggccggcaaggaaaacctggaataccctagcgtgaccctgccacctcagcctcacaccaaggagggcgttgatgcctacaacgaagtgatcgcccgggtgcgaatgtgggtgaacctgaacctgtggcagaagctgaagctaagcagagatgatgccaagcctctgctgagactgaagggattcccttcctttcctctggtcgagagacaggccaacgaagtggactggtgggacatggtgtgtaacgtgaagaagctgatcaacgagaaaaaggaggatggcaaggtgttttggcagaatctggctggctacaagagacaggaagccctgagaccatacctgagcagcgaggaagatcggaagaagggaaagaaattcgctcggtaccagctgggcgacctgctgctgcacctggaaaagaagcacggcgaggactggggaaaggtgtacgacgaggcctgggagcggattgacaagaaagtggaaggcctgagcaagcacatcaagctggaagaggaacggagaagcgaggacgcccagagcaaggccgccctgaccgactggctgcgggctaaggccagcttcgtgatcgagggcctgaaggaggccgacaaggacgagttctgcagatgcgagctgaagctgcagaagtggtacggggacctgcggggaaagcccttcgccatcgaagccgagaacagcatcctggacatcagcggcttcagcaagcagtacaactgtgccttcatctggcagaaggacggcgtgaagaagctgaacctgtacctgatcatcaactacttcaagggcggcaagctgcggttcaagaagatcaaacctgaagccttcgaagccaacagattctacaccgtgatcaacaaaaagagcggcgagatcgtgcccatggaggtgaacttcaacttcgacgaccccaacctgatcatcctgcctctggcctttggcaagagacagggcagagaattcatctggaacgacctgctgtccctggaaaccggcagcctgaagctggccaacggaagagtgatcgagaagacactgtacaacagaagaacccggcaggatgagcctgccctgttcgtggccctgaccttcgagcggcgggaggtcctggactcctccaatatcaaaccaatgaacctgatcggcgtggcaagaggcgaaaacatccccgccgtgatcgccctgaccgaccccgagggctgcccactgagccggtttaaggatagcctgggaaacccaacccacatcctgagaatcggcgagagctataaggagaagcagcggaccatccaggccaagaaggaggtggagcagcggagagccggcggctacagccggaagtacgccagcaaagccaagaatctggcagacgatatggtgagaaacaccgctagagatctgctgtactacgccgtgacccaggatgccatgctgatcttcgccaacctgagccggggcttcggccggcagggcaagcggaccttcatggccgagagacagtacacacggatggaggactggctgaccgccaagctggcctacgagggcctgagcaagacctacctgtccaagacactggcccagtacacctccaagacatgcagcaactgtgggtttaccatcaccagcgccgactacgacagggtgctggagaagctgaagaagacagcaacaggctggatgaccacaattaacggcaaggagctgaaggtggagggccagattacctactacaacagatacaagagacagaacgtagtcaaggacctgtccgtcgagctggatagactgagcgaagaatctgtgaacaacgacatctcctcctggacaaagggcagaagcggagaagctctgagcctcctgaagaaaagattctcccatagacccgtgcaggagaagttcgtgtgcctgaactgcggcttcgagacacacgcagccgagcaagccgccctgaacatcgccagatcctggctgttcctgcggagccaggagtacaagaaataccagacaaacaagacaaccggcaacaccgataagagagccttcgtcgagacctggcagtccttttaccggaagaagcttaaggaggtgtggaaacctgccgtgcggtctggcggatctggcggaggctccacaagcggcaagatgcccgtgaccttcgaggacgtggccgtgtacttcagccccgaggagtgggccgagctggccggctggcagaggaggctgtacagggaggtgatgctggagaactaccaggccgtggccagcctgggctggcccgccgtgaagcccgagatcatctgcaagatggagagggaggagatgccctgcatgcccgccccccccagggccaggtggaggcacaggacccccgtgcccgccaccagccccaagaaaaagagaaaagtctaagctgccttctgcggggcttgccttctggccatgcccttcttctctcccttgcacctgtacctcttggtctttgaataaagcctgagtaggaaggctagcaaaaaaaaaaaaaaaaaaaaaaaaaaaaaaaaaaaaaaaaaaaaaaaaaaaaaaaaaaaaaaaaaaaaaaaaaaaaaaaa

SEQ ID NO: 3290 - RNA, 5419 nt, synthetic construct
  source 1..5419: mol_type = other RNA
aggaaataagagagaaaagaagagtaagaagaaatataagagccaccatggcccctaagaagaagcgtaaagtgagccgggtgaacggcagcggcagcggcggcggcatgaaccacgaccaggagttcgacccccctaaggtgtaccctcccgtccccgccgagaagagaaagcccatccgggtcctgagcctgttcgatggcatcgccaccggtctgctggtgctgaaggacctgggcatccaggtggataggtacattgcctccgaggtgtgcgaggactccatcaccgtgggaatggtgcgtcatcagggcaagatcatgtacgtgggcgacgtgcggagcgtgacacagaagcatatccaggagtggggccctttcgacctggtgatcggcggcagcccttgcaatgacctgagcatcgtgaacccagcccggaagggcctgtacgagggaaccggcagactgttcttcgagttttacagactgctgcacgacgcccggcctaaggaaggcgacgaccggcccttcttttggctgttcgagaatgtggtggccatgggagtcagcgacaagcgggatattagccggttcctggagagcaaccccgtgatgatcgatgccaaggaagtgagcgccgcccaccgggccagatacttctggggcaatctgcctggcatgaacagacccctggccagcaccgtgaacgacaagctggagctgcaggagtgcctggagcacggccggatcgccaagttcagcaaggtgagaaccatcaccacccgaagcaacagcatcaaacaaggcaaggaccagcactttcctgtgttcatgaacgagaaggaggacatcctgtggtgtaccgagatggagagagtgttcgggttcccagtccactacacagatgtcagcaacatgtctagactggccagacagagactgctgggaagaagctggtccgtccctgtgatcagacacctgttcgcccctctgaaggagtacttcgcctgcgtgagcagcggcaacagcaacgccaacagccggggccccagcttctctagcggcctggtgccactgtccctgagagggagccacatgggccccatggagatctacaaaaccgtgagcgcctggaagcggcagcctgtgcgcgtgctgagcctgtttcggaatatcgataaagtcctgaaaagcctgggattcctggagagcggctctggctccggcggtggcaccctgaagtacgtggaggatgtgacaaacgtggtcagacgggatgtggagaagtggggccccttcgatctggtgtacggcagcacccaacccctgggcagctcttgtgaccggtgccctggctggtacatgtttcagttccaccggatcctgcagtacgccctgccgagacaggagtcccagcggccattcttttggattttcatggacaacttgctgctgaccgaggatgaccaggaaactaccactcggttcctgcagaccgaagccgtgaccctgcaggacgtgagaggccgggactaccagaacgccatgcgggtgtggtccaacatccctggactgaaaagcaagcacgcacctctgacccctaaagaagaggagtacctgcaggcccaggtgcggagcagaagcaagctggacgcccctaaggtggatctgctggtgaagaattgcctcctgcccctgagagagtacttcaagtatttcagccagaatagtctgcccctgggcggcccaagcagcggcgcccctcctcccagcggcggcagcccagccggctccccaacctctaccgaggagggcacctctgagtccgccacccccgagagcggccctggcacctccaccgagcccagcgagggcagcgcacccggcagccctgccggcagccccacctccacagaggagggaaccagcaccgagcccagcgaaggcagcgccccaggcaccagcaccgagcctagtgagggcggctctggcggcggcagcgcccaggagattaaacggatcaacaagatcagaagaagacttgtgaaagacagcaacaccaagaaggccggcaagacaggccccatgaaaaccctgctggttagagtgatgacacccgatctgagagagcggctggaaaacctgagaaagaagcctgaaaatatcccccagcccatcagcaatacatctagagccaacctgaataagctgctgaccgattacaccgaaatgaagaaggcgatcctgcatgtgtactgggaagagttccagaaggaccctgtgggcctgatgagccgggtggcccagcctgccagcaagaagatcgatcagaacaagctgaaacctgagatggacgagaagggcaacctgaccaccgccggctttgcctgctctcagtgtggccagcccctgttcgtgtacaagctggagcaggtgtctgagaagggcaaggcttacaccaactacttcggacggtgcaatgtggccgagcacgaaaagctgatcctgctggcccagctgaagcccgagaaggatagcgacgaagccgtgacatatagcctgggaaagtttgggcagagggccctggatttctacagcattcatgtgaccaaggagtccacccaccccgtgaagcccctggcccagatcgccggaaacagatacgcctccggacctgtgggaaaggccctgagcgacgcatgtatgggcacaatcgcctccttcctgtctaagtaccaggacatcatcatcgaacaccagaaggtggtgaagggcaaccagaagagactggagagcctgcgggagctggccggcaaggaaaacctggaataccctagcgtgaccctgccacctcagcctcacaccaaggagggcgttgatgcctacaacgaagtgatcgcccgggtgcgaatgtgggtgaacctgaacctgtggcagaagctgaagctaagcagagatgatgccaagcctctgctgagactgaagggattcccttcctttcctctggtcgagagacaggccaacgaagtggactggtgggacatggtgtgtaacgtgaagaagctgatcaacgagaaaaaggaggatggcaaggtgttttggcagaatctggctggctacaagagacaggaagccctgagaccatacctgagcagcgaggaagatcggaagaagggaaagaaattcgctcggtaccagctgggcgacctgctgctgcacctggaaaagaagcacggcgaggactggggaaaggtgtacgacgaggcctgggagcggattgacaagaaagtggaaggcctgagcaagcacatcaagctggaagaggaacggagaagcgaggacgcccagagcaaggccgccctgaccgactggctgcgggctaaggccagcttcgtgatcgagggcctgaaggaggccgacaaggacgagttctgcagatgcgagctgaagctgcagaagtggtacggggacctgcggggaaagcccttcgccatcgaagccgagaacagcatcctggacatcagcggcttcagcaagcagtacaactgtgccttcatctggcagaaggacggcgtgaagaagctgaacctgtacctgatcatcaactacttcaagggcggcaagctgcggttcaagaagatcaaacctgaagccttcgaagccaacagattctacaccgtgatcaacaaaaagagcggcgagatcgtgcccatggaggtgaacttcaacttcgacgaccccaacctgatcatcctgcctctggcctttggcaagagacagggcagagaattcatctggaacgacctgctgtccctggaaaccggcagcctgaagctggccaacggaagagtgatcgagaagacactgtacaacagaagaacccggcaggatgagcctgccctgttcgtggccctgaccttcgagcggcgggaggtcctggactcctccaatatcaaaccaatgaacctgatcggcgtggcaagaggcgaaaacatccccgccgtgatcgccctgaccgaccccgagggctgcccactgagccggtttaaggatagcctgggaaacccaacccacatcctgagaatcggcgagagctataaggagaagcagcggaccatccaggccaagaaggaggtggagcagcggagagccggcggctacagccggaagtacgccagcaaagccaagaatctggcagacgatatggtgagaaacaccgctagagatctgctgtactacgccgtgacccaggatgccatgctgatcttcgccaacctgagccggggcttcggccggcagggcaagcggaccttcatggccgagagacagtacacacggatggaggactggctgaccgccaagctggcctacgagggcctgagcaagacctacctgtccaagacactggcccagtacacctccaagacatgcagcaactgtgggtttaccatcaccagcgccgactacgacagggtgctggagaagctgaagaagacagcaacaggctggatgaccacaattaacggcaaggagctgaaggtggagggccagattacctactacaacagatacaagagacagaacgtagtcaaggacctgtccgtcgagctggatagactgagcgaagaatctgtgaacaacgacatctcctcctggacaaagggcagaagcggagaagctctgagcctcctgaagaaaagattctcccatagacccgtgcaggagaagttcgtgtgcctgaactgcggcttcgagacacacgcagccgagcaagccgccctgaacatcgccagatcctggctgttcctgcggagccaggagtacaagaaataccagacaaacaagacaaccggcaacaccgataagagagccttcgtcgagacctggcagtccttttaccggaagaagcttaaggaggtgtggaaacctgccgtgcggtctggcggatctggcggaggctccacaagccagtgcggcctgctgaccttcggcgacgtggccatcgagttcagccaggaggagtggaggtgcctgagccacacccagagggagctgtacagggacgtgatgctggagaactacggccacctgctgttcctgggcctgatcgtgagcaagcccgacctggtgagcctgctggagcagagcaaggagccctgggacgtgaggaggaagaagacccagaggcccagcgtgctgatgggccacgtgaccagccccaagaaaaagagaaaagtctaagctgccttctgcggggcttgccttctggccatgcccttcttctctcccttgcacctgtacctcttggtctttgaataaagcctgagtaggaaggctagcaaaaaaaaaaaaaaaaaaaaaaaaaaaaaaaaaaaaaaaaaaaaaaaaaaaaaaaaaaaaaaaaaaaaaaaaaaaaaaaa

SEQ ID NO: 3291 - RNA, 5419 nt, synthetic construct
  source 1..5419: mol_type = other RNA
aggaaataagagagaaaagaagagtaagaagaaatataagagccaccatggcccctaagaagaagcgtaaagtgagccgggtgaacggcagcggcagcggcggcggcatgaaccacgaccaggagttcgacccccctaaggtgtaccctcccgtccccgccgagaagagaaagcccatccgggtcctgagcctgttcgatggcatcgccaccggtctgctggtgctgaaggacctgggcatccaggtggataggtacattgcctccgaggtgtgcgaggactccatcaccgtgggaatggtgcgtcatcagggcaagatcatgtacgtgggcgacgtgcggagcgtgacacagaagcatatccaggagtggggccctttcgacctggtgatcggcggcagcccttgcaatgacctgagcatcgtgaacccagcccggaagggcctgtacgagggaaccggcagactgttcttcgagttttacagactgctgcacgacgcccggcctaaggaaggcgacgaccggcccttcttttggctgttcgagaatgtggtggccatgggagtcagcgacaagcgggatattagccggttcctggagagcaaccccgtgatgatcgatgccaaggaagtgagcgccgcccaccgggccagatacttctggggcaatctgcctggcatgaacagacccctggccagcaccgtgaacgacaagctggagctgcaggagtgcctggagcacggccggatcgccaagttcagcaaggtgagaaccatcaccacccgaagcaacagcatcaaacaaggcaaggaccagcactttcctgtgttcatgaacgagaaggaggacatcctgtggtgtaccgagatggagagagtgttcgggttcccagtccactacacagatgtcagcaacatgtctagactggccagacagagactgctgggaagaagctggtccgtccctgtgatcagacacctgttcgcccctctgaaggagtacttcgcctgcgtgagcagcggcaacagcaacgccaacagccggggccccagcttctctagcggcctggtgccactgtccctgagagggagccacatgggccccatggagatctacaaaaccgtgagcgcctggaagcggcagcctgtgcgcgtgctgagcctgtttcggaatatcgataaagtcctgaaaagcctgggattcctggagagcggctctggctccggcggtggcaccctgaagtacgtggaggatgtgacaaacgtggtcagacgggatgtggagaagtggggccccttcgatctggtgtacggcagcacccaacccctgggcagctcttgtgaccggtgccctggctggtacatgtttcagttccaccggatcctgcagtacgccctgccgagacaggagtcccagcggccattcttttggattttcatggacaacttgctgctgaccgaggatgaccaggaaactaccactcggttcctgcagaccgaagccgtgaccctgcaggacgtgagaggccgggactaccagaacgccatgcgggtgtggtccaacatccctggactgaaaagcaagcacgcacctctgacccctaaagaagaggagtacctgcaggcccaggtgcggagcagaagcaagctggacgcccctaaggtggatctgctggtgaagaattgcctcctgcccctgagagagtacttcaagtatttcagccagaatagtctgcccctgggcggcccaagcagcggcgcccctcctcccagcggcggcagcccagccggctccccaacctctaccgaggagggcacctctgagtccgccacccccgagagcggccctggcacctccaccgagcccagcgagggcagcgcacccggcagccctgccggcagccccacctccacagaggagggaaccagcaccgagcccagcgaaggcagcgccccaggcaccagcaccgagcctagtgagggcggctctggcggcggcagcgcccaggagattaaacggatcaacaagatcagaagaagacttgtgaaagacagcaacaccaagaaggccggcaagacaggccccatgaaaaccctgctggttagagtgatgacacccgatctgagagagcggctggaaaacctgagaaagaagcctgaaaatatcccccagcccatcagcaatacatctagagccaacctgaataagctgctgaccgattacaccgaaatgaagaaggcgatcctgcatgtgtactgggaagagttccagaaggaccctgtgggcctgatgagccgggtggcccagcctgccagcaagaagatcgatcagaacaagctgaaacctgagatggacgagaagggcaacctgaccaccgccggctttgcctgctctcagtgtggccagcccctgttcgtgtacaagctggagcaggtgtctgagaagggcaaggcttacaccaactacttcggacggtgcaatgtggccgagcacgaaaagctgatcctgctggcccagctgaagcccgagaaggatagcgacgaagccgtgacatatagcctgggaaagtttgggcagagggccctggatttctacagcattcatgtgaccaaggagtccacccaccccgtgaagcccctggcccagatcgccggaaacagatacgcctccggacctgtgggaaaggccctgagcgacgcatgtatgggcacaatcgcctccttcctgtctaagtaccaggacatcatcatcgaacaccagaaggtggtgaagggcaaccagaagagactggagagcctgcgggagctggccggcaaggaaaacctggaataccctagcgtgaccctgccacctcagcctcacaccaaggagggcgttgatgcctacaacgaagtgatcgcccgggtgcgaatgtgggtgaacctgaacctgtggcagaagctgaagctaagcagagatgatgccaagcctctgctgagactgaagggattcccttcctttcctctggtcgagagacaggccaacgaagtggactggtgggacatggtgtgtaacgtgaagaagctgatcaacgagaaaaaggaggatggcaaggtgttttggcagaatctggctggctacaagagacaggaagccctgagaccatacctgagcagcgaggaagatcggaagaagggaaagaaattcgctcggtaccagctgggcgacctgctgctgcacctggaaaagaagcacggcgaggactggggaaaggtgtacgacgaggcctgggagcggattgacaagaaagtggaaggcctgagcaagcacatcaagctggaagaggaacggagaagcgaggacgcccagagcaaggccgccctgaccgactggctgcgggctaaggccagcttcgtgatcgagggcctgaaggaggccgacaaggacgagttctgcagatgcgagctgaagctgcagaagtggtacggggacctgcggggaaagcccttcgccatcgaagccgagaacagcatcctggacatcagcggcttcagcaagcagtacaactgtgccttcatctggcagaaggacggcgtgaagaagctgaacctgtacctgatcatcaactacttcaagggcggcaagctgcggttcaagaagatcaaacctgaagccttcgaagccaacagattctacaccgtgatcaacaaaaagagcggcgagatcgtgcccatggaggtgaacttcaacttcgacgaccccaacctgatcatcctgcctctggcctttggcaagagacagggcagagaattcatctggaacgacctgctgtccctggaaaccggcagcctgaagctggccaacggaagagtgatcgagaagacactgtacaacagaagaacccggcaggatgagcctgccctgttcgtggccctgaccttcgagcggcgggaggtcctggactcctccaatatcaaaccaatgaacctgatcggcgtggcaagaggcgaaaacatccccgccgtgatcgccctgaccgaccccgagggctgcccactgagccggtttaaggatagcctgggaaacccaacccacatcctgagaatcggcgagagctataaggagaagcagcggaccatccaggccaagaaggaggtggagcagcggagagccggcggctacagccggaagtacgccagcaaagccaagaatctggcagacgatatggtgagaaacaccgctagagatctgctgtactacgccgtgacccaggatgccatgctgatcttcgccaacctgagccggggcttcggccggcagggcaagcggaccttcatggccgagagacagtacacacggatggaggactggctgaccgccaagctggcctacgagggcctgagcaagacctacctgtccaagacactggcccagtacacctccaagacatgcagcaactgtgggtttaccatcaccagcgccgactacgacagggtgctggagaagctgaagaagacagcaacaggctggatgaccacaattaacggcaaggagctgaaggtggagggccagattacctactacaacagatacaagagacagaacgtagtcaaggacctgtccgtcgagctggatagactgagcgaagaatctgtgaacaacgacatctcctcctggacaaagggcagaagcggagaagctctgagcctcctgaagaaaagattctcccatagacccgtgcaggagaagttcgtgtgcctgaactgcggcttcgagacacacgcagccgagcaagccgccctgaacatcgccagatcctggctgttcctgcggagccaggagtacaagaaataccagacaaacaagacaaccggcaacaccgataagagagccttcgtcgagacctggcagtccttttaccggaagaagcttaaggaggtgtggaaacctgccgtgcggtctggcggatctggcggaggctccacaagcttccaggaggccgtgaccttcaaggacgtggccgtggccttcaccgaggaggagctgggcctgctggaccccgcccagaggaagctgtacagggacgtgatgctggagaacttcaggaacctggtgagcgtgggccaccagagcttcaagcccgacatgatcagccagctggagagggaggagaagctgtggatgaaggagttccagacccagaggggcaagcacagcggcgacaggaacctgaccagccccaagaaaaagagaaaagtctaagctgccttctgcggggcttgccttctggccatgcccttcttctctcccttgcacctgtacctcttggtctttgaataaagcctgagtaggaaggctagcaaaaaaaaaaaaaaaaaaaaaaaaaaaaaaaaaaaaaaaaaaaaaaaaaaaaaaaaaaaaaaaaaaaaaaaaaaaaaaaa

SEQ ID NO: 3292 - RNA, 5419 nt, synthetic construct
  source 1..5419: mol_type = other RNA
aggaaataagagagaaaagaagagtaagaagaaatataagagccaccatggcccctaagaagaagcgtaaagtgagccgggtgaacggcagcggcagcggcggcggcatgaaccacgaccaggagttcgacccccctaaggtgtaccctcccgtccccgccgagaagagaaagcccatccgggtcctgagcctgttcgatggcatcgccaccggtctgctggtgctgaaggacctgggcatccaggtggataggtacattgcctccgaggtgtgcgaggactccatcaccgtgggaatggtgcgtcatcagggcaagatcatgtacgtgggcgacgtgcggagcgtgacacagaagcatatccaggagtggggccctttcgacctggtgatcggcggcagcccttgcaatgacctgagcatcgtgaacccagcccggaagggcctgtacgagggaaccggcagactgttcttcgagttttacagactgctgcacgacgcccggcctaaggaaggcgacgaccggcccttcttttggctgttcgagaatgtggtggccatgggagtcagcgacaagcgggatattagccggttcctggagagcaaccccgtgatgatcgatgccaaggaagtgagcgccgcccaccgggccagatacttctggggcaatctgcctggcatgaacagacccctggccagcaccgtgaacgacaagctggagctgcaggagtgcctggagcacggccggatcgccaagttcagcaaggtgagaaccatcaccacccgaagcaacagcatcaaacaaggcaaggaccagcactttcctgtgttcatgaacgagaaggaggacatcctgtggtgtaccgagatggagagagtgttcgggttcccagtccactacacagatgtcagcaacatgtctagactggccagacagagactgctgggaagaagctggtccgtccctgtgatcagacacctgttcgcccctctgaaggagtacttcgcctgcgtgagcagcggcaacagcaacgccaacagccggggccccagcttctctagcggcctggtgccactgtccctgagagggagccacatgggccccatggagatctacaaaaccgtgagcgcctggaagcggcagcctgtgcgcgtgctgagcctgtttcggaatatcgataaagtcctgaaaagcctgggattcctggagagcggctctggctccggcggtggcaccctgaagtacgtggaggatgtgacaaacgtggtcagacgggatgtggagaagtggggccccttcgatctggtgtacggcagcacccaacccctgggcagctcttgtgaccggtgccctggctggtacatgtttcagttccaccggatcctgcagtacgccctgccgagacaggagtcccagcggccattcttttggattttcatggacaacttgctgctgaccgaggatgaccaggaaactaccactcggttcctgcagaccgaagccgtgaccctgcaggacgtgagaggccgggactaccagaacgccatgcgggtgtggtccaacatccctggactgaaaagcaagcacgcacctctgacccctaaagaagaggagtacctgcaggcccaggtgcggagcagaagcaagctggacgcccctaaggtggatctgctggtgaagaattgcctcctgcccctgagagagtacttcaagtatttcagccagaatagtctgcccctgggcggcccaagcagcggcgcccctcctcccagcggcggcagcccagccggctccccaacctctaccgaggagggcacctctgagtccgccacccccgagagcggccctggcacctccaccgagcccagcgagggcagcgcacccggcagccctgccggcagccccacctccacagaggagggaaccagcaccgagcccagcgaaggcagcgccccaggcaccagcaccgagcctagtgagggcggctctggcggcggcagcgcccaggagattaaacggatcaacaagatcagaagaagacttgtgaaagacagcaacaccaagaaggccggcaagacaggccccatgaaaaccctgctggttagagtgatgacacccgatctgagagagcggctggaaaacctgagaaagaagcctgaaaatatcccccagcccatcagcaatacatctagagccaacctgaataagctgctgaccgattacaccgaaatgaagaaggcgatcctgcatgtgtactgggaagagttccagaaggaccctgtgggcctgatgagccgggtggcccagcctgccagcaagaagatcgatcagaacaagctgaaacctgagatggacgagaagggcaacctgaccaccgccggctttgcctgctctcagtgtggccagcccctgttcgtgtacaagctggagcaggtgtctgagaagggcaaggcttacaccaactacttcggacggtgcaatgtggccgagcacgaaaagctgatcctgctggcccagctgaagcccgagaaggatagcgacgaagccgtgacatatagcctgggaaagtttgggcagagggccctggatttctacagcattcatgtgaccaaggagtccacccaccccgtgaagcccctggcccagatcgccggaaacagatacgcctccggacctgtgggaaaggccctgagcgacgcatgtatgggcacaatcgcctccttcctgtctaagtaccaggacatcatcatcgaacaccagaaggtggtgaagggcaaccagaagagactggagagcctgcgggagctggccggcaaggaaaacctggaataccctagcgtgaccctgccacctcagcctcacaccaaggagggcgttgatgcctacaacgaagtgatcgcccgggtgcgaatgtgggtgaacctgaacctgtggcagaagctgaagctaagcagagatgatgccaagcctctgctgagactgaagggattcccttcctttcctctggtcgagagacaggccaacgaagtggactggtgggacatggtgtgtaacgtgaagaagctgatcaacgagaaaaaggaggatggcaaggtgttttggcagaatctggctggctacaagagacaggaagccctgagaccatacctgagcagcgaggaagatcggaagaagggaaagaaattcgctcggtaccagctgggcgacctgctgctgcacctggaaaagaagcacggcgaggactggggaaaggtgtacgacgaggcctgggagcggattgacaagaaagtggaaggcctgagcaagcacatcaagctggaagaggaacggagaagcgaggacgcccagagcaaggccgccctgaccgactggctgcgggctaaggccagcttcgtgatcgagggcctgaaggaggccgacaaggacgagttctgcagatgcgagctgaagctgcagaagtggtacggggacctgcggggaaagcccttcgccatcgaagccgagaacagcatcctggacatcagcggcttcagcaagcagtacaactgtgccttcatctggcagaaggacggcgtgaagaagctgaacctgtacctgatcatcaactacttcaagggcggcaagctgcggttcaagaagatcaaacctgaagccttcgaagccaacagattctacaccgtgatcaacaaaaagagcggcgagatcgtgcccatggaggtgaacttcaacttcgacgaccccaacctgatcatcctgcctctggcctttggcaagagacagggcagagaattcatctggaacgacctgctgtccctggaaaccggcagcctgaagctggccaacggaagagtgatcgagaagacactgtacaacagaagaacccggcaggatgagcctgccctgttcgtggccctgaccttcgagcggcgggaggtcctggactcctccaatatcaaaccaatgaacctgatcggcgtggcaagaggcgaaaacatccccgccgtgatcgccctgaccgaccccgagggctgcccactgagccggtttaaggatagcctgggaaacccaacccacatcctgagaatcggcgagagctataaggagaagcagcggaccatccaggccaagaaggaggtggagcagcggagagccggcggctacagccggaagtacgccagcaaagccaagaatctggcagacgatatggtgagaaacaccgctagagatctgctgtactacgccgtgacccaggatgccatgctgatcttcgccaacctgagccggggcttcggccggcagggcaagcggaccttcatggccgagagacagtacacacggatggaggactggctgaccgccaagctggcctacgagggcctgagcaagacctacctgtccaagacactggcccagtacacctccaagacatgcagcaactgtgggtttaccatcaccagcgccgactacgacagggtgctggagaagctgaagaagacagcaacaggctggatgaccacaattaacggcaaggagctgaaggtggagggccagattacctactacaacagatacaagagacagaacgtagtcaaggacctgtccgtcgagctggatagactgagcgaagaatctgtgaacaacgacatctcctcctggacaaagggcagaagcggagaagctctgagcctcctgaagaaaagattctcccatagacccgtgcaggagaagttcgtgtgcctgaactgcggcttcgagacacacgcagccgagcaagccgccctgaacatcgccagatcctggctgttcctgcggagccaggagtacaagaaataccagacaaacaagacaaccggcaacaccgataagagagccttcgtcgagacctggcagtccttttaccggaagaagcttaaggaggtgtggaaacctgccgtgcggtctggcggatctggcggaggctccacaagcagccaggtgagcgtgaccttcgaggacgtggccgtgctgttcaccagggacgagtggaagaagctggtgcccagccagaggagcctgtacagggaggtgatgctggagaactacagcaacctggccagcctggccggcttccccttcaccaagcccaaggtgatcagcctgctgcagcagggcgaggacccctggaaggtggaggaggagggccccggcggcttcagcctgggcctgaagtgcaccagccccaagaaaaagagaaaagtctaagctgccttctgcggggcttgccttctggccatgcccttcttctctcccttgcacctgtacctcttggtctttgaataaagcctgagtaggaaggctagcaaaaaaaaaaaaaaaaaaaaaaaaaaaaaaaaaaaaaaaaaaaaaaaaaaaaaaaaaaaaaaaaaaaaaaaaaaaaaaaa

SEQ ID NO: 3293 - RNA, 5419 nt, synthetic construct
  source 1..5419: mol_type = other RNA
aggaaataagagagaaaagaagagtaagaagaaatataagagccaccatggcccctaagaagaagcgtaaagtgagccgggtgaacggcagcggcagcggcggcggcatgaaccacgaccaggagttcgacccccctaaggtgtaccctcccgtccccgccgagaagagaaagcccatccgggtcctgagcctgttcgatggcatcgccaccggtctgctggtgctgaaggacctgggcatccaggtggataggtacattgcctccgaggtgtgcgaggactccatcaccgtgggaatggtgcgtcatcagggcaagatcatgtacgtgggcgacgtgcggagcgtgacacagaagcatatccaggagtggggccctttcgacctggtgatcggcggcagcccttgcaatgacctgagcatcgtgaacccagcccggaagggcctgtacgagggaaccggcagactgttcttcgagttttacagactgctgcacgacgcccggcctaaggaaggcgacgaccggcccttcttttggctgttcgagaatgtggtggccatgggagtcagcgacaagcgggatattagccggttcctggagagcaaccccgtgatgatcgatgccaaggaagtgagcgccgcccaccgggccagatacttctggggcaatctgcctggcatgaacagacccctggccagcaccgtgaacgacaagctggagctgcaggagtgcctggagcacggccggatcgccaagttcagcaaggtgagaaccatcaccacccgaagcaacagcatcaaacaaggcaaggaccagcactttcctgtgttcatgaacgagaaggaggacatcctgtggtgtaccgagatggagagagtgttcgggttcccagtccactacacagatgtcagcaacatgtctagactggccagacagagactgctgggaagaagctggtccgtccctgtgatcagacacctgttcgcccctctgaaggagtacttcgcctgcgtgagcagcggcaacagcaacgccaacagccggggccccagcttctctagcggcctggtgccactgtccctgagagggagccacatgggccccatggagatctacaaaaccgtgagcgcctggaagcggcagcctgtgcgcgtgctgagcctgtttcggaatatcgataaagtcctgaaaagcctgggattcctggagagcggctctggctccggcggtggcaccctgaagtacgtggaggatgtgacaaacgtggtcagacgggatgtggagaagtggggccccttcgatctggtgtacggcagcacccaacccctgggcagctcttgtgaccggtgccctggctggtacatgtttcagttccaccggatcctgcagtacgccctgccgagacaggagtcccagcggccattcttttggattttcatggacaacttgctgctgaccgaggatgaccaggaaactaccactcggttcctgcagaccgaagccgtgaccctgcaggacgtgagaggccgggactaccagaacgccatgcgggtgtggtccaacatccctggactgaaaagcaagcacgcacctctgacccctaaagaagaggagtacctgcaggcccaggtgcggagcagaagcaagctggacgcccctaaggtggatctgctggtgaagaattgcctcctgcccctgagagagtacttcaagtatttcagccagaatagtctgcccctgggcggcccaagcagcggcgcccctcctcccagcggcggcagcccagccggctccccaacctctaccgaggagggcacctctgagtccgccacccccgagagcggccctggcacctccaccgagcccagcgagggcagcgcacccggcagccctgccggcagccccacctccacagaggagggaaccagcaccgagcccagcgaaggcagcgccccaggcaccagcaccgagcctagtgagggcggctctggcggcggcagcgcccaggagattaaacggatcaacaagatcagaagaagacttgtgaaagacagcaacaccaagaaggccggcaagacaggccccatgaaaaccctgctggttagagtgatgacacccgatctgagagagcggctggaaaacctgagaaagaagcctgaaaatatcccccagcccatcagcaatacatctagagccaacctgaataagctgctgaccgattacaccgaaatgaagaaggcgatcctgcatgtgtactgggaagagttccagaaggaccctgtgggcctgatgagccgggtggcccagcctgccagcaagaagatcgatcagaacaagctgaaacctgagatggacgagaagggcaacctgaccaccgccggctttgcctgctctcagtgtggccagcccctgttcgtgtacaagctggagcaggtgtctgagaagggcaaggcttacaccaactacttcggacggtgcaatgtggccgagcacgaaaagctgatcctgctggcccagctgaagcccgagaaggatagcgacgaagccgtgacatatagcctgggaaagtttgggcagagggccctggatttctacagcattcatgtgaccaaggagtccacccaccccgtgaagcccctggcccagatcgccggaaacagatacgcctccggacctgtgggaaaggccctgagcgacgcatgtatgggcacaatcgcctccttcctgtctaagtaccaggacatcatcatcgaacaccagaaggtggtgaagggcaaccagaagagactggagagcctgcgggagctggccggcaaggaaaacctggaataccctagcgtgaccctgccacctcagcctcacaccaaggagggcgttgatgcctacaacgaagtgatcgcccgggtgcgaatgtgggtgaacctgaacctgtggcagaagctgaagctaagcagagatgatgccaagcctctgctgagactgaagggattcccttcctttcctctggtcgagagacaggccaacgaagtggactggtgggacatggtgtgtaacgtgaagaagctgatcaacgagaaaaaggaggatggcaaggtgttttggcagaatctggctggctacaagagacaggaagccctgagaccatacctgagcagcgaggaagatcggaagaagggaaagaaattcgctcggtaccagctgggcgacctgctgctgcacctggaaaagaagcacggcgaggactggggaaaggtgtacgacgaggcctgggagcggattgacaagaaagtggaaggcctgagcaagcacatcaagctggaagaggaacggagaagcgaggacgcccagagcaaggccgccctgaccgactggctgcgggctaaggccagcttcgtgatcgagggcctgaaggaggccgacaaggacgagttctgcagatgcgagctgaagctgcagaagtggtacggggacctgcggggaaagcccttcgccatcgaagccgagaacagcatcctggacatcagcggcttcagcaagcagtacaactgtgccttcatctggcagaaggacggcgtgaagaagctgaacctgtacctgatcatcaactacttcaagggcggcaagctgcggttcaagaagatcaaacctgaagccttcgaagccaacagattctacaccgtgatcaacaaaaagagcggcgagatcgtgcccatggaggtgaacttcaacttcgacgaccccaacctgatcatcctgcctctggcctttggcaagagacagggcagagaattcatctggaacgacctgctgtccctggaaaccggcagcctgaagctggccaacggaagagtgatcgagaagacactgtacaacagaagaacccggcaggatgagcctgccctgttcgtggccctgaccttcgagcggcgggaggtcctggactcctccaatatcaaaccaatgaacctgatcggcgtggcaagaggcgaaaacatccccgccgtgatcgccctgaccgaccccgagggctgcccactgagccggtttaaggatagcctgggaaacccaacccacatcctgagaatcggcgagagctataaggagaagcagcggaccatccaggccaagaaggaggtggagcagcggagagccggcggctacagccggaagtacgccagcaaagccaagaatctggcagacgatatggtgagaaacaccgctagagatctgctgtactacgccgtgacccaggatgccatgctgatcttcgccaacctgagccggggcttcggccggcagggcaagcggaccttcatggccgagagacagtacacacggatggaggactggctgaccgccaagctggcctacgagggcctgagcaagacctacctgtccaagacactggcccagtacacctccaagacatgcagcaactgtgggtttaccatcaccagcgccgactacgacagggtgctggagaagctgaagaagacagcaacaggctggatgaccacaattaacggcaaggagctgaaggtggagggccagattacctactacaacagatacaagagacagaacgtagtcaaggacctgtccgtcgagctggatagactgagcgaagaatctgtgaacaacgacatctcctcctggacaaagggcagaagcggagaagctctgagcctcctgaagaaaagattctcccatagacccgtgcaggagaagttcgtgtgcctgaactgcggcttcgagacacacgcagccgagcaagccgccctgaacatcgccagatcctggctgttcctgcggagccaggagtacaagaaataccagacaaacaagacaaccggcaacaccgataagagagccttcgtcgagacctggcagtccttttaccggaagaagcttaaggaggtgtggaaacctgccgtgcggtctggcggatctggcggaggctccacaagcttccaggtgcccgtgaccttcagggacgtggccgtgtacttctgcagggaggagtgggagtgcctgagccccagccagaggaccctgtacaggaacgtgatgctggagaacttcaggaacctgaacgagctgggctgctgcagcaggaggcccggcctgatcaccaggctggagcagtgggacgagccctgggtggacgactgggacaggagcgagttccccgacggccagaagagcttctgcaccagccccaagaaaaagagaaaagtctaagctgccttctgcggggcttgccttctggccatgcccttcttctctcccttgcacctgtacctcttggtctttgaataaagcctgagtaggaaggctagcaaaaaaaaaaaaaaaaaaaaaaaaaaaaaaaaaaaaaaaaaaaaaaaaaaaaaaaaaaaaaaaaaaaaaaaaaaaaaaaa

SEQ ID NO: 3294 - RNA, 5419 nt, synthetic construct
  source 1..5419: mol_type = other RNA
aggaaataagagagaaaagaagagtaagaagaaatataagagccaccatggcccctaagaagaagcgtaaagtgagccgggtgaacggcagcggcagcggcggcggcatgaaccacgaccaggagttcgacccccctaaggtgtaccctcccgtccccgccgagaagagaaagcccatccgggtcctgagcctgttcgatggcatcgccaccggtctgctggtgctgaaggacctgggcatccaggtggataggtacattgcctccgaggtgtgcgaggactccatcaccgtgggaatggtgcgtcatcagggcaagatcatgtacgtgggcgacgtgcggagcgtgacacagaagcatatccaggagtggggccctttcgacctggtgatcggcggcagcccttgcaatgacctgagcatcgtgaacccagcccggaagggcctgtacgagggaaccggcagactgttcttcgagttttacagactgctgcacgacgcccggcctaaggaaggcgacgaccggcccttcttttggctgttcgagaatgtggtggccatgggagtcagcgacaagcgggatattagccggttcctggagagcaaccccgtgatgatcgatgccaaggaagtgagcgccgcccaccgggccagatacttctggggcaatctgcctggcatgaacagacccctggccagcaccgtgaacgacaagctggagctgcaggagtgcctggagcacggccggatcgccaagttcagcaaggtgagaaccatcaccacccgaagcaacagcatcaaacaaggcaaggaccagcactttcctgtgttcatgaacgagaaggaggacatcctgtggtgtaccgagatggagagagtgttcgggttcccagtccactacacagatgtcagcaacatgtctagactggccagacagagactgctgggaagaagctggtccgtccctgtgatcagacacctgttcgcccctctgaaggagtacttcgcctgcgtgagcagcggcaacagcaacgccaacagccggggccccagcttctctagcggcctggtgccactgtccctgagagggagccacatgggccccatggagatctacaaaaccgtgagcgcctggaagcggcagcctgtgcgcgtgctgagcctgtttcggaatatcgataaagtcctgaaaagcctgggattcctggagagcggctctggctccggcggtggcaccctgaagtacgtggaggatgtgacaaacgtggtcagacgggatgtggagaagtggggccccttcgatctggtgtacggcagcacccaacccctgggcagctcttgtgaccggtgccctggctggtacatgtttcagttccaccggatcctgcagtacgccctgccgagacaggagtcccagcggccattcttttggattttcatggacaacttgctgctgaccgaggatgaccaggaaactaccactcggttcctgcagaccgaagccgtgaccctgcaggacgtgagaggccgggactaccagaacgccatgcgggtgtggtccaacatccctggactgaaaagcaagcacgcacctctgacccctaaagaagaggagtacctgcaggcccaggtgcggagcagaagcaagctggacgcccctaaggtggatctgctggtgaagaattgcctcctgcccctgagagagtacttcaagtatttcagccagaatagtctgcccctgggcggcccaagcagcggcgcccctcctcccagcggcggcagcccagccggctccccaacctctaccgaggagggcacctctgagtccgccacccccgagagcggccctggcacctccaccgagcccagcgagggcagcgcacccggcagccctgccggcagccccacctccacagaggagggaaccagcaccgagcccagcgaaggcagcgccccaggcaccagcaccgagcctagtgagggcggctctggcggcggcagcgcccaggagattaaacggatcaacaagatcagaagaagacttgtgaaagacagcaacaccaagaaggccggcaagacaggccccatgaaaaccctgctggttagagtgatgacacccgatctgagagagcggctggaaaacctgagaaagaagcctgaaaatatcccccagcccatcagcaatacatctagagccaacctgaataagctgctgaccgattacaccgaaatgaagaaggcgatcctgcatgtgtactgggaagagttccagaaggaccctgtgggcctgatgagccgggtggcccagcctgccagcaagaagatcgatcagaacaagctgaaacctgagatggacgagaagggcaacctgaccaccgccggctttgcctgctctcagtgtggccagcccctgttcgtgtacaagctggagcaggtgtctgagaagggcaaggcttacaccaactacttcggacggtgcaatgtggccgagcacgaaaagctgatcctgctggcccagctgaagcccgagaaggatagcgacgaagccgtgacatatagcctgggaaagtttgggcagagggccctggatttctacagcattcatgtgaccaaggagtccacccaccccgtgaagcccctggcccagatcgccggaaacagatacgcctccggacctgtgggaaaggccctgagcgacgcatgtatgggcacaatcgcctccttcctgtctaagtaccaggacatcatcatcgaacaccagaaggtggtgaagggcaaccagaagagactggagagcctgcgggagctggccggcaaggaaaacctggaataccctagcgtgaccctgccacctcagcctcacaccaaggagggcgttgatgcctacaacgaagtgatcgcccgggtgcgaatgtgggtgaacctgaacctgtggcagaagctgaagctaagcagagatgatgccaagcctctgctgagactgaagggattcccttcctttcctctggtcgagagacaggccaacgaagtggactggtgggacatggtgtgtaacgtgaagaagctgatcaacgagaaaaaggaggatggcaaggtgttttggcagaatctggctggctacaagagacaggaagccctgagaccatacctgagcagcgaggaagatcggaagaagggaaagaaattcgctcggtaccagctgggcgacctgctgctgcacctggaaaagaagcacggcgaggactggggaaaggtgtacgacgaggcctgggagcggattgacaagaaagtggaaggcctgagcaagcacatcaagctggaagaggaacggagaagcgaggacgcccagagcaaggccgccctgaccgactggctgcgggctaaggccagcttcgtgatcgagggcctgaaggaggccgacaaggacgagttctgcagatgcgagctgaagctgcagaagtggtacggggacctgcggggaaagcccttcgccatcgaagccgagaacagcatcctggacatcagcggcttcagcaagcagtacaactgtgccttcatctggcagaaggacggcgtgaagaagctgaacctgtacctgatcatcaactacttcaagggcggcaagctgcggttcaagaagatcaaacctgaagccttcgaagccaacagattctacaccgtgatcaacaaaaagagcggcgagatcgtgcccatggaggtgaacttcaacttcgacgaccccaacctgatcatcctgcctctggcctttggcaagagacagggcagagaattcatctggaacgacctgctgtccctggaaaccggcagcctgaagctggccaacggaagagtgatcgagaagacactgtacaacagaagaacccggcaggatgagcctgccctgttcgtggccctgaccttcgagcggcgggaggtcctggactcctccaatatcaaaccaatgaacctgatcggcgtggcaagaggcgaaaacatccccgccgtgatcgccctgaccgaccccgagggctgcccactgagccggtttaaggatagcctgggaaacccaacccacatcctgagaatcggcgagagctataaggagaagcagcggaccatccaggccaagaaggaggtggagcagcggagagccggcggctacagccggaagtacgccagcaaagccaagaatctggcagacgatatggtgagaaacaccgctagagatctgctgtactacgccgtgacccaggatgccatgctgatcttcgccaacctgagccggggcttcggccggcagggcaagcggaccttcatggccgagagacagtacacacggatggaggactggctgaccgccaagctggcctacgagggcctgagcaagacctacctgtccaagacactggcccagtacacctccaagacatgcagcaactgtgggtttaccatcaccagcgccgactacgacagggtgctggagaagctgaagaagacagcaacaggctggatgaccacaattaacggcaaggagctgaaggtggagggccagattacctactacaacagatacaagagacagaacgtagtcaaggacctgtccgtcgagctggatagactgagcgaagaatctgtgaacaacgacatctcctcctggacaaagggcagaagcggagaagctctgagcctcctgaagaaaagattctcccatagacccgtgcaggagaagttcgtgtgcctgaactgcggcttcgagacacacgcagccgagcaagccgccctgaacatcgccagatcctggctgttcctgcggagccaggagtacaagaaataccagacaaacaagacaaccggcaacaccgataagagagccttcgtcgagacctggcagtccttttaccggaagaagcttaaggaggtgtggaaacctgccgtgcggtctggcggatctggcggaggctccacaagcagcgtgaccttcgaggacgtggccgtgtacttcagctgggaggagtgggccctgctggacgaggcccagaggtgcctgtaccacgacgtgatgctggagaacttcgccctgaccagcagcctgggctgctggcacggcgccgaggacaagggcgcccccagcgagaagagcatcagcgtggagggcgtgagccagatcaagaccctgaaggccgacagctgcccccagaagggccagcccttcaccagccccaagaaaaagagaaaagtctaagctgccttctgcggggcttgccttctggccatgcccttcttctctcccttgcacctgtacctcttggtctttgaataaagcctgagtaggaaggctagcaaaaaaaaaaaaaaaaaaaaaaaaaaaaaaaaaaaaaaaaaaaaaaaaaaaaaaaaaaaaaaaaaaaaaaaaaaaaaaaa

SEQ ID NO: 3295 - RNA, 5419 nt, synthetic construct
  source 1..5419: mol_type = other RNA
aggaaataagagagaaaagaagagtaagaagaaatataagagccaccatggcccctaagaagaagcgtaaagtgagccgggtgaacggcagcggcagcggcggcggcatgaaccacgaccaggagttcgacccccctaaggtgtaccctcccgtccccgccgagaagagaaagcccatccgggtcctgagcctgttcgatggcatcgccaccggtctgctggtgctgaaggacctgggcatccaggtggataggtacattgcctccgaggtgtgcgaggactccatcaccgtgggaatggtgcgtcatcagggcaagatcatgtacgtgggcgacgtgcggagcgtgacacagaagcatatccaggagtggggccctttcgacctggtgatcggcggcagcccttgcaatgacctgagcatcgtgaacccagcccggaagggcctgtacgagggaaccggcagactgttcttcgagttttacagactgctgcacgacgcccggcctaaggaaggcgacgaccggcccttcttttggctgttcgagaatgtggtggccatgggagtcagcgacaagcgggatattagccggttcctggagagcaaccccgtgatgatcgatgccaaggaagtgagcgccgcccaccgggccagatacttctggggcaatctgcctggcatgaacagacccctggccagcaccgtgaacgacaagctggagctgcaggagtgcctggagcacggccggatcgccaagttcagcaaggtgagaaccatcaccacccgaagcaacagcatcaaacaaggcaaggaccagcactttcctgtgttcatgaacgagaaggaggacatcctgtggtgtaccgagatggagagagtgttcgggttcccagtccactacacagatgtcagcaacatgtctagactggccagacagagactgctgggaagaagctggtccgtccctgtgatcagacacctgttcgcccctctgaaggagtacttcgcctgcgtgagcagcggcaacagcaacgccaacagccggggccccagcttctctagcggcctggtgccactgtccctgagagggagccacatgggccccatggagatctacaaaaccgtgagcgcctggaagcggcagcctgtgcgcgtgctgagcctgtttcggaatatcgataaagtcctgaaaagcctgggattcctggagagcggctctggctccggcggtggcaccctgaagtacgtggaggatgtgacaaacgtggtcagacgggatgtggagaagtggggccccttcgatctggtgtacggcagcacccaacccctgggcagctcttgtgaccggtgccctggctggtacatgtttcagttccaccggatcctgcagtacgccctgccgagacaggagtcccagcggccattcttttggattttcatggacaacttgctgctgaccgaggatgaccaggaaactaccactcggttcctgcagaccgaagccgtgaccctgcaggacgtgagaggccgggactaccagaacgccatgcgggtgtggtccaacatccctggactgaaaagcaagcacgcacctctgacccctaaagaagaggagtacctgcaggcccaggtgcggagcagaagcaagctggacgcccctaaggtggatctgctggtgaagaattgcctcctgcccctgagagagtacttcaagtatttcagccagaatagtctgcccctgggcggcccaagcagcggcgcccctcctcccagcggcggcagcccagccggctccccaacctctaccgaggagggcacctctgagtccgccacccccgagagcggccctggcacctccaccgagcccagcgagggcagcgcacccggcagccctgccggcagccccacctccacagaggagggaaccagcaccgagcccagcgaaggcagcgccccaggcaccagcaccgagcctagtgagggcggctctggcggcggcagcgcccaggagattaaacggatcaacaagatcagaagaagacttgtgaaagacagcaacaccaagaaggccggcaagacaggccccatgaaaaccctgctggttagagtgatgacacccgatctgagagagcggctggaaaacctgagaaagaagcctgaaaatatcccccagcccatcagcaatacatctagagccaacctgaataagctgctgaccgattacaccgaaatgaagaaggcgatcctgcatgtgtactgggaagagttccagaaggaccctgtgggcctgatgagccgggtggcccagcctgccagcaagaagatcgatcagaacaagctgaaacctgagatggacgagaagggcaacctgaccaccgccggctttgcctgctctcagtgtggccagcccctgttcgtgtacaagctggagcaggtgtctgagaagggcaaggcttacaccaactacttcggacggtgcaatgtggccgagcacgaaaagctgatcctgctggcccagctgaagcccgagaaggatagcgacgaagccgtgacatatagcctgggaaagtttgggcagagggccctggatttctacagcattcatgtgaccaaggagtccacccaccccgtgaagcccctggcccagatcgccggaaacagatacgcctccggacctgtgggaaaggccctgagcgacgcatgtatgggcacaatcgcctccttcctgtctaagtaccaggacatcatcatcgaacaccagaaggtggtgaagggcaaccagaagagactggagagcctgcgggagctggccggcaaggaaaacctggaataccctagcgtgaccctgccacctcagcctcacaccaaggagggcgttgatgcctacaacgaagtgatcgcccgggtgcgaatgtgggtgaacctgaacctgtggcagaagctgaagctaagcagagatgatgccaagcctctgctgagactgaagggattcccttcctttcctctggtcgagagacaggccaacgaagtggactggtgggacatggtgtgtaacgtgaagaagctgatcaacgagaaaaaggaggatggcaaggtgttttggcagaatctggctggctacaagagacaggaagccctgagaccatacctgagcagcgaggaagatcggaagaagggaaagaaattcgctcggtaccagctgggcgacctgctgctgcacctggaaaagaagcacggcgaggactggggaaaggtgtacgacgaggcctgggagcggattgacaagaaagtggaaggcctgagcaagcacatcaagctggaagaggaacggagaagcgaggacgcccagagcaaggccgccctgaccgactggctgcgggctaaggccagcttcgtgatcgagggcctgaaggaggccgacaaggacgagttctgcagatgcgagctgaagctgcagaagtggtacggggacctgcggggaaagcccttcgccatcgaagccgagaacagcatcctggacatcagcggcttcagcaagcagtacaactgtgccttcatctggcagaaggacggcgtgaagaagctgaacctgtacctgatcatcaactacttcaagggcggcaagctgcggttcaagaagatcaaacctgaagccttcgaagccaacagattctacaccgtgatcaacaaaaagagcggcgagatcgtgcccatggaggtgaacttcaacttcgacgaccccaacctgatcatcctgcctctggcctttggcaagagacagggcagagaattcatctggaacgacctgctgtccctggaaaccggcagcctgaagctggccaacggaagagtgatcgagaagacactgtacaacagaagaacccggcaggatgagcctgccctgttcgtggccctgaccttcgagcggcgggaggtcctggactcctccaatatcaaaccaatgaacctgatcggcgtggcaagaggcgaaaacatccccgccgtgatcgccctgaccgaccccgagggctgcccactgagccggtttaaggatagcctgggaaacccaacccacatcctgagaatcggcgagagctataaggagaagcagcggaccatccaggccaagaaggaggtggagcagcggagagccggcggctacagccggaagtacgccagcaaagccaagaatctggcagacgatatggtgagaaacaccgctagagatctgctgtactacgccgtgacccaggatgccatgctgatcttcgccaacctgagccggggcttcggccggcagggcaagcggaccttcatggccgagagacagtacacacggatggaggactggctgaccgccaagctggcctacgagggcctgagcaagacctacctgtccaagacactggcccagtacacctccaagacatgcagcaactgtgggtttaccatcaccagcgccgactacgacagggtgctggagaagctgaagaagacagcaacaggctggatgaccacaattaacggcaaggagctgaaggtggagggccagattacctactacaacagatacaagagacagaacgtagtcaaggacctgtccgtcgagctggatagactgagcgaagaatctgtgaacaacgacatctcctcctggacaaagggcagaagcggagaagctctgagcctcctgaagaaaagattctcccatagacccgtgcaggagaagttcgtgtgcctgaactgcggcttcgagacacacgcagccgagcaagccgccctgaacatcgccagatcctggctgttcctgcggagccaggagtacaagaaataccagacaaacaagacaaccggcaacaccgataagagagccttcgtcgagacctggcagtccttttaccggaagaagcttaaggaggtgtggaaacctgccgtgcggtctggcggatctggcggaggctccacaagcatggcccacctgatgatgttcagggacgtggccgtggacttcagccaggaggagtgggagtgcctggacctggagcagagggacctgtacagggacgtgatgctggagaactacagcaacatggtgagcctgggcctgtgcatctaccagcccgaggccttcagcctgctggagaagggcaaggacccctggaagatcctgagggacgagaccaggaggccctgccccgacatgcagagcaggaccagccccaagaaaaagagaaaagtctaagctgccttctgcggggcttgccttctggccatgcccttcttctctcccttgcacctgtacctcttggtctttgaataaagcctgagtaggaaggctagcaaaaaaaaaaaaaaaaaaaaaaaaaaaaaaaaaaaaaaaaaaaaaaaaaaaaaaaaaaaaaaaaaaaaaaaaaaaaaaaa

SEQ ID NO: 3296 - RNA, 5419 nt, synthetic construct
  source 1..5419: mol_type = other RNA
aggaaataagagagaaaagaagagtaagaagaaatataagagccaccatggcccctaagaagaagcgtaaagtgagccgggtgaacggcagcggcagcggcggcggcatgaaccacgaccaggagttcgacccccctaaggtgtaccctcccgtccccgccgagaagagaaagcccatccgggtcctgagcctgttcgatggcatcgccaccggtctgctggtgctgaaggacctgggcatccaggtggataggtacattgcctccgaggtgtgcgaggactccatcaccgtgggaatggtgcgtcatcagggcaagatcatgtacgtgggcgacgtgcggagcgtgacacagaagcatatccaggagtggggccctttcgacctggtgatcggcggcagcccttgcaatgacctgagcatcgtgaacccagcccggaagggcctgtacgagggaaccggcagactgttcttcgagttttacagactgctgcacgacgcccggcctaaggaaggcgacgaccggcccttcttttggctgttcgagaatgtggtggccatgggagtcagcgacaagcgggatattagccggttcctggagagcaaccccgtgatgatcgatgccaaggaagtgagcgccgcccaccgggccagatacttctggggcaatctgcctggcatgaacagacccctggccagcaccgtgaacgacaagctggagctgcaggagtgcctggagcacggccggatcgccaagttcagcaaggtgagaaccatcaccacccgaagcaacagcatcaaacaaggcaaggaccagcactttcctgtgttcatgaacgagaaggaggacatcctgtggtgtaccgagatggagagagtgttcgggttcccagtccactacacagatgtcagcaacatgtctagactggccagacagagactgctgggaagaagctggtccgtccctgtgatcagacacctgttcgcccctctgaaggagtacttcgcctgcgtgagcagcggcaacagcaacgccaacagccggggccccagcttctctagcggcctggtgccactgtccctgagagggagccacatgggccccatggagatctacaaaaccgtgagcgcctggaagcggcagcctgtgcgcgtgctgagcctgtttcggaatatcgataaagtcctgaaaagcctgggattcctggagagcggctctggctccggcggtggcaccctgaagtacgtggaggatgtgacaaacgtggtcagacgggatgtggagaagtggggccccttcgatctggtgtacggcagcacccaacccctgggcagctcttgtgaccggtgccctggctggtacatgtttcagttccaccggatcctgcagtacgccctgccgagacaggagtcccagcggccattcttttggattttcatggacaacttgctgctgaccgaggatgaccaggaaactaccactcggttcctgcagaccgaagccgtgaccctgcaggacgtgagaggccgggactaccagaacgccatgcgggtgtggtccaacatccctggactgaaaagcaagcacgcacctctgacccctaaagaagaggagtacctgcaggcccaggtgcggagcagaagcaagctggacgcccctaaggtggatctgctggtgaagaattgcctcctgcccctgagagagtacttcaagtatttcagccagaatagtctgcccctgggcggcccaagcagcggcgcccctcctcccagcggcggcagcccagccggctccccaacctctaccgaggagggcacctctgagtccgccacccccgagagcggccctggcacctccaccgagcccagcgagggcagcgcacccggcagccctgccggcagccccacctccacagaggagggaaccagcaccgagcccagcgaaggcagcgccccaggcaccagcaccgagcctagtgagggcggctctggcggcggcagcgcccaggagattaaacggatcaacaagatcagaagaagacttgtgaaagacagcaacaccaagaaggccggcaagacaggccccatgaaaaccctgctggttagagtgatgacacccgatctgagagagcggctggaaaacctgagaaagaagcctgaaaatatcccccagcccatcagcaatacatctagagccaacctgaataagctgctgaccgattacaccgaaatgaagaaggcgatcctgcatgtgtactgggaagagttccagaaggaccctgtgggcctgatgagccgggtggcccagcctgccagcaagaagatcgatcagaacaagctgaaacctgagatggacgagaagggcaacctgaccaccgccggctttgcctgctctcagtgtggccagcccctgttcgtgtacaagctggagcaggtgtctgagaagggcaaggcttacaccaactacttcggacggtgcaatgtggccgagcacgaaaagctgatcctgctggcccagctgaagcccgagaaggatagcgacgaagccgtgacatatagcctgggaaagtttgggcagagggccctggatttctacagcattcatgtgaccaaggagtccacccaccccgtgaagcccctggcccagatcgccggaaacagatacgcctccggacctgtgggaaaggccctgagcgacgcatgtatgggcacaatcgcctccttcctgtctaagtaccaggacatcatcatcgaacaccagaaggtggtgaagggcaaccagaagagactggagagcctgcgggagctggccggcaaggaaaacctggaataccctagcgtgaccctgccacctcagcctcacaccaaggagggcgttgatgcctacaacgaagtgatcgcccgggtgcgaatgtgggtgaacctgaacctgtggcagaagctgaagctaagcagagatgatgccaagcctctgctgagactgaagggattcccttcctttcctctggtcgagagacaggccaacgaagtggactggtgggacatggtgtgtaacgtgaagaagctgatcaacgagaaaaaggaggatggcaaggtgttttggcagaatctggctggctacaagagacaggaagccctgagaccatacctgagcagcgaggaagatcggaagaagggaaagaaattcgctcggtaccagctgggcgacctgctgctgcacctggaaaagaagcacggcgaggactggggaaaggtgtacgacgaggcctgggagcggattgacaagaaagtggaaggcctgagcaagcacatcaagctggaagaggaacggagaagcgaggacgcccagagcaaggccgccctgaccgactggctgcgggctaaggccagcttcgtgatcgagggcctgaaggaggccgacaaggacgagttctgcagatgcgagctgaagctgcagaagtggtacggggacctgcggggaaagcccttcgccatcgaagccgagaacagcatcctggacatcagcggcttcagcaagcagtacaactgtgccttcatctggcagaaggacggcgtgaagaagctgaacctgtacctgatcatcaactacttcaagggcggcaagctgcggttcaagaagatcaaacctgaagccttcgaagccaacagattctacaccgtgatcaacaaaaagagcggcgagatcgtgcccatggaggtgaacttcaacttcgacgaccccaacctgatcatcctgcctctggcctttggcaagagacagggcagagaattcatctggaacgacctgctgtccctggaaaccggcagcctgaagctggccaacggaagagtgatcgagaagacactgtacaacagaagaacccggcaggatgagcctgccctgttcgtggccctgaccttcgagcggcgggaggtcctggactcctccaatatcaaaccaatgaacctgatcggcgtggcaagaggcgaaaacatccccgccgtgatcgccctgaccgaccccgagggctgcccactgagccggtttaaggatagcctgggaaacccaacccacatcctgagaatcggcgagagctataaggagaagcagcggaccatccaggccaagaaggaggtggagcagcggagagccggcggctacagccggaagtacgccagcaaagccaagaatctggcagacgatatggtgagaaacaccgctagagatctgctgtactacgccgtgacccaggatgccatgctgatcttcgccaacctgagccggggcttcggccggcagggcaagcggaccttcatggccgagagacagtacacacggatggaggactggctgaccgccaagctggcctacgagggcctgagcaagacctacctgtccaagacactggcccagtacacctccaagacatgcagcaactgtgggtttaccatcaccagcgccgactacgacagggtgctggagaagctgaagaagacagcaacaggctggatgaccacaattaacggcaaggagctgaaggtggagggccagattacctactacaacagatacaagagacagaacgtagtcaaggacctgtccgtcgagctggatagactgagcgaagaatctgtgaacaacgacatctcctcctggacaaagggcagaagcggagaagctctgagcctcctgaagaaaagattctcccatagacccgtgcaggagaagttcgtgtgcctgaactgcggcttcgagacacacgcagccgagcaagccgccctgaacatcgccagatcctggctgttcctgcggagccaggagtacaagaaataccagacaaacaagacaaccggcaacaccgataagagagccttcgtcgagacctggcagtccttttaccggaagaagcttaaggaggtgtggaaacctgccgtgcggtctggcggatctggcggaggctccacaagcaggcccagggccgtgaagttcgccgacgtggccgtgtacttcagcaccgaggagtggggctgcctgaggcccgcccagagggccctgtacagggacgtgatgcaggagacctacggccacctgggcgccctgggctgcgccggccccaagcccgccctgatcagctggctggagaggaacaccgacgactgggagcccgccgccctggacccccaggagtgccccaggggcgtggccgtgcagaccagccccaagaaaaagagaaaagtctaagctgccttctgcggggcttgccttctggccatgcccttcttctctcccttgcacctgtacctcttggtctttgaataaagcctgagtaggaaggctagcaaaaaaaaaaaaaaaaaaaaaaaaaaaaaaaaaaaaaaaaaaaaaaaaaaaaaaaaaaaaaaaaaaaaaaaaaaaaaaaa

SEQ ID NO: 3297 - RNA, 5419 nt, synthetic construct
  source 1..5419: mol_type = other RNA
aggaaataagagagaaaagaagagtaagaagaaatataagagccaccatggcccctaagaagaagcgtaaagtgagccgggtgaacggcagcggcagcggcggcggcatgaaccacgaccaggagttcgacccccctaaggtgtaccctcccgtccccgccgagaagagaaagcccatccgggtcctgagcctgttcgatggcatcgccaccggtctgctggtgctgaaggacctgggcatccaggtggataggtacattgcctccgaggtgtgcgaggactccatcaccgtgggaatggtgcgtcatcagggcaagatcatgtacgtgggcgacgtgcggagcgtgacacagaagcatatccaggagtggggccctttcgacctggtgatcggcggcagcccttgcaatgacctgagcatcgtgaacccagcccggaagggcctgtacgagggaaccggcagactgttcttcgagttttacagactgctgcacgacgcccggcctaaggaaggcgacgaccggcccttcttttggctgttcgagaatgtggtggccatgggagtcagcgacaagcgggatattagccggttcctggagagcaaccccgtgatgatcgatgccaaggaagtgagcgccgcccaccgggccagatacttctggggcaatctgcctggcatgaacagacccctggccagcaccgtgaacgacaagctggagctgcaggagtgcctggagcacggccggatcgccaagttcagcaaggtgagaaccatcaccacccgaagcaacagcatcaaacaaggcaaggaccagcactttcctgtgttcatgaacgagaaggaggacatcctgtggtgtaccgagatggagagagtgttcgggttcccagtccactacacagatgtcagcaacatgtctagactggccagacagagactgctgggaagaagctggtccgtccctgtgatcagacacctgttcgcccctctgaaggagtacttcgcctgcgtgagcagcggcaacagcaacgccaacagccggggccccagcttctctagcggcctggtgccactgtccctgagagggagccacatgggccccatggagatctacaaaaccgtgagcgcctggaagcggcagcctgtgcgcgtgctgagcctgtttcggaatatcgataaagtcctgaaaagcctgggattcctggagagcggctctggctccggcggtggcaccctgaagtacgtggaggatgtgacaaacgtggtcagacgggatgtggagaagtggggccccttcgatctggtgtacggcagcacccaacccctgggcagctcttgtgaccggtgccctggctggtacatgtttcagttccaccggatcctgcagtacgccctgccgagacaggagtcccagcggccattcttttggattttcatggacaacttgctgctgaccgaggatgaccaggaaactaccactcggttcctgcagaccgaagccgtgaccctgcaggacgtgagaggccgggactaccagaacgccatgcgggtgtggtccaacatccctggactgaaaagcaagcacgcacctctgacccctaaagaagaggagtacctgcaggcccaggtgcggagcagaagcaagctggacgcccctaaggtggatctgctggtgaagaattgcctcctgcccctgagagagtacttcaagtatttcagccagaatagtctgcccctgggcggcccaagcagcggcgcccctcctcccagcggcggcagcccagccggctccccaacctctaccgaggagggcacctctgagtccgccacccccgagagcggccctggcacctccaccgagcccagcgagggcagcgcacccggcagccctgccggcagccccacctccacagaggagggaaccagcaccgagcccagcgaaggcagcgccccaggcaccagcaccgagcctagtgagggcggctctggcggcggcagcgcccaggagattaaacggatcaacaagatcagaagaagacttgtgaaagacagcaacaccaagaaggccggcaagacaggccccatgaaaaccctgctggttagagtgatgacacccgatctgagagagcggctggaaaacctgagaaagaagcctgaaaatatcccccagcccatcagcaatacatctagagccaacctgaataagctgctgaccgattacaccgaaatgaagaaggcgatcctgcatgtgtactgggaagagttccagaaggaccctgtgggcctgatgagccgggtggcccagcctgccagcaagaagatcgatcagaacaagctgaaacctgagatggacgagaagggcaacctgaccaccgccggctttgcctgctctcagtgtggccagcccctgttcgtgtacaagctggagcaggtgtctgagaagggcaaggcttacaccaactacttcggacggtgcaatgtggccgagcacgaaaagctgatcctgctggcccagctgaagcccgagaaggatagcgacgaagccgtgacatatagcctgggaaagtttgggcagagggccctggatttctacagcattcatgtgaccaaggagtccacccaccccgtgaagcccctggcccagatcgccggaaacagatacgcctccggacctgtgggaaaggccctgagcgacgcatgtatgggcacaatcgcctccttcctgtctaagtaccaggacatcatcatcgaacaccagaaggtggtgaagggcaaccagaagagactggagagcctgcgggagctggccggcaaggaaaacctggaataccctagcgtgaccctgccacctcagcctcacaccaaggagggcgttgatgcctacaacgaagtgatcgcccgggtgcgaatgtgggtgaacctgaacctgtggcagaagctgaagctaagcagagatgatgccaagcctctgctgagactgaagggattcccttcctttcctctggtcgagagacaggccaacgaagtggactggtgggacatggtgtgtaacgtgaagaagctgatcaacgagaaaaaggaggatggcaaggtgttttggcagaatctggctggctacaagagacaggaagccctgagaccatacctgagcagcgaggaagatcggaagaagggaaagaaattcgctcggtaccagctgggcgacctgctgctgcacctggaaaagaagcacggcgaggactggggaaaggtgtacgacgaggcctgggagcggattgacaagaaagtggaaggcctgagcaagcacatcaagctggaagaggaacggagaagcgaggacgcccagagcaaggccgccctgaccgactggctgcgggctaaggccagcttcgtgatcgagggcctgaaggaggccgacaaggacgagttctgcagatgcgagctgaagctgcagaagtggtacggggacctgcggggaaagcccttcgccatcgaagccgagaacagcatcctggacatcagcggcttcagcaagcagtacaactgtgccttcatctggcagaaggacggcgtgaagaagctgaacctgtacctgatcatcaactacttcaagggcggcaagctgcggttcaagaagatcaaacctgaagccttcgaagccaacagattctacaccgtgatcaacaaaaagagcggcgagatcgtgcccatggaggtgaacttcaacttcgacgaccccaacctgatcatcctgcctctggcctttggcaagagacagggcagagaattcatctggaacgacctgctgtccctggaaaccggcagcctgaagctggccaacggaagagtgatcgagaagacactgtacaacagaagaacccggcaggatgagcctgccctgttcgtggccctgaccttcgagcggcgggaggtcctggactcctccaatatcaaaccaatgaacctgatcggcgtggcaagaggcgaaaacatccccgccgtgatcgccctgaccgaccccgagggctgcccactgagccggtttaaggatagcctgggaaacccaacccacatcctgagaatcggcgagagctataaggagaagcagcggaccatccaggccaagaaggaggtggagcagcggagagccggcggctacagccggaagtacgccagcaaagccaagaatctggcagacgatatggtgagaaacaccgctagagatctgctgtactacgccgtgacccaggatgccatgctgatcttcgccaacctgagccggggcttcggccggcagggcaagcggaccttcatggccgagagacagtacacacggatggaggactggctgaccgccaagctggcctacgagggcctgagcaagacctacctgtccaagacactggcccagtacacctccaagacatgcagcaactgtgggtttaccatcaccagcgccgactacgacagggtgctggagaagctgaagaagacagcaacaggctggatgaccacaattaacggcaaggagctgaaggtggagggccagattacctactacaacagatacaagagacagaacgtagtcaaggacctgtccgtcgagctggatagactgagcgaagaatctgtgaacaacgacatctcctcctggacaaagggcagaagcggagaagctctgagcctcctgaagaaaagattctcccatagacccgtgcaggagaagttcgtgtgcctgaactgcggcttcgagacacacgcagccgagcaagccgccctgaacatcgccagatcctggctgttcctgcggagccaggagtacaagaaataccagacaaacaagacaaccggcaacaccgataagagagccttcgtcgagacctggcagtccttttaccggaagaagcttaaggaggtgtggaaacctgccgtgcggtctggcggatctggcggaggctccacaagcaggcccgagagcgtgaccttcgaggacgtggccatctacttcagcgagaacgagtggaccggcctggcccccgcccagagggccctgtacagggacgtgatgctggagaactacggcgccctggccagcctggccgccttccccttccccaagcccgccctgatcttccagctggagcagggcgaggccccctggagcagcgccccccagggcgccctggacggcgagggccccaggggcatcaccagccccaagaaaaagagaaaagtctaagctgccttctgcggggcttgccttctggccatgcccttcttctctcccttgcacctgtacctcttggtctttgaataaagcctgagtaggaaggctagcaaaaaaaaaaaaaaaaaaaaaaaaaaaaaaaaaaaaaaaaaaaaaaaaaaaaaaaaaaaaaaaaaaaaaaaaaaaaaaaa

SEQ ID NO: 3298 - RNA, 5419 nt, synthetic construct
  source 1..5419: mol_type = other RNA
aggaaataagagagaaaagaagagtaagaagaaatataagagccaccatggcccctaagaagaagcgtaaagtgagccgggtgaacggcagcggcagcggcggcggcatgaaccacgaccaggagttcgacccccctaaggtgtaccctcccgtccccgccgagaagagaaagcccatccgggtcctgagcctgttcgatggcatcgccaccggtctgctggtgctgaaggacctgggcatccaggtggataggtacattgcctccgaggtgtgcgaggactccatcaccgtgggaatggtgcgtcatcagggcaagatcatgtacgtgggcgacgtgcggagcgtgacacagaagcatatccaggagtggggccctttcgacctggtgatcggcggcagcccttgcaatgacctgagcatcgtgaacccagcccggaagggcctgtacgagggaaccggcagactgttcttcgagttttacagactgctgcacgacgcccggcctaaggaaggcgacgaccggcccttcttttggctgttcgagaatgtggtggccatgggagtcagcgacaagcgggatattagccggttcctggagagcaaccccgtgatgatcgatgccaaggaagtgagcgccgcccaccgggccagatacttctggggcaatctgcctggcatgaacagacccctggccagcaccgtgaacgacaagctggagctgcaggagtgcctggagcacggccggatcgccaagttcagcaaggtgagaaccatcaccacccgaagcaacagcatcaaacaaggcaaggaccagcactttcctgtgttcatgaacgagaaggaggacatcctgtggtgtaccgagatggagagagtgttcgggttcccagtccactacacagatgtcagcaacatgtctagactggccagacagagactgctgggaagaagctggtccgtccctgtgatcagacacctgttcgcccctctgaaggagtacttcgcctgcgtgagcagcggcaacagcaacgccaacagccggggccccagcttctctagcggcctggtgccactgtccctgagagggagccacatgggccccatggagatctacaaaaccgtgagcgcctggaagcggcagcctgtgcgcgtgctgagcctgtttcggaatatcgataaagtcctgaaaagcctgggattcctggagagcggctctggctccggcggtggcaccctgaagtacgtggaggatgtgacaaacgtggtcagacgggatgtggagaagtggggccccttcgatctggtgtacggcagcacccaacccctgggcagctcttgtgaccggtgccctggctggtacatgtttcagttccaccggatcctgcagtacgccctgccgagacaggagtcccagcggccattcttttggattttcatggacaacttgctgctgaccgaggatgaccaggaaactaccactcggttcctgcagaccgaagccgtgaccctgcaggacgtgagaggccgggactaccagaacgccatgcgggtgtggtccaacatccctggactgaaaagcaagcacgcacctctgacccctaaagaagaggagtacctgcaggcccaggtgcggagcagaagcaagctggacgcccctaaggtggatctgctggtgaagaattgcctcctgcccctgagagagtacttcaagtatttcagccagaatagtctgcccctgggcggcccaagcagcggcgcccctcctcccagcggcggcagcccagccggctccccaacctctaccgaggagggcacctctgagtccgccacccccgagagcggccctggcacctccaccgagcccagcgagggcagcgcacccggcagccctgccggcagccccacctccacagaggagggaaccagcaccgagcccagcgaaggcagcgccccaggcaccagcaccgagcctagtgagggcggctctggcggcggcagcgcccaggagattaaacggatcaacaagatcagaagaagacttgtgaaagacagcaacaccaagaaggccggcaagacaggccccatgaaaaccctgctggttagagtgatgacacccgatctgagagagcggctggaaaacctgagaaagaagcctgaaaatatcccccagcccatcagcaatacatctagagccaacctgaataagctgctgaccgattacaccgaaatgaagaaggcgatcctgcatgtgtactgggaagagttccagaaggaccctgtgggcctgatgagccgggtggcccagcctgccagcaagaagatcgatcagaacaagctgaaacctgagatggacgagaagggcaacctgaccaccgccggctttgcctgctctcagtgtggccagcccctgttcgtgtacaagctggagcaggtgtctgagaagggcaaggcttacaccaactacttcggacggtgcaatgtggccgagcacgaaaagctgatcctgctggcccagctgaagcccgagaaggatagcgacgaagccgtgacatatagcctgggaaagtttgggcagagggccctggatttctacagcattcatgtgaccaaggagtccacccaccccgtgaagcccctggcccagatcgccggaaacagatacgcctccggacctgtgggaaaggccctgagcgacgcatgtatgggcacaatcgcctccttcctgtctaagtaccaggacatcatcatcgaacaccagaaggtggtgaagggcaaccagaagagactggagagcctgcgggagctggccggcaaggaaaacctggaataccctagcgtgaccctgccacctcagcctcacaccaaggagggcgttgatgcctacaacgaagtgatcgcccgggtgcgaatgtgggtgaacctgaacctgtggcagaagctgaagctaagcagagatgatgccaagcctctgctgagactgaagggattcccttcctttcctctggtcgagagacaggccaacgaagtggactggtgggacatggtgtgtaacgtgaagaagctgatcaacgagaaaaaggaggatggcaaggtgttttggcagaatctggctggctacaagagacaggaagccctgagaccatacctgagcagcgaggaagatcggaagaagggaaagaaattcgctcggtaccagctgggcgacctgctgctgcacctggaaaagaagcacggcgaggactggggaaaggtgtacgacgaggcctgggagcggattgacaagaaagtggaaggcctgagcaagcacatcaagctggaagaggaacggagaagcgaggacgcccagagcaaggccgccctgaccgactggctgcgggctaaggccagcttcgtgatcgagggcctgaaggaggccgacaaggacgagttctgcagatgcgagctgaagctgcagaagtggtacggggacctgcggggaaagcccttcgccatcgaagccgagaacagcatcctggacatcagcggcttcagcaagcagtacaactgtgccttcatctggcagaaggacggcgtgaagaagctgaacctgtacctgatcatcaactacttcaagggcggcaagctgcggttcaagaagatcaaacctgaagccttcgaagccaacagattctacaccgtgatcaacaaaaagagcggcgagatcgtgcccatggaggtgaacttcaacttcgacgaccccaacctgatcatcctgcctctggcctttggcaagagacagggcagagaattcatctggaacgacctgctgtccctggaaaccggcagcctgaagctggccaacggaagagtgatcgagaagacactgtacaacagaagaacccggcaggatgagcctgccctgttcgtggccctgaccttcgagcggcgggaggtcctggactcctccaatatcaaaccaatgaacctgatcggcgtggcaagaggcgaaaacatccccgccgtgatcgccctgaccgaccccgagggctgcccactgagccggtttaaggatagcctgggaaacccaacccacatcctgagaatcggcgagagctataaggagaagcagcggaccatccaggccaagaaggaggtggagcagcggagagccggcggctacagccggaagtacgccagcaaagccaagaatctggcagacgatatggtgagaaacaccgctagagatctgctgtactacgccgtgacccaggatgccatgctgatcttcgccaacctgagccggggcttcggccggcagggcaagcggaccttcatggccgagagacagtacacacggatggaggactggctgaccgccaagctggcctacgagggcctgagcaagacctacctgtccaagacactggcccagtacacctccaagacatgcagcaactgtgggtttaccatcaccagcgccgactacgacagggtgctggagaagctgaagaagacagcaacaggctggatgaccacaattaacggcaaggagctgaaggtggagggccagattacctactacaacagatacaagagacagaacgtagtcaaggacctgtccgtcgagctggatagactgagcgaagaatctgtgaacaacgacatctcctcctggacaaagggcagaagcggagaagctctgagcctcctgaagaaaagattctcccatagacccgtgcaggagaagttcgtgtgcctgaactgcggcttcgagacacacgcagccgagcaagccgccctgaacatcgccagatcctggctgttcctgcggagccaggagtacaagaaataccagacaaacaagacaaccggcaacaccgataagagagccttcgtcgagacctggcagtccttttaccggaagaagcttaaggaggtgtggaaacctgccgtgcggtctggcggatctggcggaggctccacaagcccccagggccacctgaccttcatggacgtggccatcgagttcagccaggaggagtggaagtgcctggaccccggccagagggccctgtacagggacgtgatgctggagaactacaggaacctggtgagcctgggcatctgcctgcccgacctgagcatcatcagcatgctgaagcagaggagggagcccctgaccctgcagagcgaggtgaagatcgtgaagaaccccgacggcagggagtgcaccagccccaagaaaaagagaaaagtctaagctgccttctgcggggcttgccttctggccatgcccttcttctctcccttgcacctgtacctcttggtctttgaataaagcctgagtaggaaggctagcaaaaaaaaaaaaaaaaaaaaaaaaaaaaaaaaaaaaaaaaaaaaaaaaaaaaaaaaaaaaaaaaaaaaaaaaaaaaaaaa

SEQ ID NO: 3299 - RNA, 5419 nt, synthetic construct
  source 1..5419: mol_type = other RNA
aggaaataagagagaaaagaagagtaagaagaaatataagagccaccatggcccctaagaagaagcgtaaagtgagccgggtgaacggcagcggcagcggcggcggcatgaaccacgaccaggagttcgacccccctaaggtgtaccctcccgtccccgccgagaagagaaagcccatccgggtcctgagcctgttcgatggcatcgccaccggtctgctggtgctgaaggacctgggcatccaggtggataggtacattgcctccgaggtgtgcgaggactccatcaccgtgggaatggtgcgtcatcagggcaagatcatgtacgtgggcgacgtgcggagcgtgacacagaagcatatccaggagtggggccctttcgacctggtgatcggcggcagcccttgcaatgacctgagcatcgtgaacccagcccggaagggcctgtacgagggaaccggcagactgttcttcgagttttacagactgctgcacgacgcccggcctaaggaaggcgacgaccggcccttcttttggctgttcgagaatgtggtggccatgggagtcagcgacaagcgggatattagccggttcctggagagcaaccccgtgatgatcgatgccaaggaagtgagcgccgcccaccgggccagatacttctggggcaatctgcctggcatgaacagacccctggccagcaccgtgaacgacaagctggagctgcaggagtgcctggagcacggccggatcgccaagttcagcaaggtgagaaccatcaccacccgaagcaacagcatcaaacaaggcaaggaccagcactttcctgtgttcatgaacgagaaggaggacatcctgtggtgtaccgagatggagagagtgttcgggttcccagtccactacacagatgtcagcaacatgtctagactggccagacagagactgctgggaagaagctggtccgtccctgtgatcagacacctgttcgcccctctgaaggagtacttcgcctgcgtgagcagcggcaacagcaacgccaacagccggggccccagcttctctagcggcctggtgccactgtccctgagagggagccacatgggccccatggagatctacaaaaccgtgagcgcctggaagcggcagcctgtgcgcgtgctgagcctgtttcggaatatcgataaagtcctgaaaagcctgggattcctggagagcggctctggctccggcggtggcaccctgaagtacgtggaggatgtgacaaacgtggtcagacgggatgtggagaagtggggccccttcgatctggtgtacggcagcacccaacccctgggcagctcttgtgaccggtgccctggctggtacatgtttcagttccaccggatcctgcagtacgccctgccgagacaggagtcccagcggccattcttttggattttcatggacaacttgctgctgaccgaggatgaccaggaaactaccactcggttcctgcagaccgaagccgtgaccctgcaggacgtgagaggccgggactaccagaacgccatgcgggtgtggtccaacatccctggactgaaaagcaagcacgcacctctgacccctaaagaagaggagtacctgcaggcccaggtgcggagcagaagcaagctggacgcccctaaggtggatctgctggtgaagaattgcctcctgcccctgagagagtacttcaagtatttcagccagaatagtctgcccctgggcggcccaagcagcggcgcccctcctcccagcggcggcagcccagccggctccccaacctctaccgaggagggcacctctgagtccgccacccccgagagcggccctggcacctccaccgagcccagcgagggcagcgcacccggcagccctgccggcagccccacctccacagaggagggaaccagcaccgagcccagcgaaggcagcgccccaggcaccagcaccgagcctagtgagggcggctctggcggcggcagcgcccaggagattaaacggatcaacaagatcagaagaagacttgtgaaagacagcaacaccaagaaggccggcaagacaggccccatgaaaaccctgctggttagagtgatgacacccgatctgagagagcggctggaaaacctgagaaagaagcctgaaaatatcccccagcccatcagcaatacatctagagccaacctgaataagctgctgaccgattacaccgaaatgaagaaggcgatcctgcatgtgtactgggaagagttccagaaggaccctgtgggcctgatgagccgggtggcccagcctgccagcaagaagatcgatcagaacaagctgaaacctgagatggacgagaagggcaacctgaccaccgccggctttgcctgctctcagtgtggccagcccctgttcgtgtacaagctggagcaggtgtctgagaagggcaaggcttacaccaactacttcggacggtgcaatgtggccgagcacgaaaagctgatcctgctggcccagctgaagcccgagaaggatagcgacgaagccgtgacatatagcctgggaaagtttgggcagagggccctggatttctacagcattcatgtgaccaaggagtccacccaccccgtgaagcccctggcccagatcgccggaaacagatacgcctccggacctgtgggaaaggccctgagcgacgcatgtatgggcacaatcgcctccttcctgtctaagtaccaggacatcatcatcgaacaccagaaggtggtgaagggcaaccagaagagactggagagcctgcgggagctggccggcaaggaaaacctggaataccctagcgtgaccctgccacctcagcctcacaccaaggagggcgttgatgcctacaacgaagtgatcgcccgggtgcgaatgtgggtgaacctgaacctgtggcagaagctgaagctaagcagagatgatgccaagcctctgctgagactgaagggattcccttcctttcctctggtcgagagacaggccaacgaagtggactggtgggacatggtgtgtaacgtgaagaagctgatcaacgagaaaaaggaggatggcaaggtgttttggcagaatctggctggctacaagagacaggaagccctgagaccatacctgagcagcgaggaagatcggaagaagggaaagaaattcgctcggtaccagctgggcgacctgctgctgcacctggaaaagaagcacggcgaggactggggaaaggtgtacgacgaggcctgggagcggattgacaagaaagtggaaggcctgagcaagcacatcaagctggaagaggaacggagaagcgaggacgcccagagcaaggccgccctgaccgactggctgcgggctaaggccagcttcgtgatcgagggcctgaaggaggccgacaaggacgagttctgcagatgcgagctgaagctgcagaagtggtacggggacctgcggggaaagcccttcgccatcgaagccgagaacagcatcctggacatcagcggcttcagcaagcagtacaactgtgccttcatctggcagaaggacggcgtgaagaagctgaacctgtacctgatcatcaactacttcaagggcggcaagctgcggttcaagaagatcaaacctgaagccttcgaagccaacagattctacaccgtgatcaacaaaaagagcggcgagatcgtgcccatggaggtgaacttcaacttcgacgaccccaacctgatcatcctgcctctggcctttggcaagagacagggcagagaattcatctggaacgacctgctgtccctggaaaccggcagcctgaagctggccaacggaagagtgatcgagaagacactgtacaacagaagaacccggcaggatgagcctgccctgttcgtggccctgaccttcgagcggcgggaggtcctggactcctccaatatcaaaccaatgaacctgatcggcgtggcaagaggcgaaaacatccccgccgtgatcgccctgaccgaccccgagggctgcccactgagccggtttaaggatagcctgggaaacccaacccacatcctgagaatcggcgagagctataaggagaagcagcggaccatccaggccaagaaggaggtggagcagcggagagccggcggctacagccggaagtacgccagcaaagccaagaatctggcagacgatatggtgagaaacaccgctagagatctgctgtactacgccgtgacccaggatgccatgctgatcttcgccaacctgagccggggcttcggccggcagggcaagcggaccttcatggccgagagacagtacacacggatggaggactggctgaccgccaagctggcctacgagggcctgagcaagacctacctgtccaagacactggcccagtacacctccaagacatgcagcaactgtgggtttaccatcaccagcgccgactacgacagggtgctggagaagctgaagaagacagcaacaggctggatgaccacaattaacggcaaggagctgaaggtggagggccagattacctactacaacagatacaagagacagaacgtagtcaaggacctgtccgtcgagctggatagactgagcgaagaatctgtgaacaacgacatctcctcctggacaaagggcagaagcggagaagctctgagcctcctgaagaaaagattctcccatagacccgtgcaggagaagttcgtgtgcctgaactgcggcttcgagacacacgcagccgagcaagccgccctgaacatcgccagatcctggctgttcctgcggagccaggagtacaagaaataccagacaaacaagacaaccggcaacaccgataagagagccttcgtcgagacctggcagtccttttaccggaagaagcttaaggaggtgtggaaacctgccgtgcggtctggcggatctggcggaggctccacaagcagcaaggcccccatcaccttcggcgacctggccatctacttcagccaggaggagtgggagtggctgagccccatccagaaggacctgtacgaggacgtgatgctggagaactacaggaacctggtgagcctgggcctgagcttcaggaggcccaacgtgatcaccctgctggagaagggcaaggccccctggatggtggagcccgtgaggaggaggagggcccccgacagcggcagcaagtgcaccagccccaagaaaaagagaaaagtctaagctgccttctgcggggcttgccttctggccatgcccttcttctctcccttgcacctgtacctcttggtctttgaataaagcctgagtaggaaggctagcaaaaaaaaaaaaaaaaaaaaaaaaaaaaaaaaaaaaaaaaaaaaaaaaaaaaaaaaaaaaaaaaaaaaaaaaaaaaaaaa

SEQ ID NO: 3300 - RNA, 5419 nt, synthetic construct
  source 1..5419: mol_type = other RNA
aggaaataagagagaaaagaagagtaagaagaaatataagagccaccatggcccctaagaagaagcgtaaagtgagccgggtgaacggcagcggcagcggcggcggcatgaaccacgaccaggagttcgacccccctaaggtgtaccctcccgtccccgccgagaagagaaagcccatccgggtcctgagcctgttcgatggcatcgccaccggtctgctggtgctgaaggacctgggcatccaggtggataggtacattgcctccgaggtgtgcgaggactccatcaccgtgggaatggtgcgtcatcagggcaagatcatgtacgtgggcgacgtgcggagcgtgacacagaagcatatccaggagtggggccctttcgacctggtgatcggcggcagcccttgcaatgacctgagcatcgtgaacccagcccggaagggcctgtacgagggaaccggcagactgttcttcgagttttacagactgctgcacgacgcccggcctaaggaaggcgacgaccggcccttcttttggctgttcgagaatgtggtggccatgggagtcagcgacaagcgggatattagccggttcctggagagcaaccccgtgatgatcgatgccaaggaagtgagcgccgcccaccgggccagatacttctggggcaatctgcctggcatgaacagacccctggccagcaccgtgaacgacaagctggagctgcaggagtgcctggagcacggccggatcgccaagttcagcaaggtgagaaccatcaccacccgaagcaacagcatcaaacaaggcaaggaccagcactttcctgtgttcatgaacgagaaggaggacatcctgtggtgtaccgagatggagagagtgttcgggttcccagtccactacacagatgtcagcaacatgtctagactggccagacagagactgctgggaagaagctggtccgtccctgtgatcagacacctgttcgcccctctgaaggagtacttcgcctgcgtgagcagcggcaacagcaacgccaacagccggggccccagcttctctagcggcctggtgccactgtccctgagagggagccacatgggccccatggagatctacaaaaccgtgagcgcctggaagcggcagcctgtgcgcgtgctgagcctgtttcggaatatcgataaagtcctgaaaagcctgggattcctggagagcggctctggctccggcggtggcaccctgaagtacgtggaggatgtgacaaacgtggtcagacgggatgtggagaagtggggccccttcgatctggtgtacggcagcacccaacccctgggcagctcttgtgaccggtgccctggctggtacatgtttcagttccaccggatcctgcagtacgccctgccgagacaggagtcccagcggccattcttttggattttcatggacaacttgctgctgaccgaggatgaccaggaaactaccactcggttcctgcagaccgaagccgtgaccctgcaggacgtgagaggccgggactaccagaacgccatgcgggtgtggtccaacatccctggactgaaaagcaagcacgcacctctgacccctaaagaagaggagtacctgcaggcccaggtgcggagcagaagcaagctggacgcccctaaggtggatctgctggtgaagaattgcctcctgcccctgagagagtacttcaagtatttcagccagaatagtctgcccctgggcggcccaagcagcggcgcccctcctcccagcggcggcagcccagccggctccccaacctctaccgaggagggcacctctgagtccgccacccccgagagcggccctggcacctccaccgagcccagcgagggcagcgcacccggcagccctgccggcagccccacctccacagaggagggaaccagcaccgagcccagcgaaggcagcgccccaggcaccagcaccgagcctagtgagggcggctctggcggcggcagcgcccaggagattaaacggatcaacaagatcagaagaagacttgtgaaagacagcaacaccaagaaggccggcaagacaggccccatgaaaaccctgctggttagagtgatgacacccgatctgagagagcggctggaaaacctgagaaagaagcctgaaaatatcccccagcccatcagcaatacatctagagccaacctgaataagctgctgaccgattacaccgaaatgaagaaggcgatcctgcatgtgtactgggaagagttccagaaggaccctgtgggcctgatgagccgggtggcccagcctgccagcaagaagatcgatcagaacaagctgaaacctgagatggacgagaagggcaacctgaccaccgccggctttgcctgctctcagtgtggccagcccctgttcgtgtacaagctggagcaggtgtctgagaagggcaaggcttacaccaactacttcggacggtgcaatgtggccgagcacgaaaagctgatcctgctggcccagctgaagcccgagaaggatagcgacgaagccgtgacatatagcctgggaaagtttgggcagagggccctggatttctacagcattcatgtgaccaaggagtccacccaccccgtgaagcccctggcccagatcgccggaaacagatacgcctccggacctgtgggaaaggccctgagcgacgcatgtatgggcacaatcgcctccttcctgtctaagtaccaggacatcatcatcgaacaccagaaggtggtgaagggcaaccagaagagactggagagcctgcgggagctggccggcaaggaaaacctggaataccctagcgtgaccctgccacctcagcctcacaccaaggagggcgttgatgcctacaacgaagtgatcgcccgggtgcgaatgtgggtgaacctgaacctgtggcagaagctgaagctaagcagagatgatgccaagcctctgctgagactgaagggattcccttcctttcctctggtcgagagacaggccaacgaagtggactggtgggacatggtgtgtaacgtgaagaagctgatcaacgagaaaaaggaggatggcaaggtgttttggcagaatctggctggctacaagagacaggaagccctgagaccatacctgagcagcgaggaagatcggaagaagggaaagaaattcgctcggtaccagctgggcgacctgctgctgcacctggaaaagaagcacggcgaggactggggaaaggtgtacgacgaggcctgggagcggattgacaagaaagtggaaggcctgagcaagcacatcaagctggaagaggaacggagaagcgaggacgcccagagcaaggccgccctgaccgactggctgcgggctaaggccagcttcgtgatcgagggcctgaaggaggccgacaaggacgagttctgcagatgcgagctgaagctgcagaagtggtacggggacctgcggggaaagcccttcgccatcgaagccgagaacagcatcctggacatcagcggcttcagcaagcagtacaactgtgccttcatctggcagaaggacggcgtgaagaagctgaacctgtacctgatcatcaactacttcaagggcggcaagctgcggttcaagaagatcaaacctgaagccttcgaagccaacagattctacaccgtgatcaacaaaaagagcggcgagatcgtgcccatggaggtgaacttcaacttcgacgaccccaacctgatcatcctgcctctggcctttggcaagagacagggcagagaattcatctggaacgacctgctgtccctggaaaccggcagcctgaagctggccaacggaagagtgatcgagaagacactgtacaacagaagaacccggcaggatgagcctgccctgttcgtggccctgaccttcgagcggcgggaggtcctggactcctccaatatcaaaccaatgaacctgatcggcgtggcaagaggcgaaaacatccccgccgtgatcgccctgaccgaccccgagggctgcccactgagccggtttaaggatagcctgggaaacccaacccacatcctgagaatcggcgagagctataaggagaagcagcggaccatccaggccaagaaggaggtggagcagcggagagccggcggctacagccggaagtacgccagcaaagccaagaatctggcagacgatatggtgagaaacaccgctagagatctgctgtactacgccgtgacccaggatgccatgctgatcttcgccaacctgagccggggcttcggccggcagggcaagcggaccttcatggccgagagacagtacacacggatggaggactggctgaccgccaagctggcctacgagggcctgagcaagacctacctgtccaagacactggcccagtacacctccaagacatgcagcaactgtgggtttaccatcaccagcgccgactacgacagggtgctggagaagctgaagaagacagcaacaggctggatgaccacaattaacggcaaggagctgaaggtggagggccagattacctactacaacagatacaagagacagaacgtagtcaaggacctgtccgtcgagctggatagactgagcgaagaatctgtgaacaacgacatctcctcctggacaaagggcagaagcggagaagctctgagcctcctgaagaaaagattctcccatagacccgtgcaggagaagttcgtgtgcctgaactgcggcttcgagacacacgcagccgagcaagccgccctgaacatcgccagatcctggctgttcctgcggagccaggagtacaagaaataccagacaaacaagacaaccggcaacaccgataagagagccttcgtcgagacctggcagtccttttaccggaagaagcttaaggaggtgtggaaacctgccgtgcggtctggcggatctggcggaggctccacaagcagcaaggccagcgtgaccttcggcgacctggccatctacttcagcagggaggagtgggagtggctgagccccatccagaaggacctgtacgaggacgtgatgctggagaactaccagaccctggtgagcctgggcctggtgtgcaggaggcccaacatcatcaccctgctggagaagggcaaggccccctggatggtggagcccagcaggaggaggaggggccccgagagcggcagcaagaggaccagccccaagaaaaagagaaaagtctaagctgccttctgcggggcttgccttctggccatgcccttcttctctcccttgcacctgtacctcttggtctttgaataaagcctgagtaggaaggctagcaaaaaaaaaaaaaaaaaaaaaaaaaaaaaaaaaaaaaaaaaaaaaaaaaaaaaaaaaaaaaaaaaaaaaaaaaaaaaaaa

SEQ ID NO: 3301 - RNA, 5419 nt, synthetic construct
  source 1..5419: mol_type = other RNA
aggaaataagagagaaaagaagagtaagaagaaatataagagccaccatggcccctaagaagaagcgtaaagtgagccgggtgaacggcagcggcagcggcggcggcatgaaccacgaccaggagttcgacccccctaaggtgtaccctcccgtccccgccgagaagagaaagcccatccgggtcctgagcctgttcgatggcatcgccaccggtctgctggtgctgaaggacctgggcatccaggtggataggtacattgcctccgaggtgtgcgaggactccatcaccgtgggaatggtgcgtcatcagggcaagatcatgtacgtgggcgacgtgcggagcgtgacacagaagcatatccaggagtggggccctttcgacctggtgatcggcggcagcccttgcaatgacctgagcatcgtgaacccagcccggaagggcctgtacgagggaaccggcagactgttcttcgagttttacagactgctgcacgacgcccggcctaaggaaggcgacgaccggcccttcttttggctgttcgagaatgtggtggccatgggagtcagcgacaagcgggatattagccggttcctggagagcaaccccgtgatgatcgatgccaaggaagtgagcgccgcccaccgggccagatacttctggggcaatctgcctggcatgaacagacccctggccagcaccgtgaacgacaagctggagctgcaggagtgcctggagcacggccggatcgccaagttcagcaaggtgagaaccatcaccacccgaagcaacagcatcaaacaaggcaaggaccagcactttcctgtgttcatgaacgagaaggaggacatcctgtggtgtaccgagatggagagagtgttcgggttcccagtccactacacagatgtcagcaacatgtctagactggccagacagagactgctgggaagaagctggtccgtccctgtgatcagacacctgttcgcccctctgaaggagtacttcgcctgcgtgagcagcggcaacagcaacgccaacagccggggccccagcttctctagcggcctggtgccactgtccctgagagggagccacatgggccccatggagatctacaaaaccgtgagcgcctggaagcggcagcctgtgcgcgtgctgagcctgtttcggaatatcgataaagtcctgaaaagcctgggattcctggagagcggctctggctccggcggtggcaccctgaagtacgtggaggatgtgacaaacgtggtcagacgggatgtggagaagtggggccccttcgatctggtgtacggcagcacccaacccctgggcagctcttgtgaccggtgccctggctggtacatgtttcagttccaccggatcctgcagtacgccctgccgagacaggagtcccagcggccattcttttggattttcatggacaacttgctgctgaccgaggatgaccaggaaactaccactcggttcctgcagaccgaagccgtgaccctgcaggacgtgagaggccgggactaccagaacgccatgcgggtgtggtccaacatccctggactgaaaagcaagcacgcacctctgacccctaaagaagaggagtacctgcaggcccaggtgcggagcagaagcaagctggacgcccctaaggtggatctgctggtgaagaattgcctcctgcccctgagagagtacttcaagtatttcagccagaatagtctgcccctgggcggcccaagcagcggcgcccctcctcccagcggcggcagcccagccggctccccaacctctaccgaggagggcacctctgagtccgccacccccgagagcggccctggcacctccaccgagcccagcgagggcagcgcacccggcagccctgccggcagccccacctccacagaggagggaaccagcaccgagcccagcgaaggcagcgccccaggcaccagcaccgagcctagtgagggcggctctggcggcggcagcgcccaggagattaaacggatcaacaagatcagaagaagacttgtgaaagacagcaacaccaagaaggccggcaagacaggccccatgaaaaccctgctggttagagtgatgacacccgatctgagagagcggctggaaaacctgagaaagaagcctgaaaatatcccccagcccatcagcaatacatctagagccaacctgaataagctgctgaccgattacaccgaaatgaagaaggcgatcctgcatgtgtactgggaagagttccagaaggaccctgtgggcctgatgagccgggtggcccagcctgccagcaagaagatcgatcagaacaagctgaaacctgagatggacgagaagggcaacctgaccaccgccggctttgcctgctctcagtgtggccagcccctgttcgtgtacaagctggagcaggtgtctgagaagggcaaggcttacaccaactacttcggacggtgcaatgtggccgagcacgaaaagctgatcctgctggcccagctgaagcccgagaaggatagcgacgaagccgtgacatatagcctgggaaagtttgggcagagggccctggatttctacagcattcatgtgaccaaggagtccacccaccccgtgaagcccctggcccagatcgccggaaacagatacgcctccggacctgtgggaaaggccctgagcgacgcatgtatgggcacaatcgcctccttcctgtctaagtaccaggacatcatcatcgaacaccagaaggtggtgaagggcaaccagaagagactggagagcctgcgggagctggccggcaaggaaaacctggaataccctagcgtgaccctgccacctcagcctcacaccaaggagggcgttgatgcctacaacgaagtgatcgcccgggtgcgaatgtgggtgaacctgaacctgtggcagaagctgaagctaagcagagatgatgccaagcctctgctgagactgaagggattcccttcctttcctctggtcgagagacaggccaacgaagtggactggtgggacatggtgtgtaacgtgaagaagctgatcaacgagaaaaaggaggatggcaaggtgttttggcagaatctggctggctacaagagacaggaagccctgagaccatacctgagcagcgaggaagatcggaagaagggaaagaaattcgctcggtaccagctgggcgacctgctgctgcacctggaaaagaagcacggcgaggactggggaaaggtgtacgacgaggcctgggagcggattgacaagaaagtggaaggcctgagcaagcacatcaagctggaagaggaacggagaagcgaggacgcccagagcaaggccgccctgaccgactggctgcgggctaaggccagcttcgtgatcgagggcctgaaggaggccgacaaggacgagttctgcagatgcgagctgaagctgcagaagtggtacggggacctgcggggaaagcccttcgccatcgaagccgagaacagcatcctggacatcagcggcttcagcaagcagtacaactgtgccttcatctggcagaaggacggcgtgaagaagctgaacctgtacctgatcatcaactacttcaagggcggcaagctgcggttcaagaagatcaaacctgaagccttcgaagccaacagattctacaccgtgatcaacaaaaagagcggcgagatcgtgcccatggaggtgaacttcaacttcgacgaccccaacctgatcatcctgcctctggcctttggcaagagacagggcagagaattcatctggaacgacctgctgtccctggaaaccggcagcctgaagctggccaacggaagagtgatcgagaagacactgtacaacagaagaacccggcaggatgagcctgccctgttcgtggccctgaccttcgagcggcgggaggtcctggactcctccaatatcaaaccaatgaacctgatcggcgtggcaagaggcgaaaacatccccgccgtgatcgccctgaccgaccccgagggctgcccactgagccggtttaaggatagcctgggaaacccaacccacatcctgagaatcggcgagagctataaggagaagcagcggaccatccaggccaagaaggaggtggagcagcggagagccggcggctacagccggaagtacgccagcaaagccaagaatctggcagacgatatggtgagaaacaccgctagagatctgctgtactacgccgtgacccaggatgccatgctgatcttcgccaacctgagccggggcttcggccggcagggcaagcggaccttcatggccgagagacagtacacacggatggaggactggctgaccgccaagctggcctacgagggcctgagcaagacctacctgtccaagacactggcccagtacacctccaagacatgcagcaactgtgggtttaccatcaccagcgccgactacgacagggtgctggagaagctgaagaagacagcaacaggctggatgaccacaattaacggcaaggagctgaaggtggagggccagattacctactacaacagatacaagagacagaacgtagtcaaggacctgtccgtcgagctggatagactgagcgaagaatctgtgaacaacgacatctcctcctggacaaagggcagaagcggagaagctctgagcctcctgaagaaaagattctcccatagacccgtgcaggagaagttcgtgtgcctgaactgcggcttcgagacacacgcagccgagcaagccgccctgaacatcgccagatcctggctgttcctgcggagccaggagtacaagaaataccagacaaacaagacaaccggcaacaccgataagagagccttcgtcgagacctggcagtccttttaccggaagaagcttaaggaggtgtggaaacctgccgtgcggtctggcggatctggcggaggctccacaagcacccaggagagcctgaccctggaggacgtggccgtggagttcagctgggaggagtggcagctgctggacaccgcccagaaggacctgtacagggacgtgatggtggagaactacaaccacctggtgagcctgggctaccagaccagcaagcccgacgccctgagcaagctggcccacggccaggagccctggatgaccgacgccaagatccagaacaagaactgccccggcatcaggaaggtgaccagccccaagaaaaagagaaaagtctaagctgccttctgcggggcttgccttctggccatgcccttcttctctcccttgcacctgtacctcttggtctttgaataaagcctgagtaggaaggctagcaaaaaaaaaaaaaaaaaaaaaaaaaaaaaaaaaaaaaaaaaaaaaaaaaaaaaaaaaaaaaaaaaaaaaaaaaaaaaaaa

SEQ ID NO: 3302 - RNA, 5419 nt, synthetic construct
  source 1..5419: mol_type = other RNA
aggaaataagagagaaaagaagagtaagaagaaatataagagccaccatggcccctaagaagaagcgtaaagtgagccgggtgaacggcagcggcagcggcggcggcatgaaccacgaccaggagttcgacccccctaaggtgtaccctcccgtccccgccgagaagagaaagcccatccgggtcctgagcctgttcgatggcatcgccaccggtctgctggtgctgaaggacctgggcatccaggtggataggtacattgcctccgaggtgtgcgaggactccatcaccgtgggaatggtgcgtcatcagggcaagatcatgtacgtgggcgacgtgcggagcgtgacacagaagcatatccaggagtggggccctttcgacctggtgatcggcggcagcccttgcaatgacctgagcatcgtgaacccagcccggaagggcctgtacgagggaaccggcagactgttcttcgagttttacagactgctgcacgacgcccggcctaaggaaggcgacgaccggcccttcttttggctgttcgagaatgtggtggccatgggagtcagcgacaagcgggatattagccggttcctggagagcaaccccgtgatgatcgatgccaaggaagtgagcgccgcccaccgggccagatacttctggggcaatctgcctggcatgaacagacccctggccagcaccgtgaacgacaagctggagctgcaggagtgcctggagcacggccggatcgccaagttcagcaaggtgagaaccatcaccacccgaagcaacagcatcaaacaaggcaaggaccagcactttcctgtgttcatgaacgagaaggaggacatcctgtggtgtaccgagatggagagagtgttcgggttcccagtccactacacagatgtcagcaacatgtctagactggccagacagagactgctgggaagaagctggtccgtccctgtgatcagacacctgttcgcccctctgaaggagtacttcgcctgcgtgagcagcggcaacagcaacgccaacagccggggccccagcttctctagcggcctggtgccactgtccctgagagggagccacatgggccccatggagatctacaaaaccgtgagcgcctggaagcggcagcctgtgcgcgtgctgagcctgtttcggaatatcgataaagtcctgaaaagcctgggattcctggagagcggctctggctccggcggtggcaccctgaagtacgtggaggatgtgacaaacgtggtcagacgggatgtggagaagtggggccccttcgatctggtgtacggcagcacccaacccctgggcagctcttgtgaccggtgccctggctggtacatgtttcagttccaccggatcctgcagtacgccctgccgagacaggagtcccagcggccattcttttggattttcatggacaacttgctgctgaccgaggatgaccaggaaactaccactcggttcctgcagaccgaagccgtgaccctgcaggacgtgagaggccgggactaccagaacgccatgcgggtgtggtccaacatccctggactgaaaagcaagcacgcacctctgacccctaaagaagaggagtacctgcaggcccaggtgcggagcagaagcaagctggacgcccctaaggtggatctgctggtgaagaattgcctcctgcccctgagagagtacttcaagtatttcagccagaatagtctgcccctgggcggcccaagcagcggcgcccctcctcccagcggcggcagcccagccggctccccaacctctaccgaggagggcacctctgagtccgccacccccgagagcggccctggcacctccaccgagcccagcgagggcagcgcacccggcagccctgccggcagccccacctccacagaggagggaaccagcaccgagcccagcgaaggcagcgccccaggcaccagcaccgagcctagtgagggcggctctggcggcggcagcgcccaggagattaaacggatcaacaagatcagaagaagacttgtgaaagacagcaacaccaagaaggccggcaagacaggccccatgaaaaccctgctggttagagtgatgacacccgatctgagagagcggctggaaaacctgagaaagaagcctgaaaatatcccccagcccatcagcaatacatctagagccaacctgaataagctgctgaccgattacaccgaaatgaagaaggcgatcctgcatgtgtactgggaagagttccagaaggaccctgtgggcctgatgagccgggtggcccagcctgccagcaagaagatcgatcagaacaagctgaaacctgagatggacgagaagggcaacctgaccaccgccggctttgcctgctctcagtgtggccagcccctgttcgtgtacaagctggagcaggtgtctgagaagggcaaggcttacaccaactacttcggacggtgcaatgtggccgagcacgaaaagctgatcctgctggcccagctgaagcccgagaaggatagcgacgaagccgtgacatatagcctgggaaagtttgggcagagggccctggatttctacagcattcatgtgaccaaggagtccacccaccccgtgaagcccctggcccagatcgccggaaacagatacgcctccggacctgtgggaaaggccctgagcgacgcatgtatgggcacaatcgcctccttcctgtctaagtaccaggacatcatcatcgaacaccagaaggtggtgaagggcaaccagaagagactggagagcctgcgggagctggccggcaaggaaaacctggaataccctagcgtgaccctgccacctcagcctcacaccaaggagggcgttgatgcctacaacgaagtgatcgcccgggtgcgaatgtgggtgaacctgaacctgtggcagaagctgaagctaagcagagatgatgccaagcctctgctgagactgaagggattcccttcctttcctctggtcgagagacaggccaacgaagtggactggtgggacatggtgtgtaacgtgaagaagctgatcaacgagaaaaaggaggatggcaaggtgttttggcagaatctggctggctacaagagacaggaagccctgagaccatacctgagcagcgaggaagatcggaagaagggaaagaaattcgctcggtaccagctgggcgacctgctgctgcacctggaaaagaagcacggcgaggactggggaaaggtgtacgacgaggcctgggagcggattgacaagaaagtggaaggcctgagcaagcacatcaagctggaagaggaacggagaagcgaggacgcccagagcaaggccgccctgaccgactggctgcgggctaaggccagcttcgtgatcgagggcctgaaggaggccgacaaggacgagttctgcagatgcgagctgaagctgcagaagtggtacggggacctgcggggaaagcccttcgccatcgaagccgagaacagcatcctggacatcagcggcttcagcaagcagtacaactgtgccttcatctggcagaaggacggcgtgaagaagctgaacctgtacctgatcatcaactacttcaagggcggcaagctgcggttcaagaagatcaaacctgaagccttcgaagccaacagattctacaccgtgatcaacaaaaagagcggcgagatcgtgcccatggaggtgaacttcaacttcgacgaccccaacctgatcatcctgcctctggcctttggcaagagacagggcagagaattcatctggaacgacctgctgtccctggaaaccggcagcctgaagctggccaacggaagagtgatcgagaagacactgtacaacagaagaacccggcaggatgagcctgccctgttcgtggccctgaccttcgagcggcgggaggtcctggactcctccaatatcaaaccaatgaacctgatcggcgtggcaagaggcgaaaacatccccgccgtgatcgccctgaccgaccccgagggctgcccactgagccggtttaaggatagcctgggaaacccaacccacatcctgagaatcggcgagagctataaggagaagcagcggaccatccaggccaagaaggaggtggagcagcggagagccggcggctacagccggaagtacgccagcaaagccaagaatctggcagacgatatggtgagaaacaccgctagagatctgctgtactacgccgtgacccaggatgccatgctgatcttcgccaacctgagccggggcttcggccggcagggcaagcggaccttcatggccgagagacagtacacacggatggaggactggctgaccgccaagctggcctacgagggcctgagcaagacctacctgtccaagacactggcccagtacacctccaagacatgcagcaactgtgggtttaccatcaccagcgccgactacgacagggtgctggagaagctgaagaagacagcaacaggctggatgaccacaattaacggcaaggagctgaaggtggagggccagattacctactacaacagatacaagagacagaacgtagtcaaggacctgtccgtcgagctggatagactgagcgaagaatctgtgaacaacgacatctcctcctggacaaagggcagaagcggagaagctctgagcctcctgaagaaaagattctcccatagacccgtgcaggagaagttcgtgtgcctgaactgcggcttcgagacacacgcagccgagcaagccgccctgaacatcgccagatcctggctgttcctgcggagccaggagtacaagaaataccagacaaacaagacaaccggcaacaccgataagagagccttcgtcgagacctggcagtccttttaccggaagaagcttaaggaggtgtggaaacctgccgtgcggtctggcggatctggcggaggctccacaagcagccagggccccgtgaagttcgaggacgtggccatctacctgtggaaggaggagtgggagctgatggacagcacccagaagaggctgtacaggcaggtgatgctggagacctacgagaacgtgctgagcgtgggcaccccccacgacaagcccgccatgatcgtgcacctggagcagggcgagaccgcctggagccccgccctgcagaggcccggcaaggagaagggcaggctgcacggccacaccagccccaagaaaaagagaaaagtctaagctgccttctgcggggcttgccttctggccatgcccttcttctctcccttgcacctgtacctcttggtctttgaataaagcctgagtaggaaggctagcaaaaaaaaaaaaaaaaaaaaaaaaaaaaaaaaaaaaaaaaaaaaaaaaaaaaaaaaaaaaaaaaaaaaaaaaaaaaaaaa

SEQ ID NO: 3303 - RNA, 5419 nt, synthetic construct
  source 1..5419: mol_type = other RNA
aggaaataagagagaaaagaagagtaagaagaaatataagagccaccatggcccctaagaagaagcgtaaagtgagccgggtgaacggcagcggcagcggcggcggcatgaaccacgaccaggagttcgacccccctaaggtgtaccctcccgtccccgccgagaagagaaagcccatccgggtcctgagcctgttcgatggcatcgccaccggtctgctggtgctgaaggacctgggcatccaggtggataggtacattgcctccgaggtgtgcgaggactccatcaccgtgggaatggtgcgtcatcagggcaagatcatgtacgtgggcgacgtgcggagcgtgacacagaagcatatccaggagtggggccctttcgacctggtgatcggcggcagcccttgcaatgacctgagcatcgtgaacccagcccggaagggcctgtacgagggaaccggcagactgttcttcgagttttacagactgctgcacgacgcccggcctaaggaaggcgacgaccggcccttcttttggctgttcgagaatgtggtggccatgggagtcagcgacaagcgggatattagccggttcctggagagcaaccccgtgatgatcgatgccaaggaagtgagcgccgcccaccgggccagatacttctggggcaatctgcctggcatgaacagacccctggccagcaccgtgaacgacaagctggagctgcaggagtgcctggagcacggccggatcgccaagttcagcaaggtgagaaccatcaccacccgaagcaacagcatcaaacaaggcaaggaccagcactttcctgtgttcatgaacgagaaggaggacatcctgtggtgtaccgagatggagagagtgttcgggttcccagtccactacacagatgtcagcaacatgtctagactggccagacagagactgctgggaagaagctggtccgtccctgtgatcagacacctgttcgcccctctgaaggagtacttcgcctgcgtgagcagcggcaacagcaacgccaacagccggggccccagcttctctagcggcctggtgccactgtccctgagagggagccacatgggccccatggagatctacaaaaccgtgagcgcctggaagcggcagcctgtgcgcgtgctgagcctgtttcggaatatcgataaagtcctgaaaagcctgggattcctggagagcggctctggctccggcggtggcaccctgaagtacgtggaggatgtgacaaacgtggtcagacgggatgtggagaagtggggccccttcgatctggtgtacggcagcacccaacccctgggcagctcttgtgaccggtgccctggctggtacatgtttcagttccaccggatcctgcagtacgccctgccgagacaggagtcccagcggccattcttttggattttcatggacaacttgctgctgaccgaggatgaccaggaaactaccactcggttcctgcagaccgaagccgtgaccctgcaggacgtgagaggccgggactaccagaacgccatgcgggtgtggtccaacatccctggactgaaaagcaagcacgcacctctgacccctaaagaagaggagtacctgcaggcccaggtgcggagcagaagcaagctggacgcccctaaggtggatctgctggtgaagaattgcctcctgcccctgagagagtacttcaagtatttcagccagaatagtctgcccctgggcggcccaagcagcggcgcccctcctcccagcggcggcagcccagccggctccccaacctctaccgaggagggcacctctgagtccgccacccccgagagcggccctggcacctccaccgagcccagcgagggcagcgcacccggcagccctgccggcagccccacctccacagaggagggaaccagcaccgagcccagcgaaggcagcgccccaggcaccagcaccgagcctagtgagggcggctctggcggcggcagcgcccaggagattaaacggatcaacaagatcagaagaagacttgtgaaagacagcaacaccaagaaggccggcaagacaggccccatgaaaaccctgctggttagagtgatgacacccgatctgagagagcggctggaaaacctgagaaagaagcctgaaaatatcccccagcccatcagcaatacatctagagccaacctgaataagctgctgaccgattacaccgaaatgaagaaggcgatcctgcatgtgtactgggaagagttccagaaggaccctgtgggcctgatgagccgggtggcccagcctgccagcaagaagatcgatcagaacaagctgaaacctgagatggacgagaagggcaacctgaccaccgccggctttgcctgctctcagtgtggccagcccctgttcgtgtacaagctggagcaggtgtctgagaagggcaaggcttacaccaactacttcggacggtgcaatgtggccgagcacgaaaagctgatcctgctggcccagctgaagcccgagaaggatagcgacgaagccgtgacatatagcctgggaaagtttgggcagagggccctggatttctacagcattcatgtgaccaaggagtccacccaccccgtgaagcccctggcccagatcgccggaaacagatacgcctccggacctgtgggaaaggccctgagcgacgcatgtatgggcacaatcgcctccttcctgtctaagtaccaggacatcatcatcgaacaccagaaggtggtgaagggcaaccagaagagactggagagcctgcgggagctggccggcaaggaaaacctggaataccctagcgtgaccctgccacctcagcctcacaccaaggagggcgttgatgcctacaacgaagtgatcgcccgggtgcgaatgtgggtgaacctgaacctgtggcagaagctgaagctaagcagagatgatgccaagcctctgctgagactgaagggattcccttcctttcctctggtcgagagacaggccaacgaagtggactggtgggacatggtgtgtaacgtgaagaagctgatcaacgagaaaaaggaggatggcaaggtgttttggcagaatctggctggctacaagagacaggaagccctgagaccatacctgagcagcgaggaagatcggaagaagggaaagaaattcgctcggtaccagctgggcgacctgctgctgcacctggaaaagaagcacggcgaggactggggaaaggtgtacgacgaggcctgggagcggattgacaagaaagtggaaggcctgagcaagcacatcaagctggaagaggaacggagaagcgaggacgcccagagcaaggccgccctgaccgactggctgcgggctaaggccagcttcgtgatcgagggcctgaaggaggccgacaaggacgagttctgcagatgcgagctgaagctgcagaagtggtacggggacctgcggggaaagcccttcgccatcgaagccgagaacagcatcctggacatcagcggcttcagcaagcagtacaactgtgccttcatctggcagaaggacggcgtgaagaagctgaacctgtacctgatcatcaactacttcaagggcggcaagctgcggttcaagaagatcaaacctgaagccttcgaagccaacagattctacaccgtgatcaacaaaaagagcggcgagatcgtgcccatggaggtgaacttcaacttcgacgaccccaacctgatcatcctgcctctggcctttggcaagagacagggcagagaattcatctggaacgacctgctgtccctggaaaccggcagcctgaagctggccaacggaagagtgatcgagaagacactgtacaacagaagaacccggcaggatgagcctgccctgttcgtggccctgaccttcgagcggcgggaggtcctggactcctccaatatcaaaccaatgaacctgatcggcgtggcaagaggcgaaaacatccccgccgtgatcgccctgaccgaccccgagggctgcccactgagccggtttaaggatagcctgggaaacccaacccacatcctgagaatcggcgagagctataaggagaagcagcggaccatccaggccaagaaggaggtggagcagcggagagccggcggctacagccggaagtacgccagcaaagccaagaatctggcagacgatatggtgagaaacaccgctagagatctgctgtactacgccgtgacccaggatgccatgctgatcttcgccaacctgagccggggcttcggccggcagggcaagcggaccttcatggccgagagacagtacacacggatggaggactggctgaccgccaagctggcctacgagggcctgagcaagacctacctgtccaagacactggcccagtacacctccaagacatgcagcaactgtgggtttaccatcaccagcgccgactacgacagggtgctggagaagctgaagaagacagcaacaggctggatgaccacaattaacggcaaggagctgaaggtggagggccagattacctactacaacagatacaagagacagaacgtagtcaaggacctgtccgtcgagctggatagactgagcgaagaatctgtgaacaacgacatctcctcctggacaaagggcagaagcggagaagctctgagcctcctgaagaaaagattctcccatagacccgtgcaggagaagttcgtgtgcctgaactgcggcttcgagacacacgcagccgagcaagccgccctgaacatcgccagatcctggctgttcctgcggagccaggagtacaagaaataccagacaaacaagacaaccggcaacaccgataagagagccttcgtcgagacctggcagtccttttaccggaagaagcttaaggaggtgtggaaacctgccgtgcggtctggcggatctggcggaggctccacaagcatgctgagccccgtgaccttcgaggacgtggccgtgtacttcaccgagggccagggcgccctgctggaccccaaccagagggccctgtacagggaggtgatgatggagaactacgagaacatggccagcctgggcttcctgttcatcaagcccgccctgatcagccagctggagcagggcgaggagctgtgggcccccgagagccagggcctggacgccgccgagatcagcgacaccagcgacaccagccccaagaaaaagagaaaagtctaagctgccttctgcggggcttgccttctggccatgcccttcttctctcccttgcacctgtacctcttggtctttgaataaagcctgagtaggaaggctagcaaaaaaaaaaaaaaaaaaaaaaaaaaaaaaaaaaaaaaaaaaaaaaaaaaaaaaaaaaaaaaaaaaaaaaaaaaaaaaaa

SEQ ID NO: 3304 - RNA, 5419 nt, synthetic construct
  source 1..5419: mol_type = other RNA
aggaaataagagagaaaagaagagtaagaagaaatataagagccaccatggcccctaagaagaagcgtaaagtgagccgggtgaacggcagcggcagcggcggcggcatgaaccacgaccaggagttcgacccccctaaggtgtaccctcccgtccccgccgagaagagaaagcccatccgggtcctgagcctgttcgatggcatcgccaccggtctgctggtgctgaaggacctgggcatccaggtggataggtacattgcctccgaggtgtgcgaggactccatcaccgtgggaatggtgcgtcatcagggcaagatcatgtacgtgggcgacgtgcggagcgtgacacagaagcatatccaggagtggggccctttcgacctggtgatcggcggcagcccttgcaatgacctgagcatcgtgaacccagcccggaagggcctgtacgagggaaccggcagactgttcttcgagttttacagactgctgcacgacgcccggcctaaggaaggcgacgaccggcccttcttttggctgttcgagaatgtggtggccatgggagtcagcgacaagcgggatattagccggttcctggagagcaaccccgtgatgatcgatgccaaggaagtgagcgccgcccaccgggccagatacttctggggcaatctgcctggcatgaacagacccctggccagcaccgtgaacgacaagctggagctgcaggagtgcctggagcacggccggatcgccaagttcagcaaggtgagaaccatcaccacccgaagcaacagcatcaaacaaggcaaggaccagcactttcctgtgttcatgaacgagaaggaggacatcctgtggtgtaccgagatggagagagtgttcgggttcccagtccactacacagatgtcagcaacatgtctagactggccagacagagactgctgggaagaagctggtccgtccctgtgatcagacacctgttcgcccctctgaaggagtacttcgcctgcgtgagcagcggcaacagcaacgccaacagccggggccccagcttctctagcggcctggtgccactgtccctgagagggagccacatgggccccatggagatctacaaaaccgtgagcgcctggaagcggcagcctgtgcgcgtgctgagcctgtttcggaatatcgataaagtcctgaaaagcctgggattcctggagagcggctctggctccggcggtggcaccctgaagtacgtggaggatgtgacaaacgtggtcagacgggatgtggagaagtggggccccttcgatctggtgtacggcagcacccaacccctgggcagctcttgtgaccggtgccctggctggtacatgtttcagttccaccggatcctgcagtacgccctgccgagacaggagtcccagcggccattcttttggattttcatggacaacttgctgctgaccgaggatgaccaggaaactaccactcggttcctgcagaccgaagccgtgaccctgcaggacgtgagaggccgggactaccagaacgccatgcgggtgtggtccaacatccctggactgaaaagcaagcacgcacctctgacccctaaagaagaggagtacctgcaggcccaggtgcggagcagaagcaagctggacgcccctaaggtggatctgctggtgaagaattgcctcctgcccctgagagagtacttcaagtatttcagccagaatagtctgcccctgggcggcccaagcagcggcgcccctcctcccagcggcggcagcccagccggctccccaacctctaccgaggagggcacctctgagtccgccacccccgagagcggccctggcacctccaccgagcccagcgagggcagcgcacccggcagccctgccggcagccccacctccacagaggagggaaccagcaccgagcccagcgaaggcagcgccccaggcaccagcaccgagcctagtgagggcggctctggcggcggcagcgcccaggagattaaacggatcaacaagatcagaagaagacttgtgaaagacagcaacaccaagaaggccggcaagacaggccccatgaaaaccctgctggttagagtgatgacacccgatctgagagagcggctggaaaacctgagaaagaagcctgaaaatatcccccagcccatcagcaatacatctagagccaacctgaataagctgctgaccgattacaccgaaatgaagaaggcgatcctgcatgtgtactgggaagagttccagaaggaccctgtgggcctgatgagccgggtggcccagcctgccagcaagaagatcgatcagaacaagctgaaacctgagatggacgagaagggcaacctgaccaccgccggctttgcctgctctcagtgtggccagcccctgttcgtgtacaagctggagcaggtgtctgagaagggcaaggcttacaccaactacttcggacggtgcaatgtggccgagcacgaaaagctgatcctgctggcccagctgaagcccgagaaggatagcgacgaagccgtgacatatagcctgggaaagtttgggcagagggccctggatttctacagcattcatgtgaccaaggagtccacccaccccgtgaagcccctggcccagatcgccggaaacagatacgcctccggacctgtgggaaaggccctgagcgacgcatgtatgggcacaatcgcctccttcctgtctaagtaccaggacatcatcatcgaacaccagaaggtggtgaagggcaaccagaagagactggagagcctgcgggagctggccggcaaggaaaacctggaataccctagcgtgaccctgccacctcagcctcacaccaaggagggcgttgatgcctacaacgaagtgatcgcccgggtgcgaatgtgggtgaacctgaacctgtggcagaagctgaagctaagcagagatgatgccaagcctctgctgagactgaagggattcccttcctttcctctggtcgagagacaggccaacgaagtggactggtgggacatggtgtgtaacgtgaagaagctgatcaacgagaaaaaggaggatggcaaggtgttttggcagaatctggctggctacaagagacaggaagccctgagaccatacctgagcagcgaggaagatcggaagaagggaaagaaattcgctcggtaccagctgggcgacctgctgctgcacctggaaaagaagcacggcgaggactggggaaaggtgtacgacgaggcctgggagcggattgacaagaaagtggaaggcctgagcaagcacatcaagctggaagaggaacggagaagcgaggacgcccagagcaaggccgccctgaccgactggctgcgggctaaggccagcttcgtgatcgagggcctgaaggaggccgacaaggacgagttctgcagatgcgagctgaagctgcagaagtggtacggggacctgcggggaaagcccttcgccatcgaagccgagaacagcatcctggacatcagcggcttcagcaagcagtacaactgtgccttcatctggcagaaggacggcgtgaagaagctgaacctgtacctgatcatcaactacttcaagggcggcaagctgcggttcaagaagatcaaacctgaagccttcgaagccaacagattctacaccgtgatcaacaaaaagagcggcgagatcgtgcccatggaggtgaacttcaacttcgacgaccccaacctgatcatcctgcctctggcctttggcaagagacagggcagagaattcatctggaacgacctgctgtccctggaaaccggcagcctgaagctggccaacggaagagtgatcgagaagacactgtacaacagaagaacccggcaggatgagcctgccctgttcgtggccctgaccttcgagcggcgggaggtcctggactcctccaatatcaaaccaatgaacctgatcggcgtggcaagaggcgaaaacatccccgccgtgatcgccctgaccgaccccgagggctgcccactgagccggtttaaggatagcctgggaaacccaacccacatcctgagaatcggcgagagctataaggagaagcagcggaccatccaggccaagaaggaggtggagcagcggagagccggcggctacagccggaagtacgccagcaaagccaagaatctggcagacgatatggtgagaaacaccgctagagatctgctgtactacgccgtgacccaggatgccatgctgatcttcgccaacctgagccggggcttcggccggcagggcaagcggaccttcatggccgagagacagtacacacggatggaggactggctgaccgccaagctggcctacgagggcctgagcaagacctacctgtccaagacactggcccagtacacctccaagacatgcagcaactgtgggtttaccatcaccagcgccgactacgacagggtgctggagaagctgaagaagacagcaacaggctggatgaccacaattaacggcaaggagctgaaggtggagggccagattacctactacaacagatacaagagacagaacgtagtcaaggacctgtccgtcgagctggatagactgagcgaagaatctgtgaacaacgacatctcctcctggacaaagggcagaagcggagaagctctgagcctcctgaagaaaagattctcccatagacccgtgcaggagaagttcgtgtgcctgaactgcggcttcgagacacacgcagccgagcaagccgccctgaacatcgccagatcctggctgttcctgcggagccaggagtacaagaaataccagacaaacaagacaaccggcaacaccgataagagagccttcgtcgagacctggcagtccttttaccggaagaagcttaaggaggtgtggaaacctgccgtgcggtctggcggatctggcggaggctccacaagcatgatgaccttcagggacgtggccatcgacttcagccaggaggagtggaagtggctgcagcccgcccagagggacctgtacaggtgcgtgatgctggagaactacggccacctggtgagcctgggcctgagcatcagcaagcccgacgtggtgagcctgctggagcagggcaaggagccctggctgggcaagaagggcatcagcgagagcagcggcgagatcaaggacttcagccccaagaacaccagccccaagaaaaagagaaaagtctaagctgccttctgcggggcttgccttctggccatgcccttcttctctcccttgcacctgtacctcttggtctttgaataaagcctgagtaggaaggctagcaaaaaaaaaaaaaaaaaaaaaaaaaaaaaaaaaaaaaaaaaaaaaaaaaaaaaaaaaaaaaaaaaaaaaaaaaaaaaaaa

SEQ ID NO: 3305 - RNA, 5419 nt, synthetic construct
  source 1..5419: mol_type = other RNA
aggaaataagagagaaaagaagagtaagaagaaatataagagccaccatggcccctaagaagaagcgtaaagtgagccgggtgaacggcagcggcagcggcggcggcatgaaccacgaccaggagttcgacccccctaaggtgtaccctcccgtccccgccgagaagagaaagcccatccgggtcctgagcctgttcgatggcatcgccaccggtctgctggtgctgaaggacctgggcatccaggtggataggtacattgcctccgaggtgtgcgaggactccatcaccgtgggaatggtgcgtcatcagggcaagatcatgtacgtgggcgacgtgcggagcgtgacacagaagcatatccaggagtggggccctttcgacctggtgatcggcggcagcccttgcaatgacctgagcatcgtgaacccagcccggaagggcctgtacgagggaaccggcagactgttcttcgagttttacagactgctgcacgacgcccggcctaaggaaggcgacgaccggcccttcttttggctgttcgagaatgtggtggccatgggagtcagcgacaagcgggatattagccggttcctggagagcaaccccgtgatgatcgatgccaaggaagtgagcgccgcccaccgggccagatacttctggggcaatctgcctggcatgaacagacccctggccagcaccgtgaacgacaagctggagctgcaggagtgcctggagcacggccggatcgccaagttcagcaaggtgagaaccatcaccacccgaagcaacagcatcaaacaaggcaaggaccagcactttcctgtgttcatgaacgagaaggaggacatcctgtggtgtaccgagatggagagagtgttcgggttcccagtccactacacagatgtcagcaacatgtctagactggccagacagagactgctgggaagaagctggtccgtccctgtgatcagacacctgttcgcccctctgaaggagtacttcgcctgcgtgagcagcggcaacagcaacgccaacagccggggccccagcttctctagcggcctggtgccactgtccctgagagggagccacatgggccccatggagatctacaaaaccgtgagcgcctggaagcggcagcctgtgcgcgtgctgagcctgtttcggaatatcgataaagtcctgaaaagcctgggattcctggagagcggctctggctccggcggtggcaccctgaagtacgtggaggatgtgacaaacgtggtcagacgggatgtggagaagtggggccccttcgatctggtgtacggcagcacccaacccctgggcagctcttgtgaccggtgccctggctggtacatgtttcagttccaccggatcctgcagtacgccctgccgagacaggagtcccagcggccattcttttggattttcatggacaacttgctgctgaccgaggatgaccaggaaactaccactcggttcctgcagaccgaagccgtgaccctgcaggacgtgagaggccgggactaccagaacgccatgcgggtgtggtccaacatccctggactgaaaagcaagcacgcacctctgacccctaaagaagaggagtacctgcaggcccaggtgcggagcagaagcaagctggacgcccctaaggtggatctgctggtgaagaattgcctcctgcccctgagagagtacttcaagtatttcagccagaatagtctgcccctgggcggcccaagcagcggcgcccctcctcccagcggcggcagcccagccggctccccaacctctaccgaggagggcacctctgagtccgccacccccgagagcggccctggcacctccaccgagcccagcgagggcagcgcacccggcagccctgccggcagccccacctccacagaggagggaaccagcaccgagcccagcgaaggcagcgccccaggcaccagcaccgagcctagtgagggcggctctggcggcggcagcgcccaggagattaaacggatcaacaagatcagaagaagacttgtgaaagacagcaacaccaagaaggccggcaagacaggccccatgaaaaccctgctggttagagtgatgacacccgatctgagagagcggctggaaaacctgagaaagaagcctgaaaatatcccccagcccatcagcaatacatctagagccaacctgaataagctgctgaccgattacaccgaaatgaagaaggcgatcctgcatgtgtactgggaagagttccagaaggaccctgtgggcctgatgagccgggtggcccagcctgccagcaagaagatcgatcagaacaagctgaaacctgagatggacgagaagggcaacctgaccaccgccggctttgcctgctctcagtgtggccagcccctgttcgtgtacaagctggagcaggtgtctgagaagggcaaggcttacaccaactacttcggacggtgcaatgtggccgagcacgaaaagctgatcctgctggcccagctgaagcccgagaaggatagcgacgaagccgtgacatatagcctgggaaagtttgggcagagggccctggatttctacagcattcatgtgaccaaggagtccacccaccccgtgaagcccctggcccagatcgccggaaacagatacgcctccggacctgtgggaaaggccctgagcgacgcatgtatgggcacaatcgcctccttcctgtctaagtaccaggacatcatcatcgaacaccagaaggtggtgaagggcaaccagaagagactggagagcctgcgggagctggccggcaaggaaaacctggaataccctagcgtgaccctgccacctcagcctcacaccaaggagggcgttgatgcctacaacgaagtgatcgcccgggtgcgaatgtgggtgaacctgaacctgtggcagaagctgaagctaagcagagatgatgccaagcctctgctgagactgaagggattcccttcctttcctctggtcgagagacaggccaacgaagtggactggtgggacatggtgtgtaacgtgaagaagctgatcaacgagaaaaaggaggatggcaaggtgttttggcagaatctggctggctacaagagacaggaagccctgagaccatacctgagcagcgaggaagatcggaagaagggaaagaaattcgctcggtaccagctgggcgacctgctgctgcacctggaaaagaagcacggcgaggactggggaaaggtgtacgacgaggcctgggagcggattgacaagaaagtggaaggcctgagcaagcacatcaagctggaagaggaacggagaagcgaggacgcccagagcaaggccgccctgaccgactggctgcgggctaaggccagcttcgtgatcgagggcctgaaggaggccgacaaggacgagttctgcagatgcgagctgaagctgcagaagtggtacggggacctgcggggaaagcccttcgccatcgaagccgagaacagcatcctggacatcagcggcttcagcaagcagtacaactgtgccttcatctggcagaaggacggcgtgaagaagctgaacctgtacctgatcatcaactacttcaagggcggcaagctgcggttcaagaagatcaaacctgaagccttcgaagccaacagattctacaccgtgatcaacaaaaagagcggcgagatcgtgcccatggaggtgaacttcaacttcgacgaccccaacctgatcatcctgcctctggcctttggcaagagacagggcagagaattcatctggaacgacctgctgtccctggaaaccggcagcctgaagctggccaacggaagagtgatcgagaagacactgtacaacagaagaacccggcaggatgagcctgccctgttcgtggccctgaccttcgagcggcgggaggtcctggactcctccaatatcaaaccaatgaacctgatcggcgtggcaagaggcgaaaacatccccgccgtgatcgccctgaccgaccccgagggctgcccactgagccggtttaaggatagcctgggaaacccaacccacatcctgagaatcggcgagagctataaggagaagcagcggaccatccaggccaagaaggaggtggagcagcggagagccggcggctacagccggaagtacgccagcaaagccaagaatctggcagacgatatggtgagaaacaccgctagagatctgctgtactacgccgtgacccaggatgccatgctgatcttcgccaacctgagccggggcttcggccggcagggcaagcggaccttcatggccgagagacagtacacacggatggaggactggctgaccgccaagctggcctacgagggcctgagcaagacctacctgtccaagacactggcccagtacacctccaagacatgcagcaactgtgggtttaccatcaccagcgccgactacgacagggtgctggagaagctgaagaagacagcaacaggctggatgaccacaattaacggcaaggagctgaaggtggagggccagattacctactacaacagatacaagagacagaacgtagtcaaggacctgtccgtcgagctggatagactgagcgaagaatctgtgaacaacgacatctcctcctggacaaagggcagaagcggagaagctctgagcctcctgaagaaaagattctcccatagacccgtgcaggagaagttcgtgtgcctgaactgcggcttcgagacacacgcagccgagcaagccgccctgaacatcgccagatcctggctgttcctgcggagccaggagtacaagaaataccagacaaacaagacaaccggcaacaccgataagagagccttcgtcgagacctggcagtccttttaccggaagaagcttaaggaggtgtggaaacctgccgtgcggtctggcggatctggcggaggctccacaagcgccgtgacccagctgaccttcgaggacgtggccgtgtacttcaccagggaggagtggaggtgcctgacccccgcccagaggaccctgtacagggacgtgatgctggacacctacaggaacctggtgagcgtgggcgtgagcccccccagcatgagcgtgatcctgcccctggagttccaggaggagccctgggtggcccagagccacgtgaccaccctgggcggcctgaacggctgggagggcaccagccccaagaaaaagagaaaagtctaagctgccttctgcggggcttgccttctggccatgcccttcttctctcccttgcacctgtacctcttggtctttgaataaagcctgagtaggaaggctagcaaaaaaaaaaaaaaaaaaaaaaaaaaaaaaaaaaaaaaaaaaaaaaaaaaaaaaaaaaaaaaaaaaaaaaaaaaaaaaaa

SEQ ID NO: 3306 - RNA, 5419 nt, synthetic construct
  source 1..5419: mol_type = other RNA
aggaaataagagagaaaagaagagtaagaagaaatataagagccaccatggcccctaagaagaagcgtaaagtgagccgggtgaacggcagcggcagcggcggcggcatgaaccacgaccaggagttcgacccccctaaggtgtaccctcccgtccccgccgagaagagaaagcccatccgggtcctgagcctgttcgatggcatcgccaccggtctgctggtgctgaaggacctgggcatccaggtggataggtacattgcctccgaggtgtgcgaggactccatcaccgtgggaatggtgcgtcatcagggcaagatcatgtacgtgggcgacgtgcggagcgtgacacagaagcatatccaggagtggggccctttcgacctggtgatcggcggcagcccttgcaatgacctgagcatcgtgaacccagcccggaagggcctgtacgagggaaccggcagactgttcttcgagttttacagactgctgcacgacgcccggcctaaggaaggcgacgaccggcccttcttttggctgttcgagaatgtggtggccatgggagtcagcgacaagcgggatattagccggttcctggagagcaaccccgtgatgatcgatgccaaggaagtgagcgccgcccaccgggccagatacttctggggcaatctgcctggcatgaacagacccctggccagcaccgtgaacgacaagctggagctgcaggagtgcctggagcacggccggatcgccaagttcagcaaggtgagaaccatcaccacccgaagcaacagcatcaaacaaggcaaggaccagcactttcctgtgttcatgaacgagaaggaggacatcctgtggtgtaccgagatggagagagtgttcgggttcccagtccactacacagatgtcagcaacatgtctagactggccagacagagactgctgggaagaagctggtccgtccctgtgatcagacacctgttcgcccctctgaaggagtacttcgcctgcgtgagcagcggcaacagcaacgccaacagccggggccccagcttctctagcggcctggtgccactgtccctgagagggagccacatgggccccatggagatctacaaaaccgtgagcgcctggaagcggcagcctgtgcgcgtgctgagcctgtttcggaatatcgataaagtcctgaaaagcctgggattcctggagagcggctctggctccggcggtggcaccctgaagtacgtggaggatgtgacaaacgtggtcagacgggatgtggagaagtggggccccttcgatctggtgtacggcagcacccaacccctgggcagctcttgtgaccggtgccctggctggtacatgtttcagttccaccggatcctgcagtacgccctgccgagacaggagtcccagcggccattcttttggattttcatggacaacttgctgctgaccgaggatgaccaggaaactaccactcggttcctgcagaccgaagccgtgaccctgcaggacgtgagaggccgggactaccagaacgccatgcgggtgtggtccaacatccctggactgaaaagcaagcacgcacctctgacccctaaagaagaggagtacctgcaggcccaggtgcggagcagaagcaagctggacgcccctaaggtggatctgctggtgaagaattgcctcctgcccctgagagagtacttcaagtatttcagccagaatagtctgcccctgggcggcccaagcagcggcgcccctcctcccagcggcggcagcccagccggctccccaacctctaccgaggagggcacctctgagtccgccacccccgagagcggccctggcacctccaccgagcccagcgagggcagcgcacccggcagccctgccggcagccccacctccacagaggagggaaccagcaccgagcccagcgaaggcagcgccccaggcaccagcaccgagcctagtgagggcggctctggcggcggcagcgcccaggagattaaacggatcaacaagatcagaagaagacttgtgaaagacagcaacaccaagaaggccggcaagacaggccccatgaaaaccctgctggttagagtgatgacacccgatctgagagagcggctggaaaacctgagaaagaagcctgaaaatatcccccagcccatcagcaatacatctagagccaacctgaataagctgctgaccgattacaccgaaatgaagaaggcgatcctgcatgtgtactgggaagagttccagaaggaccctgtgggcctgatgagccgggtggcccagcctgccagcaagaagatcgatcagaacaagctgaaacctgagatggacgagaagggcaacctgaccaccgccggctttgcctgctctcagtgtggccagcccctgttcgtgtacaagctggagcaggtgtctgagaagggcaaggcttacaccaactacttcggacggtgcaatgtggccgagcacgaaaagctgatcctgctggcccagctgaagcccgagaaggatagcgacgaagccgtgacatatagcctgggaaagtttgggcagagggccctggatttctacagcattcatgtgaccaaggagtccacccaccccgtgaagcccctggcccagatcgccggaaacagatacgcctccggacctgtgggaaaggccctgagcgacgcatgtatgggcacaatcgcctccttcctgtctaagtaccaggacatcatcatcgaacaccagaaggtggtgaagggcaaccagaagagactggagagcctgcgggagctggccggcaaggaaaacctggaataccctagcgtgaccctgccacctcagcctcacaccaaggagggcgttgatgcctacaacgaagtgatcgcccgggtgcgaatgtgggtgaacctgaacctgtggcagaagctgaagctaagcagagatgatgccaagcctctgctgagactgaagggattcccttcctttcctctggtcgagagacaggccaacgaagtggactggtgggacatggtgtgtaacgtgaagaagctgatcaacgagaaaaaggaggatggcaaggtgttttggcagaatctggctggctacaagagacaggaagccctgagaccatacctgagcagcgaggaagatcggaagaagggaaagaaattcgctcggtaccagctgggcgacctgctgctgcacctggaaaagaagcacggcgaggactggggaaaggtgtacgacgaggcctgggagcggattgacaagaaagtggaaggcctgagcaagcacatcaagctggaagaggaacggagaagcgaggacgcccagagcaaggccgccctgaccgactggctgcgggctaaggccagcttcgtgatcgagggcctgaaggaggccgacaaggacgagttctgcagatgcgagctgaagctgcagaagtggtacggggacctgcggggaaagcccttcgccatcgaagccgagaacagcatcctggacatcagcggcttcagcaagcagtacaactgtgccttcatctggcagaaggacggcgtgaagaagctgaacctgtacctgatcatcaactacttcaagggcggcaagctgcggttcaagaagatcaaacctgaagccttcgaagccaacagattctacaccgtgatcaacaaaaagagcggcgagatcgtgcccatggaggtgaacttcaacttcgacgaccccaacctgatcatcctgcctctggcctttggcaagagacagggcagagaattcatctggaacgacctgctgtccctggaaaccggcagcctgaagctggccaacggaagagtgatcgagaagacactgtacaacagaagaacccggcaggatgagcctgccctgttcgtggccctgaccttcgagcggcgggaggtcctggactcctccaatatcaaaccaatgaacctgatcggcgtggcaagaggcgaaaacatccccgccgtgatcgccctgaccgaccccgagggctgcccactgagccggtttaaggatagcctgggaaacccaacccacatcctgagaatcggcgagagctataaggagaagcagcggaccatccaggccaagaaggaggtggagcagcggagagccggcggctacagccggaagtacgccagcaaagccaagaatctggcagacgatatggtgagaaacaccgctagagatctgctgtactacgccgtgacccaggatgccatgctgatcttcgccaacctgagccggggcttcggccggcagggcaagcggaccttcatggccgagagacagtacacacggatggaggactggctgaccgccaagctggcctacgagggcctgagcaagacctacctgtccaagacactggcccagtacacctccaagacatgcagcaactgtgggtttaccatcaccagcgccgactacgacagggtgctggagaagctgaagaagacagcaacaggctggatgaccacaattaacggcaaggagctgaaggtggagggccagattacctactacaacagatacaagagacagaacgtagtcaaggacctgtccgtcgagctggatagactgagcgaagaatctgtgaacaacgacatctcctcctggacaaagggcagaagcggagaagctctgagcctcctgaagaaaagattctcccatagacccgtgcaggagaagttcgtgtgcctgaactgcggcttcgagacacacgcagccgagcaagccgccctgaacatcgccagatcctggctgttcctgcggagccaggagtacaagaaataccagacaaacaagacaaccggcaacaccgataagagagccttcgtcgagacctggcagtccttttaccggaagaagcttaaggaggtgtggaaacctgccgtgcggtctggcggatctggcggaggctccacaagcgccctgaggagcgtgatgttcagcgacatcagcatcgacttcagccccgaggagtgggagtacctggacctggagcagaagaacctgtacagggacgtgatgctggagaactacagcaacctggtgagcctgggctgcttcatcagcaagcccgtggtgatcagcctgctggagcagggcaaggagccctggaaggtggtgaggaagaggaggcagtaccccgacctggagaccaagtacgagaccagccccaagaaaaagagaaaagtctaagctgccttctgcggggcttgccttctggccatgcccttcttctctcccttgcacctgtacctcttggtctttgaataaagcctgagtaggaaggctagcaaaaaaaaaaaaaaaaaaaaaaaaaaaaaaaaaaaaaaaaaaaaaaaaaaaaaaaaaaaaaaaaaaaaaaaaaaaaaaaa

SEQ ID NO: 3307 - RNA, 5419 nt, synthetic construct
  source 1..5419: mol_type = other RNA
aggaaataagagagaaaagaagagtaagaagaaatataagagccaccatggcccctaagaagaagcgtaaagtgagccgggtgaacggcagcggcagcggcggcggcatgaaccacgaccaggagttcgacccccctaaggtgtaccctcccgtccccgccgagaagagaaagcccatccgggtcctgagcctgttcgatggcatcgccaccggtctgctggtgctgaaggacctgggcatccaggtggataggtacattgcctccgaggtgtgcgaggactccatcaccgtgggaatggtgcgtcatcagggcaagatcatgtacgtgggcgacgtgcggagcgtgacacagaagcatatccaggagtggggccctttcgacctggtgatcggcggcagcccttgcaatgacctgagcatcgtgaacccagcccggaagggcctgtacgagggaaccggcagactgttcttcgagttttacagactgctgcacgacgcccggcctaaggaaggcgacgaccggcccttcttttggctgttcgagaatgtggtggccatgggagtcagcgacaagcgggatattagccggttcctggagagcaaccccgtgatgatcgatgccaaggaagtgagcgccgcccaccgggccagatacttctggggcaatctgcctggcatgaacagacccctggccagcaccgtgaacgacaagctggagctgcaggagtgcctggagcacggccggatcgccaagttcagcaaggtgagaaccatcaccacccgaagcaacagcatcaaacaaggcaaggaccagcactttcctgtgttcatgaacgagaaggaggacatcctgtggtgtaccgagatggagagagtgttcgggttcccagtccactacacagatgtcagcaacatgtctagactggccagacagagactgctgggaagaagctggtccgtccctgtgatcagacacctgttcgcccctctgaaggagtacttcgcctgcgtgagcagcggcaacagcaacgccaacagccggggccccagcttctctagcggcctggtgccactgtccctgagagggagccacatgggccccatggagatctacaaaaccgtgagcgcctggaagcggcagcctgtgcgcgtgctgagcctgtttcggaatatcgataaagtcctgaaaagcctgggattcctggagagcggctctggctccggcggtggcaccctgaagtacgtggaggatgtgacaaacgtggtcagacgggatgtggagaagtggggccccttcgatctggtgtacggcagcacccaacccctgggcagctcttgtgaccggtgccctggctggtacatgtttcagttccaccggatcctgcagtacgccctgccgagacaggagtcccagcggccattcttttggattttcatggacaacttgctgctgaccgaggatgaccaggaaactaccactcggttcctgcagaccgaagccgtgaccctgcaggacgtgagaggccgggactaccagaacgccatgcgggtgtggtccaacatccctggactgaaaagcaagcacgcacctctgacccctaaagaagaggagtacctgcaggcccaggtgcggagcagaagcaagctggacgcccctaaggtggatctgctggtgaagaattgcctcctgcccctgagagagtacttcaagtatttcagccagaatagtctgcccctgggcggcccaagcagcggcgcccctcctcccagcggcggcagcccagccggctccccaacctctaccgaggagggcacctctgagtccgccacccccgagagcggccctggcacctccaccgagcccagcgagggcagcgcacccggcagccctgccggcagccccacctccacagaggagggaaccagcaccgagcccagcgaaggcagcgccccaggcaccagcaccgagcctagtgagggcggctctggcggcggcagcgcccaggagattaaacggatcaacaagatcagaagaagacttgtgaaagacagcaacaccaagaaggccggcaagacaggccccatgaaaaccctgctggttagagtgatgacacccgatctgagagagcggctggaaaacctgagaaagaagcctgaaaatatcccccagcccatcagcaatacatctagagccaacctgaataagctgctgaccgattacaccgaaatgaagaaggcgatcctgcatgtgtactgggaagagttccagaaggaccctgtgggcctgatgagccgggtggcccagcctgccagcaagaagatcgatcagaacaagctgaaacctgagatggacgagaagggcaacctgaccaccgccggctttgcctgctctcagtgtggccagcccctgttcgtgtacaagctggagcaggtgtctgagaagggcaaggcttacaccaactacttcggacggtgcaatgtggccgagcacgaaaagctgatcctgctggcccagctgaagcccgagaaggatagcgacgaagccgtgacatatagcctgggaaagtttgggcagagggccctggatttctacagcattcatgtgaccaaggagtccacccaccccgtgaagcccctggcccagatcgccggaaacagatacgcctccggacctgtgggaaaggccctgagcgacgcatgtatgggcacaatcgcctccttcctgtctaagtaccaggacatcatcatcgaacaccagaaggtggtgaagggcaaccagaagagactggagagcctgcgggagctggccggcaaggaaaacctggaataccctagcgtgaccctgccacctcagcctcacaccaaggagggcgttgatgcctacaacgaagtgatcgcccgggtgcgaatgtgggtgaacctgaacctgtggcagaagctgaagctaagcagagatgatgccaagcctctgctgagactgaagggattcccttcctttcctctggtcgagagacaggccaacgaagtggactggtgggacatggtgtgtaacgtgaagaagctgatcaacgagaaaaaggaggatggcaaggtgttttggcagaatctggctggctacaagagacaggaagccctgagaccatacctgagcagcgaggaagatcggaagaagggaaagaaattcgctcggtaccagctgggcgacctgctgctgcacctggaaaagaagcacggcgaggactggggaaaggtgtacgacgaggcctgggagcggattgacaagaaagtggaaggcctgagcaagcacatcaagctggaagaggaacggagaagcgaggacgcccagagcaaggccgccctgaccgactggctgcgggctaaggccagcttcgtgatcgagggcctgaaggaggccgacaaggacgagttctgcagatgcgagctgaagctgcagaagtggtacggggacctgcggggaaagcccttcgccatcgaagccgagaacagcatcctggacatcagcggcttcagcaagcagtacaactgtgccttcatctggcagaaggacggcgtgaagaagctgaacctgtacctgatcatcaactacttcaagggcggcaagctgcggttcaagaagatcaaacctgaagccttcgaagccaacagattctacaccgtgatcaacaaaaagagcggcgagatcgtgcccatggaggtgaacttcaacttcgacgaccccaacctgatcatcctgcctctggcctttggcaagagacagggcagagaattcatctggaacgacctgctgtccctggaaaccggcagcctgaagctggccaacggaagagtgatcgagaagacactgtacaacagaagaacccggcaggatgagcctgccctgttcgtggccctgaccttcgagcggcgggaggtcctggactcctccaatatcaaaccaatgaacctgatcggcgtggcaagaggcgaaaacatccccgccgtgatcgccctgaccgaccccgagggctgcccactgagccggtttaaggatagcctgggaaacccaacccacatcctgagaatcggcgagagctataaggagaagcagcggaccatccaggccaagaaggaggtggagcagcggagagccggcggctacagccggaagtacgccagcaaagccaagaatctggcagacgatatggtgagaaacaccgctagagatctgctgtactacgccgtgacccaggatgccatgctgatcttcgccaacctgagccggggcttcggccggcagggcaagcggaccttcatggccgagagacagtacacacggatggaggactggctgaccgccaagctggcctacgagggcctgagcaagacctacctgtccaagacactggcccagtacacctccaagacatgcagcaactgtgggtttaccatcaccagcgccgactacgacagggtgctggagaagctgaagaagacagcaacaggctggatgaccacaattaacggcaaggagctgaaggtggagggccagattacctactacaacagatacaagagacagaacgtagtcaaggacctgtccgtcgagctggatagactgagcgaagaatctgtgaacaacgacatctcctcctggacaaagggcagaagcggagaagctctgagcctcctgaagaaaagattctcccatagacccgtgcaggagaagttcgtgtgcctgaactgcggcttcgagacacacgcagccgagcaagccgccctgaacatcgccagatcctggctgttcctgcggagccaggagtacaagaaataccagacaaacaagacaaccggcaacaccgataagagagccttcgtcgagacctggcagtccttttaccggaagaagcttaaggaggtgtggaaacctgccgtgcggtctggcggatctggcggaggctccacaagcgccgagatcaccctgatgaaccaggcccaggacagcaggagcatcctgttccaggagagcgtgaccttcgaggacgtggccgtgaacttcaccaacagggagtggcagtgcctgacctacgcccagaggcacctgtacaaggacgtgatgctggagaactacggcaacatggtgagcctgggcttccccttccccaagccccccctgatcagccacctggagagggaggtggacccctgcgtgaccagccccaagaaaaagagaaaagtctaagctgccttctgcggggcttgccttctggccatgcccttcttctctcccttgcacctgtacctcttggtctttgaataaagcctgagtaggaaggctagcaaaaaaaaaaaaaaaaaaaaaaaaaaaaaaaaaaaaaaaaaaaaaaaaaaaaaaaaaaaaaaaaaaaaaaaaaaaaaaaa

SEQ ID NO: 3308 - RNA, 5419 nt, synthetic construct
  source 1..5419: mol_type = other RNA
aggaaataagagagaaaagaagagtaagaagaaatataagagccaccatggcccctaagaagaagcgtaaagtgagccgggtgaacggcagcggcagcggcggcggcatgaaccacgaccaggagttcgacccccctaaggtgtaccctcccgtccccgccgagaagagaaagcccatccgggtcctgagcctgttcgatggcatcgccaccggtctgctggtgctgaaggacctgggcatccaggtggataggtacattgcctccgaggtgtgcgaggactccatcaccgtgggaatggtgcgtcatcagggcaagatcatgtacgtgggcgacgtgcggagcgtgacacagaagcatatccaggagtggggccctttcgacctggtgatcggcggcagcccttgcaatgacctgagcatcgtgaacccagcccggaagggcctgtacgagggaaccggcagactgttcttcgagttttacagactgctgcacgacgcccggcctaaggaaggcgacgaccggcccttcttttggctgttcgagaatgtggtggccatgggagtcagcgacaagcgggatattagccggttcctggagagcaaccccgtgatgatcgatgccaaggaagtgagcgccgcccaccgggccagatacttctggggcaatctgcctggcatgaacagacccctggccagcaccgtgaacgacaagctggagctgcaggagtgcctggagcacggccggatcgccaagttcagcaaggtgagaaccatcaccacccgaagcaacagcatcaaacaaggcaaggaccagcactttcctgtgttcatgaacgagaaggaggacatcctgtggtgtaccgagatggagagagtgttcgggttcccagtccactacacagatgtcagcaacatgtctagactggccagacagagactgctgggaagaagctggtccgtccctgtgatcagacacctgttcgcccctctgaaggagtacttcgcctgcgtgagcagcggcaacagcaacgccaacagccggggccccagcttctctagcggcctggtgccactgtccctgagagggagccacatgggccccatggagatctacaaaaccgtgagcgcctggaagcggcagcctgtgcgcgtgctgagcctgtttcggaatatcgataaagtcctgaaaagcctgggattcctggagagcggctctggctccggcggtggcaccctgaagtacgtggaggatgtgacaaacgtggtcagacgggatgtggagaagtggggccccttcgatctggtgtacggcagcacccaacccctgggcagctcttgtgaccggtgccctggctggtacatgtttcagttccaccggatcctgcagtacgccctgccgagacaggagtcccagcggccattcttttggattttcatggacaacttgctgctgaccgaggatgaccaggaaactaccactcggttcctgcagaccgaagccgtgaccctgcaggacgtgagaggccgggactaccagaacgccatgcgggtgtggtccaacatccctggactgaaaagcaagcacgcacctctgacccctaaagaagaggagtacctgcaggcccaggtgcggagcagaagcaagctggacgcccctaaggtggatctgctggtgaagaattgcctcctgcccctgagagagtacttcaagtatttcagccagaatagtctgcccctgggcggcccaagcagcggcgcccctcctcccagcggcggcagcccagccggctccccaacctctaccgaggagggcacctctgagtccgccacccccgagagcggccctggcacctccaccgagcccagcgagggcagcgcacccggcagccctgccggcagccccacctccacagaggagggaaccagcaccgagcccagcgaaggcagcgccccaggcaccagcaccgagcctagtgagggcggctctggcggcggcagcgcccaggagattaaacggatcaacaagatcagaagaagacttgtgaaagacagcaacaccaagaaggccggcaagacaggccccatgaaaaccctgctggttagagtgatgacacccgatctgagagagcggctggaaaacctgagaaagaagcctgaaaatatcccccagcccatcagcaatacatctagagccaacctgaataagctgctgaccgattacaccgaaatgaagaaggcgatcctgcatgtgtactgggaagagttccagaaggaccctgtgggcctgatgagccgggtggcccagcctgccagcaagaagatcgatcagaacaagctgaaacctgagatggacgagaagggcaacctgaccaccgccggctttgcctgctctcagtgtggccagcccctgttcgtgtacaagctggagcaggtgtctgagaagggcaaggcttacaccaactacttcggacggtgcaatgtggccgagcacgaaaagctgatcctgctggcccagctgaagcccgagaaggatagcgacgaagccgtgacatatagcctgggaaagtttgggcagagggccctggatttctacagcattcatgtgaccaaggagtccacccaccccgtgaagcccctggcccagatcgccggaaacagatacgcctccggacctgtgggaaaggccctgagcgacgcatgtatgggcacaatcgcctccttcctgtctaagtaccaggacatcatcatcgaacaccagaaggtggtgaagggcaaccagaagagactggagagcctgcgggagctggccggcaaggaaaacctggaataccctagcgtgaccctgccacctcagcctcacaccaaggagggcgttgatgcctacaacgaagtgatcgcccgggtgcgaatgtgggtgaacctgaacctgtggcagaagctgaagctaagcagagatgatgccaagcctctgctgagactgaagggattcccttcctttcctctggtcgagagacaggccaacgaagtggactggtgggacatggtgtgtaacgtgaagaagctgatcaacgagaaaaaggaggatggcaaggtgttttggcagaatctggctggctacaagagacaggaagccctgagaccatacctgagcagcgaggaagatcggaagaagggaaagaaattcgctcggtaccagctgggcgacctgctgctgcacctggaaaagaagcacggcgaggactggggaaaggtgtacgacgaggcctgggagcggattgacaagaaagtggaaggcctgagcaagcacatcaagctggaagaggaacggagaagcgaggacgcccagagcaaggccgccctgaccgactggctgcgggctaaggccagcttcgtgatcgagggcctgaaggaggccgacaaggacgagttctgcagatgcgagctgaagctgcagaagtggtacggggacctgcggggaaagcccttcgccatcgaagccgagaacagcatcctggacatcagcggcttcagcaagcagtacaactgtgccttcatctggcagaaggacggcgtgaagaagctgaacctgtacctgatcatcaactacttcaagggcggcaagctgcggttcaagaagatcaaacctgaagccttcgaagccaacagattctacaccgtgatcaacaaaaagagcggcgagatcgtgcccatggaggtgaacttcaacttcgacgaccccaacctgatcatcctgcctctggcctttggcaagagacagggcagagaattcatctggaacgacctgctgtccctggaaaccggcagcctgaagctggccaacggaagagtgatcgagaagacactgtacaacagaagaacccggcaggatgagcctgccctgttcgtggccctgaccttcgagcggcgggaggtcctggactcctccaatatcaaaccaatgaacctgatcggcgtggcaagaggcgaaaacatccccgccgtgatcgccctgaccgaccccgagggctgcccactgagccggtttaaggatagcctgggaaacccaacccacatcctgagaatcggcgagagctataaggagaagcagcggaccatccaggccaagaaggaggtggagcagcggagagccggcggctacagccggaagtacgccagcaaagccaagaatctggcagacgatatggtgagaaacaccgctagagatctgctgtactacgccgtgacccaggatgccatgctgatcttcgccaacctgagccggggcttcggccggcagggcaagcggaccttcatggccgagagacagtacacacggatggaggactggctgaccgccaagctggcctacgagggcctgagcaagacctacctgtccaagacactggcccagtacacctccaagacatgcagcaactgtgggtttaccatcaccagcgccgactacgacagggtgctggagaagctgaagaagacagcaacaggctggatgaccacaattaacggcaaggagctgaaggtggagggccagattacctactacaacagatacaagagacagaacgtagtcaaggacctgtccgtcgagctggatagactgagcgaagaatctgtgaacaacgacatctcctcctggacaaagggcagaagcggagaagctctgagcctcctgaagaaaagattctcccatagacccgtgcaggagaagttcgtgtgcctgaactgcggcttcgagacacacgcagccgagcaagccgccctgaacatcgccagatcctggctgttcctgcggagccaggagtacaagaaataccagacaaacaagacaaccggcaacaccgataagagagccttcgtcgagacctggcagtccttttaccggaagaagcttaaggaggtgtggaaacctgccgtgcggtctggcggatctggcggaggctccacaagcaggcccagggccgtgaagttcgccgacgtggccgtgtacttcagcaccgaggagtggggctgcctgaggcccgcccagagggccctgtacagggacgtgatgagggagacctacggccacctgggcgccctgggctgcgccggccccaagcccgccctgatcagctggctggagaggaacaccgacgactgggagcccgccgccctggacccccaggagtgccccaggggcgtggccgtgcagaccagccccaagaaaaagagaaaagtctaagctgccttctgcggggcttgccttctggccatgcccttcttctctcccttgcacctgtacctcttggtctttgaataaagcctgagtaggaaggctagcaaaaaaaaaaaaaaaaaaaaaaaaaaaaaaaaaaaaaaaaaaaaaaaaaaaaaaaaaaaaaaaaaaaaaaaaaaaaaaaa

SEQ ID NO: 3309 - RNA, 5419 nt, synthetic construct
  source 1..5419: mol_type = other RNA
aggaaataagagagaaaagaagagtaagaagaaatataagagccaccatggcccctaagaagaagcgtaaagtgagccgggtgaacggcagcggcagcggcggcggcatgaaccacgaccaggagttcgacccccctaaggtgtaccctcccgtccccgccgagaagagaaagcccatccgggtcctgagcctgttcgatggcatcgccaccggtctgctggtgctgaaggacctgggcatccaggtggataggtacattgcctccgaggtgtgcgaggactccatcaccgtgggaatggtgcgtcatcagggcaagatcatgtacgtgggcgacgtgcggagcgtgacacagaagcatatccaggagtggggccctttcgacctggtgatcggcggcagcccttgcaatgacctgagcatcgtgaacccagcccggaagggcctgtacgagggaaccggcagactgttcttcgagttttacagactgctgcacgacgcccggcctaaggaaggcgacgaccggcccttcttttggctgttcgagaatgtggtggccatgggagtcagcgacaagcgggatattagccggttcctggagagcaaccccgtgatgatcgatgccaaggaagtgagcgccgcccaccgggccagatacttctggggcaatctgcctggcatgaacagacccctggccagcaccgtgaacgacaagctggagctgcaggagtgcctggagcacggccggatcgccaagttcagcaaggtgagaaccatcaccacccgaagcaacagcatcaaacaaggcaaggaccagcactttcctgtgttcatgaacgagaaggaggacatcctgtggtgtaccgagatggagagagtgttcgggttcccagtccactacacagatgtcagcaacatgtctagactggccagacagagactgctgggaagaagctggtccgtccctgtgatcagacacctgttcgcccctctgaaggagtacttcgcctgcgtgagcagcggcaacagcaacgccaacagccggggccccagcttctctagcggcctggtgccactgtccctgagagggagccacatgggccccatggagatctacaaaaccgtgagcgcctggaagcggcagcctgtgcgcgtgctgagcctgtttcggaatatcgataaagtcctgaaaagcctgggattcctggagagcggctctggctccggcggtggcaccctgaagtacgtggaggatgtgacaaacgtggtcagacgggatgtggagaagtggggccccttcgatctggtgtacggcagcacccaacccctgggcagctcttgtgaccggtgccctggctggtacatgtttcagttccaccggatcctgcagtacgccctgccgagacaggagtcccagcggccattcttttggattttcatggacaacttgctgctgaccgaggatgaccaggaaactaccactcggttcctgcagaccgaagccgtgaccctgcaggacgtgagaggccgggactaccagaacgccatgcgggtgtggtccaacatccctggactgaaaagcaagcacgcacctctgacccctaaagaagaggagtacctgcaggcccaggtgcggagcagaagcaagctggacgcccctaaggtggatctgctggtgaagaattgcctcctgcccctgagagagtacttcaagtatttcagccagaatagtctgcccctgggcggcccaagcagcggcgcccctcctcccagcggcggcagcccagccggctccccaacctctaccgaggagggcacctctgagtccgccacccccgagagcggccctggcacctccaccgagcccagcgagggcagcgcacccggcagccctgccggcagccccacctccacagaggagggaaccagcaccgagcccagcgaaggcagcgccccaggcaccagcaccgagcctagtgagggcggctctggcggcggcagcgcccaggagattaaacggatcaacaagatcagaagaagacttgtgaaagacagcaacaccaagaaggccggcaagacaggccccatgaaaaccctgctggttagagtgatgacacccgatctgagagagcggctggaaaacctgagaaagaagcctgaaaatatcccccagcccatcagcaatacatctagagccaacctgaataagctgctgaccgattacaccgaaatgaagaaggcgatcctgcatgtgtactgggaagagttccagaaggaccctgtgggcctgatgagccgggtggcccagcctgccagcaagaagatcgatcagaacaagctgaaacctgagatggacgagaagggcaacctgaccaccgccggctttgcctgctctcagtgtggccagcccctgttcgtgtacaagctggagcaggtgtctgagaagggcaaggcttacaccaactacttcggacggtgcaatgtggccgagcacgaaaagctgatcctgctggcccagctgaagcccgagaaggatagcgacgaagccgtgacatatagcctgggaaagtttgggcagagggccctggatttctacagcattcatgtgaccaaggagtccacccaccccgtgaagcccctggcccagatcgccggaaacagatacgcctccggacctgtgggaaaggccctgagcgacgcatgtatgggcacaatcgcctccttcctgtctaagtaccaggacatcatcatcgaacaccagaaggtggtgaagggcaaccagaagagactggagagcctgcgggagctggccggcaaggaaaacctggaataccctagcgtgaccctgccacctcagcctcacaccaaggagggcgttgatgcctacaacgaagtgatcgcccgggtgcgaatgtgggtgaacctgaacctgtggcagaagctgaagctaagcagagatgatgccaagcctctgctgagactgaagggattcccttcctttcctctggtcgagagacaggccaacgaagtggactggtgggacatggtgtgtaacgtgaagaagctgatcaacgagaaaaaggaggatggcaaggtgttttggcagaatctggctggctacaagagacaggaagccctgagaccatacctgagcagcgaggaagatcggaagaagggaaagaaattcgctcggtaccagctgggcgacctgctgctgcacctggaaaagaagcacggcgaggactggggaaaggtgtacgacgaggcctgggagcggattgacaagaaagtggaaggcctgagcaagcacatcaagctggaagaggaacggagaagcgaggacgcccagagcaaggccgccctgaccgactggctgcgggctaaggccagcttcgtgatcgagggcctgaaggaggccgacaaggacgagttctgcagatgcgagctgaagctgcagaagtggtacggggacctgcggggaaagcccttcgccatcgaagccgagaacagcatcctggacatcagcggcttcagcaagcagtacaactgtgccttcatctggcagaaggacggcgtgaagaagctgaacctgtacctgatcatcaactacttcaagggcggcaagctgcggttcaagaagatcaaacctgaagccttcgaagccaacagattctacaccgtgatcaacaaaaagagcggcgagatcgtgcccatggaggtgaacttcaacttcgacgaccccaacctgatcatcctgcctctggcctttggcaagagacagggcagagaattcatctggaacgacctgctgtccctggaaaccggcagcctgaagctggccaacggaagagtgatcgagaagacactgtacaacagaagaacccggcaggatgagcctgccctgttcgtggccctgaccttcgagcggcgggaggtcctggactcctccaatatcaaaccaatgaacctgatcggcgtggcaagaggcgaaaacatccccgccgtgatcgccctgaccgaccccgagggctgcccactgagccggtttaaggatagcctgggaaacccaacccacatcctgagaatcggcgagagctataaggagaagcagcggaccatccaggccaagaaggaggtggagcagcggagagccggcggctacagccggaagtacgccagcaaagccaagaatctggcagacgatatggtgagaaacaccgctagagatctgctgtactacgccgtgacccaggatgccatgctgatcttcgccaacctgagccggggcttcggccggcagggcaagcggaccttcatggccgagagacagtacacacggatggaggactggctgaccgccaagctggcctacgagggcctgagcaagacctacctgtccaagacactggcccagtacacctccaagacatgcagcaactgtgggtttaccatcaccagcgccgactacgacagggtgctggagaagctgaagaagacagcaacaggctggatgaccacaattaacggcaaggagctgaaggtggagggccagattacctactacaacagatacaagagacagaacgtagtcaaggacctgtccgtcgagctggatagactgagcgaagaatctgtgaacaacgacatctcctcctggacaaagggcagaagcggagaagctctgagcctcctgaagaaaagattctcccatagacccgtgcaggagaagttcgtgtgcctgaactgcggcttcgagacacacgcagccgagcaagccgccctgaacatcgccagatcctggctgttcctgcggagccaggagtacaagaaataccagacaaacaagacaaccggcaacaccgataagagagccttcgtcgagacctggcagtccttttaccggaagaagcttaaggaggtgtggaaacctgccgtgcggtctggcggatctggcggaggctccacaagcggccaggagagcgtgagcttcaaggacgtgaccgtggacttcacctgggacgagtggctgcagctgaccggcatgcagaggaccctgtacagggacgtgatgctggagaactacagccacctggtgagcgtgggctgctgcatcaccaagcccgaggtgatcttcaagctggagcagggcgaggagccctggcccagggagggcgagctgcccggcaggagggaccccgacaggagccaggagaccagccccaagaaaaagagaaaagtctaagctgccttctgcggggcttgccttctggccatgcccttcttctctcccttgcacctgtacctcttggtctttgaataaagcctgagtaggaaggctagcaaaaaaaaaaaaaaaaaaaaaaaaaaaaaaaaaaaaaaaaaaaaaaaaaaaaaaaaaaaaaaaaaaaaaaaaaaaaaaaa

SEQ ID NO: 3310 - RNA, 5419 nt, synthetic construct
  source 1..5419: mol_type = other RNA
aggaaataagagagaaaagaagagtaagaagaaatataagagccaccatggcccctaagaagaagcgtaaagtgagccgggtgaacggcagcggcagcggcggcggcatgaaccacgaccaggagttcgacccccctaaggtgtaccctcccgtccccgccgagaagagaaagcccatccgggtcctgagcctgttcgatggcatcgccaccggtctgctggtgctgaaggacctgggcatccaggtggataggtacattgcctccgaggtgtgcgaggactccatcaccgtgggaatggtgcgtcatcagggcaagatcatgtacgtgggcgacgtgcggagcgtgacacagaagcatatccaggagtggggccctttcgacctggtgatcggcggcagcccttgcaatgacctgagcatcgtgaacccagcccggaagggcctgtacgagggaaccggcagactgttcttcgagttttacagactgctgcacgacgcccggcctaaggaaggcgacgaccggcccttcttttggctgttcgagaatgtggtggccatgggagtcagcgacaagcgggatattagccggttcctggagagcaaccccgtgatgatcgatgccaaggaagtgagcgccgcccaccgggccagatacttctggggcaatctgcctggcatgaacagacccctggccagcaccgtgaacgacaagctggagctgcaggagtgcctggagcacggccggatcgccaagttcagcaaggtgagaaccatcaccacccgaagcaacagcatcaaacaaggcaaggaccagcactttcctgtgttcatgaacgagaaggaggacatcctgtggtgtaccgagatggagagagtgttcgggttcccagtccactacacagatgtcagcaacatgtctagactggccagacagagactgctgggaagaagctggtccgtccctgtgatcagacacctgttcgcccctctgaaggagtacttcgcctgcgtgagcagcggcaacagcaacgccaacagccggggccccagcttctctagcggcctggtgccactgtccctgagagggagccacatgggccccatggagatctacaaaaccgtgagcgcctggaagcggcagcctgtgcgcgtgctgagcctgtttcggaatatcgataaagtcctgaaaagcctgggattcctggagagcggctctggctccggcggtggcaccctgaagtacgtggaggatgtgacaaacgtggtcagacgggatgtggagaagtggggccccttcgatctggtgtacggcagcacccaacccctgggcagctcttgtgaccggtgccctggctggtacatgtttcagttccaccggatcctgcagtacgccctgccgagacaggagtcccagcggccattcttttggattttcatggacaacttgctgctgaccgaggatgaccaggaaactaccactcggttcctgcagaccgaagccgtgaccctgcaggacgtgagaggccgggactaccagaacgccatgcgggtgtggtccaacatccctggactgaaaagcaagcacgcacctctgacccctaaagaagaggagtacctgcaggcccaggtgcggagcagaagcaagctggacgcccctaaggtggatctgctggtgaagaattgcctcctgcccctgagagagtacttcaagtatttcagccagaatagtctgcccctgggcggcccaagcagcggcgcccctcctcccagcggcggcagcccagccggctccccaacctctaccgaggagggcacctctgagtccgccacccccgagagcggccctggcacctccaccgagcccagcgagggcagcgcacccggcagccctgccggcagccccacctccacagaggagggaaccagcaccgagcccagcgaaggcagcgccccaggcaccagcaccgagcctagtgagggcggctctggcggcggcagcgcccaggagattaaacggatcaacaagatcagaagaagacttgtgaaagacagcaacaccaagaaggccggcaagacaggccccatgaaaaccctgctggttagagtgatgacacccgatctgagagagcggctggaaaacctgagaaagaagcctgaaaatatcccccagcccatcagcaatacatctagagccaacctgaataagctgctgaccgattacaccgaaatgaagaaggcgatcctgcatgtgtactgggaagagttccagaaggaccctgtgggcctgatgagccgggtggcccagcctgccagcaagaagatcgatcagaacaagctgaaacctgagatggacgagaagggcaacctgaccaccgccggctttgcctgctctcagtgtggccagcccctgttcgtgtacaagctggagcaggtgtctgagaagggcaaggcttacaccaactacttcggacggtgcaatgtggccgagcacgaaaagctgatcctgctggcccagctgaagcccgagaaggatagcgacgaagccgtgacatatagcctgggaaagtttgggcagagggccctggatttctacagcattcatgtgaccaaggagtccacccaccccgtgaagcccctggcccagatcgccggaaacagatacgcctccggacctgtgggaaaggccctgagcgacgcatgtatgggcacaatcgcctccttcctgtctaagtaccaggacatcatcatcgaacaccagaaggtggtgaagggcaaccagaagagactggagagcctgcgggagctggccggcaaggaaaacctggaataccctagcgtgaccctgccacctcagcctcacaccaaggagggcgttgatgcctacaacgaagtgatcgcccgggtgcgaatgtgggtgaacctgaacctgtggcagaagctgaagctaagcagagatgatgccaagcctctgctgagactgaagggattcccttcctttcctctggtcgagagacaggccaacgaagtggactggtgggacatggtgtgtaacgtgaagaagctgatcaacgagaaaaaggaggatggcaaggtgttttggcagaatctggctggctacaagagacaggaagccctgagaccatacctgagcagcgaggaagatcggaagaagggaaagaaattcgctcggtaccagctgggcgacctgctgctgcacctggaaaagaagcacggcgaggactggggaaaggtgtacgacgaggcctgggagcggattgacaagaaagtggaaggcctgagcaagcacatcaagctggaagaggaacggagaagcgaggacgcccagagcaaggccgccctgaccgactggctgcgggctaaggccagcttcgtgatcgagggcctgaaggaggccgacaaggacgagttctgcagatgcgagctgaagctgcagaagtggtacggggacctgcggggaaagcccttcgccatcgaagccgagaacagcatcctggacatcagcggcttcagcaagcagtacaactgtgccttcatctggcagaaggacggcgtgaagaagctgaacctgtacctgatcatcaactacttcaagggcggcaagctgcggttcaagaagatcaaacctgaagccttcgaagccaacagattctacaccgtgatcaacaaaaagagcggcgagatcgtgcccatggaggtgaacttcaacttcgacgaccccaacctgatcatcctgcctctggcctttggcaagagacagggcagagaattcatctggaacgacctgctgtccctggaaaccggcagcctgaagctggccaacggaagagtgatcgagaagacactgtacaacagaagaacccggcaggatgagcctgccctgttcgtggccctgaccttcgagcggcgggaggtcctggactcctccaatatcaaaccaatgaacctgatcggcgtggcaagaggcgaaaacatccccgccgtgatcgccctgaccgaccccgagggctgcccactgagccggtttaaggatagcctgggaaacccaacccacatcctgagaatcggcgagagctataaggagaagcagcggaccatccaggccaagaaggaggtggagcagcggagagccggcggctacagccggaagtacgccagcaaagccaagaatctggcagacgatatggtgagaaacaccgctagagatctgctgtactacgccgtgacccaggatgccatgctgatcttcgccaacctgagccggggcttcggccggcagggcaagcggaccttcatggccgagagacagtacacacggatggaggactggctgaccgccaagctggcctacgagggcctgagcaagacctacctgtccaagacactggcccagtacacctccaagacatgcagcaactgtgggtttaccatcaccagcgccgactacgacagggtgctggagaagctgaagaagacagcaacaggctggatgaccacaattaacggcaaggagctgaaggtggagggccagattacctactacaacagatacaagagacagaacgtagtcaaggacctgtccgtcgagctggatagactgagcgaagaatctgtgaacaacgacatctcctcctggacaaagggcagaagcggagaagctctgagcctcctgaagaaaagattctcccatagacccgtgcaggagaagttcgtgtgcctgaactgcggcttcgagacacacgcagccgagcaagccgccctgaacatcgccagatcctggctgttcctgcggagccaggagtacaagaaataccagacaaacaagacaaccggcaacaccgataagagagccttcgtcgagacctggcagtccttttaccggaagaagcttaaggaggtgtggaaacctgccgtgcggtctggcggatctggcggaggctccacaagccaggacgccgtgaccttcaaggacgtggccatctacttcagccccgaggagtgggtgaggctgagcgccggccagagggagctgtaccaggaggtgatgctggacaactacgagctggtgaccagcctggacagggagtgcaagctgctgtacaagatggaccccgaggaggagccctgcgagggcgtgccctgcaggggcgtggacagcggcgccctggacaacagcagcaccagcgcctgcaccagccccaagaaaaagagaaaagtctaagctgccttctgcggggcttgccttctggccatgcccttcttctctcccttgcacctgtacctcttggtctttgaataaagcctgagtaggaaggctagcaaaaaaaaaaaaaaaaaaaaaaaaaaaaaaaaaaaaaaaaaaaaaaaaaaaaaaaaaaaaaaaaaaaaaaaaaaaaaaaa

SEQ ID NO: 3311 - RNA, 5419 nt, synthetic construct
  source 1..5419: mol_type = other RNA
aggaaataagagagaaaagaagagtaagaagaaatataagagccaccatggcccctaagaagaagcgtaaagtgagccgggtgaacggcagcggcagcggcggcggcatgaaccacgaccaggagttcgacccccctaaggtgtaccctcccgtccccgccgagaagagaaagcccatccgggtcctgagcctgttcgatggcatcgccaccggtctgctggtgctgaaggacctgggcatccaggtggataggtacattgcctccgaggtgtgcgaggactccatcaccgtgggaatggtgcgtcatcagggcaagatcatgtacgtgggcgacgtgcggagcgtgacacagaagcatatccaggagtggggccctttcgacctggtgatcggcggcagcccttgcaatgacctgagcatcgtgaacccagcccggaagggcctgtacgagggaaccggcagactgttcttcgagttttacagactgctgcacgacgcccggcctaaggaaggcgacgaccggcccttcttttggctgttcgagaatgtggtggccatgggagtcagcgacaagcgggatattagccggttcctggagagcaaccccgtgatgatcgatgccaaggaagtgagcgccgcccaccgggccagatacttctggggcaatctgcctggcatgaacagacccctggccagcaccgtgaacgacaagctggagctgcaggagtgcctggagcacggccggatcgccaagttcagcaaggtgagaaccatcaccacccgaagcaacagcatcaaacaaggcaaggaccagcactttcctgtgttcatgaacgagaaggaggacatcctgtggtgtaccgagatggagagagtgttcgggttcccagtccactacacagatgtcagcaacatgtctagactggccagacagagactgctgggaagaagctggtccgtccctgtgatcagacacctgttcgcccctctgaaggagtacttcgcctgcgtgagcagcggcaacagcaacgccaacagccggggccccagcttctctagcggcctggtgccactgtccctgagagggagccacatgggccccatggagatctacaaaaccgtgagcgcctggaagcggcagcctgtgcgcgtgctgagcctgtttcggaatatcgataaagtcctgaaaagcctgggattcctggagagcggctctggctccggcggtggcaccctgaagtacgtggaggatgtgacaaacgtggtcagacgggatgtggagaagtggggccccttcgatctggtgtacggcagcacccaacccctgggcagctcttgtgaccggtgccctggctggtacatgtttcagttccaccggatcctgcagtacgccctgccgagacaggagtcccagcggccattcttttggattttcatggacaacttgctgctgaccgaggatgaccaggaaactaccactcggttcctgcagaccgaagccgtgaccctgcaggacgtgagaggccgggactaccagaacgccatgcgggtgtggtccaacatccctggactgaaaagcaagcacgcacctctgacccctaaagaagaggagtacctgcaggcccaggtgcggagcagaagcaagctggacgcccctaaggtggatctgctggtgaagaattgcctcctgcccctgagagagtacttcaagtatttcagccagaatagtctgcccctgggcggcccaagcagcggcgcccctcctcccagcggcggcagcccagccggctccccaacctctaccgaggagggcacctctgagtccgccacccccgagagcggccctggcacctccaccgagcccagcgagggcagcgcacccggcagccctgccggcagccccacctccacagaggagggaaccagcaccgagcccagcgaaggcagcgccccaggcaccagcaccgagcctagtgagggcggctctggcggcggcagcgcccaggagattaaacggatcaacaagatcagaagaagacttgtgaaagacagcaacaccaagaaggccggcaagacaggccccatgaaaaccctgctggttagagtgatgacacccgatctgagagagcggctggaaaacctgagaaagaagcctgaaaatatcccccagcccatcagcaatacatctagagccaacctgaataagctgctgaccgattacaccgaaatgaagaaggcgatcctgcatgtgtactgggaagagttccagaaggaccctgtgggcctgatgagccgggtggcccagcctgccagcaagaagatcgatcagaacaagctgaaacctgagatggacgagaagggcaacctgaccaccgccggctttgcctgctctcagtgtggccagcccctgttcgtgtacaagctggagcaggtgtctgagaagggcaaggcttacaccaactacttcggacggtgcaatgtggccgagcacgaaaagctgatcctgctggcccagctgaagcccgagaaggatagcgacgaagccgtgacatatagcctgggaaagtttgggcagagggccctggatttctacagcattcatgtgaccaaggagtccacccaccccgtgaagcccctggcccagatcgccggaaacagatacgcctccggacctgtgggaaaggccctgagcgacgcatgtatgggcacaatcgcctccttcctgtctaagtaccaggacatcatcatcgaacaccagaaggtggtgaagggcaaccagaagagactggagagcctgcgggagctggccggcaaggaaaacctggaataccctagcgtgaccctgccacctcagcctcacaccaaggagggcgttgatgcctacaacgaagtgatcgcccgggtgcgaatgtgggtgaacctgaacctgtggcagaagctgaagctaagcagagatgatgccaagcctctgctgagactgaagggattcccttcctttcctctggtcgagagacaggccaacgaagtggactggtgggacatggtgtgtaacgtgaagaagctgatcaacgagaaaaaggaggatggcaaggtgttttggcagaatctggctggctacaagagacaggaagccctgagaccatacctgagcagcgaggaagatcggaagaagggaaagaaattcgctcggtaccagctgggcgacctgctgctgcacctggaaaagaagcacggcgaggactggggaaaggtgtacgacgaggcctgggagcggattgacaagaaagtggaaggcctgagcaagcacatcaagctggaagaggaacggagaagcgaggacgcccagagcaaggccgccctgaccgactggctgcgggctaaggccagcttcgtgatcgagggcctgaaggaggccgacaaggacgagttctgcagatgcgagctgaagctgcagaagtggtacggggacctgcggggaaagcccttcgccatcgaagccgagaacagcatcctggacatcagcggcttcagcaagcagtacaactgtgccttcatctggcagaaggacggcgtgaagaagctgaacctgtacctgatcatcaactacttcaagggcggcaagctgcggttcaagaagatcaaacctgaagccttcgaagccaacagattctacaccgtgatcaacaaaaagagcggcgagatcgtgcccatggaggtgaacttcaacttcgacgaccccaacctgatcatcctgcctctggcctttggcaagagacagggcagagaattcatctggaacgacctgctgtccctggaaaccggcagcctgaagctggccaacggaagagtgatcgagaagacactgtacaacagaagaacccggcaggatgagcctgccctgttcgtggccctgaccttcgagcggcgggaggtcctggactcctccaatatcaaaccaatgaacctgatcggcgtggcaagaggcgaaaacatccccgccgtgatcgccctgaccgaccccgagggctgcccactgagccggtttaaggatagcctgggaaacccaacccacatcctgagaatcggcgagagctataaggagaagcagcggaccatccaggccaagaaggaggtggagcagcggagagccggcggctacagccggaagtacgccagcaaagccaagaatctggcagacgatatggtgagaaacaccgctagagatctgctgtactacgccgtgacccaggatgccatgctgatcttcgccaacctgagccggggcttcggccggcagggcaagcggaccttcatggccgagagacagtacacacggatggaggactggctgaccgccaagctggcctacgagggcctgagcaagacctacctgtccaagacactggcccagtacacctccaagacatgcagcaactgtgggtttaccatcaccagcgccgactacgacagggtgctggagaagctgaagaagacagcaacaggctggatgaccacaattaacggcaaggagctgaaggtggagggccagattacctactacaacagatacaagagacagaacgtagtcaaggacctgtccgtcgagctggatagactgagcgaagaatctgtgaacaacgacatctcctcctggacaaagggcagaagcggagaagctctgagcctcctgaagaaaagattctcccatagacccgtgcaggagaagttcgtgtgcctgaactgcggcttcgagacacacgcagccgagcaagccgccctgaacatcgccagatcctggctgttcctgcggagccaggagtacaagaaataccagacaaacaagacaaccggcaacaccgataagagagccttcgtcgagacctggcagtccttttaccggaagaagcttaaggaggtgtggaaacctgccgtgcggtctggcggatctggcggaggctccacaagcatggacagcgtggccttcgaggacgtggccgtgaacttcacccaggaggagtggagcctgctggaccccagccagaagaacctgtacagggaggtgatgcaggagaccctgaggaacctggccagcatcggcgagaagtggaaggaccagtacatcgaggaccagtacaagaaccccaggaacaacctgaggagcctgctgggcgagagggtggacgagaacaccgaggagaaccactgcggcaccagccccaagaaaaagagaaaagtctaagctgccttctgcggggcttgccttctggccatgcccttcttctctcccttgcacctgtacctcttggtctttgaataaagcctgagtaggaaggctagcaaaaaaaaaaaaaaaaaaaaaaaaaaaaaaaaaaaaaaaaaaaaaaaaaaaaaaaaaaaaaaaaaaaaaaaaaaaaaaaa

SEQ ID NO: 3312 - RNA, 5419 nt, synthetic construct
  source 1..5419: mol_type = other RNA
aggaaataagagagaaaagaagagtaagaagaaatataagagccaccatggcccctaagaagaagcgtaaagtgagccgggtgaacggcagcggcagcggcggcggcatgaaccacgaccaggagttcgacccccctaaggtgtaccctcccgtccccgccgagaagagaaagcccatccgggtcctgagcctgttcgatggcatcgccaccggtctgctggtgctgaaggacctgggcatccaggtggataggtacattgcctccgaggtgtgcgaggactccatcaccgtgggaatggtgcgtcatcagggcaagatcatgtacgtgggcgacgtgcggagcgtgacacagaagcatatccaggagtggggccctttcgacctggtgatcggcggcagcccttgcaatgacctgagcatcgtgaacccagcccggaagggcctgtacgagggaaccggcagactgttcttcgagttttacagactgctgcacgacgcccggcctaaggaaggcgacgaccggcccttcttttggctgttcgagaatgtggtggccatgggagtcagcgacaagcgggatattagccggttcctggagagcaaccccgtgatgatcgatgccaaggaagtgagcgccgcccaccgggccagatacttctggggcaatctgcctggcatgaacagacccctggccagcaccgtgaacgacaagctggagctgcaggagtgcctggagcacggccggatcgccaagttcagcaaggtgagaaccatcaccacccgaagcaacagcatcaaacaaggcaaggaccagcactttcctgtgttcatgaacgagaaggaggacatcctgtggtgtaccgagatggagagagtgttcgggttcccagtccactacacagatgtcagcaacatgtctagactggccagacagagactgctgggaagaagctggtccgtccctgtgatcagacacctgttcgcccctctgaaggagtacttcgcctgcgtgagcagcggcaacagcaacgccaacagccggggccccagcttctctagcggcctggtgccactgtccctgagagggagccacatgggccccatggagatctacaaaaccgtgagcgcctggaagcggcagcctgtgcgcgtgctgagcctgtttcggaatatcgataaagtcctgaaaagcctgggattcctggagagcggctctggctccggcggtggcaccctgaagtacgtggaggatgtgacaaacgtggtcagacgggatgtggagaagtggggccccttcgatctggtgtacggcagcacccaacccctgggcagctcttgtgaccggtgccctggctggtacatgtttcagttccaccggatcctgcagtacgccctgccgagacaggagtcccagcggccattcttttggattttcatggacaacttgctgctgaccgaggatgaccaggaaactaccactcggttcctgcagaccgaagccgtgaccctgcaggacgtgagaggccgggactaccagaacgccatgcgggtgtggtccaacatccctggactgaaaagcaagcacgcacctctgacccctaaagaagaggagtacctgcaggcccaggtgcggagcagaagcaagctggacgcccctaaggtggatctgctggtgaagaattgcctcctgcccctgagagagtacttcaagtatttcagccagaatagtctgcccctgggcggcccaagcagcggcgcccctcctcccagcggcggcagcccagccggctccccaacctctaccgaggagggcacctctgagtccgccacccccgagagcggccctggcacctccaccgagcccagcgagggcagcgcacccggcagccctgccggcagccccacctccacagaggagggaaccagcaccgagcccagcgaaggcagcgccccaggcaccagcaccgagcctagtgagggcggctctggcggcggcagcgcccaggagattaaacggatcaacaagatcagaagaagacttgtgaaagacagcaacaccaagaaggccggcaagacaggccccatgaaaaccctgctggttagagtgatgacacccgatctgagagagcggctggaaaacctgagaaagaagcctgaaaatatcccccagcccatcagcaatacatctagagccaacctgaataagctgctgaccgattacaccgaaatgaagaaggcgatcctgcatgtgtactgggaagagttccagaaggaccctgtgggcctgatgagccgggtggcccagcctgccagcaagaagatcgatcagaacaagctgaaacctgagatggacgagaagggcaacctgaccaccgccggctttgcctgctctcagtgtggccagcccctgttcgtgtacaagctggagcaggtgtctgagaagggcaaggcttacaccaactacttcggacggtgcaatgtggccgagcacgaaaagctgatcctgctggcccagctgaagcccgagaaggatagcgacgaagccgtgacatatagcctgggaaagtttgggcagagggccctggatttctacagcattcatgtgaccaaggagtccacccaccccgtgaagcccctggcccagatcgccggaaacagatacgcctccggacctgtgggaaaggccctgagcgacgcatgtatgggcacaatcgcctccttcctgtctaagtaccaggacatcatcatcgaacaccagaaggtggtgaagggcaaccagaagagactggagagcctgcgggagctggccggcaaggaaaacctggaataccctagcgtgaccctgccacctcagcctcacaccaaggagggcgttgatgcctacaacgaagtgatcgcccgggtgcgaatgtgggtgaacctgaacctgtggcagaagctgaagctaagcagagatgatgccaagcctctgctgagactgaagggattcccttcctttcctctggtcgagagacaggccaacgaagtggactggtgggacatggtgtgtaacgtgaagaagctgatcaacgagaaaaaggaggatggcaaggtgttttggcagaatctggctggctacaagagacaggaagccctgagaccatacctgagcagcgaggaagatcggaagaagggaaagaaattcgctcggtaccagctgggcgacctgctgctgcacctggaaaagaagcacggcgaggactggggaaaggtgtacgacgaggcctgggagcggattgacaagaaagtggaaggcctgagcaagcacatcaagctggaagaggaacggagaagcgaggacgcccagagcaaggccgccctgaccgactggctgcgggctaaggccagcttcgtgatcgagggcctgaaggaggccgacaaggacgagttctgcagatgcgagctgaagctgcagaagtggtacggggacctgcggggaaagcccttcgccatcgaagccgagaacagcatcctggacatcagcggcttcagcaagcagtacaactgtgccttcatctggcagaaggacggcgtgaagaagctgaacctgtacctgatcatcaactacttcaagggcggcaagctgcggttcaagaagatcaaacctgaagccttcgaagccaacagattctacaccgtgatcaacaaaaagagcggcgagatcgtgcccatggaggtgaacttcaacttcgacgaccccaacctgatcatcctgcctctggcctttggcaagagacagggcagagaattcatctggaacgacctgctgtccctggaaaccggcagcctgaagctggccaacggaagagtgatcgagaagacactgtacaacagaagaacccggcaggatgagcctgccctgttcgtggccctgaccttcgagcggcgggaggtcctggactcctccaatatcaaaccaatgaacctgatcggcgtggcaagaggcgaaaacatccccgccgtgatcgccctgaccgaccccgagggctgcccactgagccggtttaaggatagcctgggaaacccaacccacatcctgagaatcggcgagagctataaggagaagcagcggaccatccaggccaagaaggaggtggagcagcggagagccggcggctacagccggaagtacgccagcaaagccaagaatctggcagacgatatggtgagaaacaccgctagagatctgctgtactacgccgtgacccaggatgccatgctgatcttcgccaacctgagccggggcttcggccggcagggcaagcggaccttcatggccgagagacagtacacacggatggaggactggctgaccgccaagctggcctacgagggcctgagcaagacctacctgtccaagacactggcccagtacacctccaagacatgcagcaactgtgggtttaccatcaccagcgccgactacgacagggtgctggagaagctgaagaagacagcaacaggctggatgaccacaattaacggcaaggagctgaaggtggagggccagattacctactacaacagatacaagagacagaacgtagtcaaggacctgtccgtcgagctggatagactgagcgaagaatctgtgaacaacgacatctcctcctggacaaagggcagaagcggagaagctctgagcctcctgaagaaaagattctcccatagacccgtgcaggagaagttcgtgtgcctgaactgcggcttcgagacacacgcagccgagcaagccgccctgaacatcgccagatcctggctgttcctgcggagccaggagtacaagaaataccagacaaacaagacaaccggcaacaccgataagagagccttcgtcgagacctggcagtccttttaccggaagaagcttaaggaggtgtggaaacctgccgtgcggtctggcggatctggcggaggctccacaagccaggcccaggaggtgctgatgttcgacgacgtggccgtgaggttcacctgggaggagtggcagctgctgaaccccgcccagaaggccctgtacagggacgtgatgctggagaactacaggagcctggtgagcgtgggctggagggccagcaagcccgacctgctgagccagctggagaggggcgagccctggaccatcgagggcgagaaccactgcggcaccccccccgagatctggaaggccaccagccccaagaaaaagagaaaagtctaagctgccttctgcggggcttgccttctggccatgcccttcttctctcccttgcacctgtacctcttggtctttgaataaagcctgagtaggaaggctagcaaaaaaaaaaaaaaaaaaaaaaaaaaaaaaaaaaaaaaaaaaaaaaaaaaaaaaaaaaaaaaaaaaaaaaaaaaaaaaaa

SEQ ID NO: 3313 - RNA, 5419 nt, synthetic construct
  source 1..5419: mol_type = other RNA
aggaaataagagagaaaagaagagtaagaagaaatataagagccaccatggcccctaagaagaagcgtaaagtgagccgggtgaacggcagcggcagcggcggcggcatgaaccacgaccaggagttcgacccccctaaggtgtaccctcccgtccccgccgagaagagaaagcccatccgggtcctgagcctgttcgatggcatcgccaccggtctgctggtgctgaaggacctgggcatccaggtggataggtacattgcctccgaggtgtgcgaggactccatcaccgtgggaatggtgcgtcatcagggcaagatcatgtacgtgggcgacgtgcggagcgtgacacagaagcatatccaggagtggggccctttcgacctggtgatcggcggcagcccttgcaatgacctgagcatcgtgaacccagcccggaagggcctgtacgagggaaccggcagactgttcttcgagttttacagactgctgcacgacgcccggcctaaggaaggcgacgaccggcccttcttttggctgttcgagaatgtggtggccatgggagtcagcgacaagcgggatattagccggttcctggagagcaaccccgtgatgatcgatgccaaggaagtgagcgccgcccaccgggccagatacttctggggcaatctgcctggcatgaacagacccctggccagcaccgtgaacgacaagctggagctgcaggagtgcctggagcacggccggatcgccaagttcagcaaggtgagaaccatcaccacccgaagcaacagcatcaaacaaggcaaggaccagcactttcctgtgttcatgaacgagaaggaggacatcctgtggtgtaccgagatggagagagtgttcgggttcccagtccactacacagatgtcagcaacatgtctagactggccagacagagactgctgggaagaagctggtccgtccctgtgatcagacacctgttcgcccctctgaaggagtacttcgcctgcgtgagcagcggcaacagcaacgccaacagccggggccccagcttctctagcggcctggtgccactgtccctgagagggagccacatgggccccatggagatctacaaaaccgtgagcgcctggaagcggcagcctgtgcgcgtgctgagcctgtttcggaatatcgataaagtcctgaaaagcctgggattcctggagagcggctctggctccggcggtggcaccctgaagtacgtggaggatgtgacaaacgtggtcagacgggatgtggagaagtggggccccttcgatctggtgtacggcagcacccaacccctgggcagctcttgtgaccggtgccctggctggtacatgtttcagttccaccggatcctgcagtacgccctgccgagacaggagtcccagcggccattcttttggattttcatggacaacttgctgctgaccgaggatgaccaggaaactaccactcggttcctgcagaccgaagccgtgaccctgcaggacgtgagaggccgggactaccagaacgccatgcgggtgtggtccaacatccctggactgaaaagcaagcacgcacctctgacccctaaagaagaggagtacctgcaggcccaggtgcggagcagaagcaagctggacgcccctaaggtggatctgctggtgaagaattgcctcctgcccctgagagagtacttcaagtatttcagccagaatagtctgcccctgggcggcccaagcagcggcgcccctcctcccagcggcggcagcccagccggctccccaacctctaccgaggagggcacctctgagtccgccacccccgagagcggccctggcacctccaccgagcccagcgagggcagcgcacccggcagccctgccggcagccccacctccacagaggagggaaccagcaccgagcccagcgaaggcagcgccccaggcaccagcaccgagcctagtgagggcggctctggcggcggcagcgcccaggagattaaacggatcaacaagatcagaagaagacttgtgaaagacagcaacaccaagaaggccggcaagacaggccccatgaaaaccctgctggttagagtgatgacacccgatctgagagagcggctggaaaacctgagaaagaagcctgaaaatatcccccagcccatcagcaatacatctagagccaacctgaataagctgctgaccgattacaccgaaatgaagaaggcgatcctgcatgtgtactgggaagagttccagaaggaccctgtgggcctgatgagccgggtggcccagcctgccagcaagaagatcgatcagaacaagctgaaacctgagatggacgagaagggcaacctgaccaccgccggctttgcctgctctcagtgtggccagcccctgttcgtgtacaagctggagcaggtgtctgagaagggcaaggcttacaccaactacttcggacggtgcaatgtggccgagcacgaaaagctgatcctgctggcccagctgaagcccgagaaggatagcgacgaagccgtgacatatagcctgggaaagtttgggcagagggccctggatttctacagcattcatgtgaccaaggagtccacccaccccgtgaagcccctggcccagatcgccggaaacagatacgcctccggacctgtgggaaaggccctgagcgacgcatgtatgggcacaatcgcctccttcctgtctaagtaccaggacatcatcatcgaacaccagaaggtggtgaagggcaaccagaagagactggagagcctgcgggagctggccggcaaggaaaacctggaataccctagcgtgaccctgccacctcagcctcacaccaaggagggcgttgatgcctacaacgaagtgatcgcccgggtgcgaatgtgggtgaacctgaacctgtggcagaagctgaagctaagcagagatgatgccaagcctctgctgagactgaagggattcccttcctttcctctggtcgagagacaggccaacgaagtggactggtgggacatggtgtgtaacgtgaagaagctgatcaacgagaaaaaggaggatggcaaggtgttttggcagaatctggctggctacaagagacaggaagccctgagaccatacctgagcagcgaggaagatcggaagaagggaaagaaattcgctcggtaccagctgggcgacctgctgctgcacctggaaaagaagcacggcgaggactggggaaaggtgtacgacgaggcctgggagcggattgacaagaaagtggaaggcctgagcaagcacatcaagctggaagaggaacggagaagcgaggacgcccagagcaaggccgccctgaccgactggctgcgggctaaggccagcttcgtgatcgagggcctgaaggaggccgacaaggacgagttctgcagatgcgagctgaagctgcagaagtggtacggggacctgcggggaaagcccttcgccatcgaagccgagaacagcatcctggacatcagcggcttcagcaagcagtacaactgtgccttcatctggcagaaggacggcgtgaagaagctgaacctgtacctgatcatcaactacttcaagggcggcaagctgcggttcaagaagatcaaacctgaagccttcgaagccaacagattctacaccgtgatcaacaaaaagagcggcgagatcgtgcccatggaggtgaacttcaacttcgacgaccccaacctgatcatcctgcctctggcctttggcaagagacagggcagagaattcatctggaacgacctgctgtccctggaaaccggcagcctgaagctggccaacggaagagtgatcgagaagacactgtacaacagaagaacccggcaggatgagcctgccctgttcgtggccctgaccttcgagcggcgggaggtcctggactcctccaatatcaaaccaatgaacctgatcggcgtggcaagaggcgaaaacatccccgccgtgatcgccctgaccgaccccgagggctgcccactgagccggtttaaggatagcctgggaaacccaacccacatcctgagaatcggcgagagctataaggagaagcagcggaccatccaggccaagaaggaggtggagcagcggagagccggcggctacagccggaagtacgccagcaaagccaagaatctggcagacgatatggtgagaaacaccgctagagatctgctgtactacgccgtgacccaggatgccatgctgatcttcgccaacctgagccggggcttcggccggcagggcaagcggaccttcatggccgagagacagtacacacggatggaggactggctgaccgccaagctggcctacgagggcctgagcaagacctacctgtccaagacactggcccagtacacctccaagacatgcagcaactgtgggtttaccatcaccagcgccgactacgacagggtgctggagaagctgaagaagacagcaacaggctggatgaccacaattaacggcaaggagctgaaggtggagggccagattacctactacaacagatacaagagacagaacgtagtcaaggacctgtccgtcgagctggatagactgagcgaagaatctgtgaacaacgacatctcctcctggacaaagggcagaagcggagaagctctgagcctcctgaagaaaagattctcccatagacccgtgcaggagaagttcgtgtgcctgaactgcggcttcgagacacacgcagccgagcaagccgccctgaacatcgccagatcctggctgttcctgcggagccaggagtacaagaaataccagacaaacaagacaaccggcaacaccgataagagagccttcgtcgagacctggcagtccttttaccggaagaagcttaaggaggtgtggaaacctgccgtgcggtctggcggatctggcggaggctccacaagcctgcaggagagcgtgaccttcagggacgtggccgtgctgttcagccaggacgagtggctgcacctggacagcgcccagaggaccctgtacagggaggtgatgctggagaactacaacaacctggccagcctgggcatccccttcagcatgcccaaggtgatctgccagctgcagcagggcgaggacccctgcaccgtggagggcgaggtgcccagcgacagctgcatcgacgccaagggccagaccagccccaagaaaaagagaaaagtctaagctgccttctgcggggcttgccttctggccatgcccttcttctctcccttgcacctgtacctcttggtctttgaataaagcctgagtaggaaggctagcaaaaaaaaaaaaaaaaaaaaaaaaaaaaaaaaaaaaaaaaaaaaaaaaaaaaaaaaaaaaaaaaaaaaaaaaaaaaaaaa

SEQ ID NO: 3314 - RNA, 5416 nt, synthetic construct
  source 1..5416: mol_type = other RNA
aggaaataagagagaaaagaagagtaagaagaaatataagagccaccatggcccctaagaagaagcgtaaagtgagccgggtgaacggcagcggcagcggcggcggcatgaaccacgaccaggagttcgacccccctaaggtgtaccctcccgtccccgccgagaagagaaagcccatccgggtcctgagcctgttcgatggcatcgccaccggtctgctggtgctgaaggacctgggcatccaggtggataggtacattgcctccgaggtgtgcgaggactccatcaccgtgggaatggtgcgtcatcagggcaagatcatgtacgtgggcgacgtgcggagcgtgacacagaagcatatccaggagtggggccctttcgacctggtgatcggcggcagcccttgcaatgacctgagcatcgtgaacccagcccggaagggcctgtacgagggaaccggcagactgttcttcgagttttacagactgctgcacgacgcccggcctaaggaaggcgacgaccggcccttcttttggctgttcgagaatgtggtggccatgggagtcagcgacaagcgggatattagccggttcctggagagcaaccccgtgatgatcgatgccaaggaagtgagcgccgcccaccgggccagatacttctggggcaatctgcctggcatgaacagacccctggccagcaccgtgaacgacaagctggagctgcaggagtgcctggagcacggccggatcgccaagttcagcaaggtgagaaccatcaccacccgaagcaacagcatcaaacaaggcaaggaccagcactttcctgtgttcatgaacgagaaggaggacatcctgtggtgtaccgagatggagagagtgttcgggttcccagtccactacacagatgtcagcaacatgtctagactggccagacagagactgctgggaagaagctggtccgtccctgtgatcagacacctgttcgcccctctgaaggagtacttcgcctgcgtgagcagcggcaacagcaacgccaacagccggggccccagcttctctagcggcctggtgccactgtccctgagagggagccacatgggccccatggagatctacaaaaccgtgagcgcctggaagcggcagcctgtgcgcgtgctgagcctgtttcggaatatcgataaagtcctgaaaagcctgggattcctggagagcggctctggctccggcggtggcaccctgaagtacgtggaggatgtgacaaacgtggtcagacgggatgtggagaagtggggccccttcgatctggtgtacggcagcacccaacccctgggcagctcttgtgaccggtgccctggctggtacatgtttcagttccaccggatcctgcagtacgccctgccgagacaggagtcccagcggccattcttttggattttcatggacaacttgctgctgaccgaggatgaccaggaaactaccactcggttcctgcagaccgaagccgtgaccctgcaggacgtgagaggccgggactaccagaacgccatgcgggtgtggtccaacatccctggactgaaaagcaagcacgcacctctgacccctaaagaagaggagtacctgcaggcccaggtgcggagcagaagcaagctggacgcccctaaggtggatctgctggtgaagaattgcctcctgcccctgagagagtacttcaagtatttcagccagaatagtctgcccctgggcggcccaagcagcggcgcccctcctcccagcggcggcagcccagccggctccccaacctctaccgaggagggcacctctgagtccgccacccccgagagcggccctggcacctccaccgagcccagcgagggcagcgcacccggcagccctgccggcagccccacctccacagaggagggaaccagcaccgagcccagcgaaggcagcgccccaggcaccagcaccgagcctagtgagggcggctctggcggcggcagcgcccaggagattaaacggatcaacaagatcagaagaagacttgtgaaagacagcaacaccaagaaggccggcaagacaggccccatgaaaaccctgctggttagagtgatgacacccgatctgagagagcggctggaaaacctgagaaagaagcctgaaaatatcccccagcccatcagcaatacatctagagccaacctgaataagctgctgaccgattacaccgaaatgaagaaggcgatcctgcatgtgtactgggaagagttccagaaggaccctgtgggcctgatgagccgggtggcccagcctgccagcaagaagatcgatcagaacaagctgaaacctgagatggacgagaagggcaacctgaccaccgccggctttgcctgctctcagtgtggccagcccctgttcgtgtacaagctggagcaggtgtctgagaagggcaaggcttacaccaactacttcggacggtgcaatgtggccgagcacgaaaagctgatcctgctggcccagctgaagcccgagaaggatagcgacgaagccgtgacatatagcctgggaaagtttgggcagagggccctggatttctacagcattcatgtgaccaaggagtccacccaccccgtgaagcccctggcccagatcgccggaaacagatacgcctccggacctgtgggaaaggccctgagcgacgcatgtatgggcacaatcgcctccttcctgtctaagtaccaggacatcatcatcgaacaccagaaggtggtgaagggcaaccagaagagactggagagcctgcgggagctggccggcaaggaaaacctggaataccctagcgtgaccctgccacctcagcctcacaccaaggagggcgttgatgcctacaacgaagtgatcgcccgggtgcgaatgtgggtgaacctgaacctgtggcagaagctgaagctaagcagagatgatgccaagcctctgctgagactgaagggattcccttcctttcctctggtcgagagacaggccaacgaagtggactggtgggacatggtgtgtaacgtgaagaagctgatcaacgagaaaaaggaggatggcaaggtgttttggcagaatctggctggctacaagagacaggaagccctgagaccatacctgagcagcgaggaagatcggaagaagggaaagaaattcgctcggtaccagctgggcgacctgctgctgcacctggaaaagaagcacggcgaggactggggaaaggtgtacgacgaggcctgggagcggattgacaagaaagtggaaggcctgagcaagcacatcaagctggaagaggaacggagaagcgaggacgcccagagcaaggccgccctgaccgactggctgcgggctaaggccagcttcgtgatcgagggcctgaaggaggccgacaaggacgagttctgcagatgcgagctgaagctgcagaagtggtacggggacctgcggggaaagcccttcgccatcgaagccgagaacagcatcctggacatcagcggcttcagcaagcagtacaactgtgccttcatctggcagaaggacggcgtgaagaagctgaacctgtacctgatcatcaactacttcaagggcggcaagctgcggttcaagaagatcaaacctgaagccttcgaagccaacagattctacaccgtgatcaacaaaaagagcggcgagatcgtgcccatggaggtgaacttcaacttcgacgaccccaacctgatcatcctgcctctggcctttggcaagagacagggcagagaattcatctggaacgacctgctgtccctggaaaccggcagcctgaagctggccaacggaagagtgatcgagaagacactgtacaacagaagaacccggcaggatgagcctgccctgttcgtggccctgaccttcgagcggcgggaggtcctggactcctccaatatcaaaccaatgaacctgatcggcgtggcaagaggcgaaaacatccccgccgtgatcgccctgaccgaccccgagggctgcccactgagccggtttaaggatagcctgggaaacccaacccacatcctgagaatcggcgagagctataaggagaagcagcggaccatccaggccaagaaggaggtggagcagcggagagccggcggctacagccggaagtacgccagcaaagccaagaatctggcagacgatatggtgagaaacaccgctagagatctgctgtactacgccgtgacccaggatgccatgctgatcttcgccaacctgagccggggcttcggccggcagggcaagcggaccttcatggccgagagacagtacacacggatggaggactggctgaccgccaagctggcctacgagggcctgagcaagacctacctgtccaagacactggcccagtacacctccaagacatgcagcaactgtgggtttaccatcaccagcgccgactacgacagggtgctggagaagctgaagaagacagcaacaggctggatgaccacaattaacggcaaggagctgaaggtggagggccagattacctactacaacagatacaagagacagaacgtagtcaaggacctgtccgtcgagctggatagactgagcgaagaatctgtgaacaacgacatctcctcctggacaaagggcagaagcggagaagctctgagcctcctgaagaaaagattctcccatagacccgtgcaggagaagttcgtgtgcctgaactgcggcttcgagacacacgcagccgagcaagccgccctgaacatcgccagatcctggctgttcctgcggagccaggagtacaagaaataccagacaaacaagacaaccggcaacaccgataagagagccttcgtcgagacctggcagtccttttaccggaagaagcttaaggaggtgtggaaacctgccgtgcggtctggcggatctggcggaggctccacaagcagccaggtgaccttcagcgacgtggccatcgacttcagccacgaggagtgggcctgcctggacagcgcccagagagacctgtacaaggacgtgatggtgcagaactacgagaacctggtgagcgtgggcctgagcgtgaccaagccctacgtgatcatgctgctggaggacggcaaggagccctggatgatggagaagaagctgagcaaggcctaccccttccccctgagccacagcgtgaccagccccaagaaaaagagaaaagtctaagctgccttctgcggggcttgccttctggccatgcccttcttctctcccttgcacctgtacctcttggtctttgaataaagcctgagtaggaaggctagcaaaaaaaaaaaaaaaaaaaaaaaaaaaaaaaaaaaaaaaaaaaaaaaaaaaaaaaaaaaaaaaaaaaaaaaaaaaaaaaa

SEQ ID NO: 3315 - RNA, 5419 nt, synthetic construct
  source 1..5419: mol_type = other RNA
aggaaataagagagaaaagaagagtaagaagaaatataagagccaccatggcccctaagaagaagcgtaaagtgagccgggtgaacggcagcggcagcggcggcggcatgaaccacgaccaggagttcgacccccctaaggtgtaccctcccgtccccgccgagaagagaaagcccatccgggtcctgagcctgttcgatggcatcgccaccggtctgctggtgctgaaggacctgggcatccaggtggataggtacattgcctccgaggtgtgcgaggactccatcaccgtgggaatggtgcgtcatcagggcaagatcatgtacgtgggcgacgtgcggagcgtgacacagaagcatatccaggagtggggccctttcgacctggtgatcggcggcagcccttgcaatgacctgagcatcgtgaacccagcccggaagggcctgtacgagggaaccggcagactgttcttcgagttttacagactgctgcacgacgcccggcctaaggaaggcgacgaccggcccttcttttggctgttcgagaatgtggtggccatgggagtcagcgacaagcgggatattagccggttcctggagagcaaccccgtgatgatcgatgccaaggaagtgagcgccgcccaccgggccagatacttctggggcaatctgcctggcatgaacagacccctggccagcaccgtgaacgacaagctggagctgcaggagtgcctggagcacggccggatcgccaagttcagcaaggtgagaaccatcaccacccgaagcaacagcatcaaacaaggcaaggaccagcactttcctgtgttcatgaacgagaaggaggacatcctgtggtgtaccgagatggagagagtgttcgggttcccagtccactacacagatgtcagcaacatgtctagactggccagacagagactgctgggaagaagctggtccgtccctgtgatcagacacctgttcgcccctctgaaggagtacttcgcctgcgtgagcagcggcaacagcaacgccaacagccggggccccagcttctctagcggcctggtgccactgtccctgagagggagccacatgggccccatggagatctacaaaaccgtgagcgcctggaagcggcagcctgtgcgcgtgctgagcctgtttcggaatatcgataaagtcctgaaaagcctgggattcctggagagcggctctggctccggcggtggcaccctgaagtacgtggaggatgtgacaaacgtggtcagacgggatgtggagaagtggggccccttcgatctggtgtacggcagcacccaacccctgggcagctcttgtgaccggtgccctggctggtacatgtttcagttccaccggatcctgcagtacgccctgccgagacaggagtcccagcggccattcttttggattttcatggacaacttgctgctgaccgaggatgaccaggaaactaccactcggttcctgcagaccgaagccgtgaccctgcaggacgtgagaggccgggactaccagaacgccatgcgggtgtggtccaacatccctggactgaaaagcaagcacgcacctctgacccctaaagaagaggagtacctgcaggcccaggtgcggagcagaagcaagctggacgcccctaaggtggatctgctggtgaagaattgcctcctgcccctgagagagtacttcaagtatttcagccagaatagtctgcccctgggcggcccaagcagcggcgcccctcctcccagcggcggcagcccagccggctccccaacctctaccgaggagggcacctctgagtccgccacccccgagagcggccctggcacctccaccgagcccagcgagggcagcgcacccggcagccctgccggcagccccacctccacagaggagggaaccagcaccgagcccagcgaaggcagcgccccaggcaccagcaccgagcctagtgagggcggctctggcggcggcagcgcccaggagattaaacggatcaacaagatcagaagaagacttgtgaaagacagcaacaccaagaaggccggcaagacaggccccatgaaaaccctgctggttagagtgatgacacccgatctgagagagcggctggaaaacctgagaaagaagcctgaaaatatcccccagcccatcagcaatacatctagagccaacctgaataagctgctgaccgattacaccgaaatgaagaaggcgatcctgcatgtgtactgggaagagttccagaaggaccctgtgggcctgatgagccgggtggcccagcctgccagcaagaagatcgatcagaacaagctgaaacctgagatggacgagaagggcaacctgaccaccgccggctttgcctgctctcagtgtggccagcccctgttcgtgtacaagctggagcaggtgtctgagaagggcaaggcttacaccaactacttcggacggtgcaatgtggccgagcacgaaaagctgatcctgctggcccagctgaagcccgagaaggatagcgacgaagccgtgacatatagcctgggaaagtttgggcagagggccctggatttctacagcattcatgtgaccaaggagtccacccaccccgtgaagcccctggcccagatcgccggaaacagatacgcctccggacctgtgggaaaggccctgagcgacgcatgtatgggcacaatcgcctccttcctgtctaagtaccaggacatcatcatcgaacaccagaaggtggtgaagggcaaccagaagagactggagagcctgcgggagctggccggcaaggaaaacctggaataccctagcgtgaccctgccacctcagcctcacaccaaggagggcgttgatgcctacaacgaagtgatcgcccgggtgcgaatgtgggtgaacctgaacctgtggcagaagctgaagctaagcagagatgatgccaagcctctgctgagactgaagggattcccttcctttcctctggtcgagagacaggccaacgaagtggactggtgggacatggtgtgtaacgtgaagaagctgatcaacgagaaaaaggaggatggcaaggtgttttggcagaatctggctggctacaagagacaggaagccctgagaccatacctgagcagcgaggaagatcggaagaagggaaagaaattcgctcggtaccagctgggcgacctgctgctgcacctggaaaagaagcacggcgaggactggggaaaggtgtacgacgaggcctgggagcggattgacaagaaagtggaaggcctgagcaagcacatcaagctggaagaggaacggagaagcgaggacgcccagagcaaggccgccctgaccgactggctgcgggctaaggccagcttcgtgatcgagggcctgaaggaggccgacaaggacgagttctgcagatgcgagctgaagctgcagaagtggtacggggacctgcggggaaagcccttcgccatcgaagccgagaacagcatcctggacatcagcggcttcagcaagcagtacaactgtgccttcatctggcagaaggacggcgtgaagaagctgaacctgtacctgatcatcaactacttcaagggcggcaagctgcggttcaagaagatcaaacctgaagccttcgaagccaacagattctacaccgtgatcaacaaaaagagcggcgagatcgtgcccatggaggtgaacttcaacttcgacgaccccaacctgatcatcctgcctctggcctttggcaagagacagggcagagaattcatctggaacgacctgctgtccctggaaaccggcagcctgaagctggccaacggaagagtgatcgagaagacactgtacaacagaagaacccggcaggatgagcctgccctgttcgtggccctgaccttcgagcggcgggaggtcctggactcctccaatatcaaaccaatgaacctgatcggcgtggcaagaggcgaaaacatccccgccgtgatcgccctgaccgaccccgagggctgcccactgagccggtttaaggatagcctgggaaacccaacccacatcctgagaatcggcgagagctataaggagaagcagcggaccatccaggccaagaaggaggtggagcagcggagagccggcggctacagccggaagtacgccagcaaagccaagaatctggcagacgatatggtgagaaacaccgctagagatctgctgtactacgccgtgacccaggatgccatgctgatcttcgccaacctgagccggggcttcggccggcagggcaagcggaccttcatggccgagagacagtacacacggatggaggactggctgaccgccaagctggcctacgagggcctgagcaagacctacctgtccaagacactggcccagtacacctccaagacatgcagcaactgtgggtttaccatcaccagcgccgactacgacagggtgctggagaagctgaagaagacagcaacaggctggatgaccacaattaacggcaaggagctgaaggtggagggccagattacctactacaacagatacaagagacagaacgtagtcaaggacctgtccgtcgagctggatagactgagcgaagaatctgtgaacaacgacatctcctcctggacaaagggcagaagcggagaagctctgagcctcctgaagaaaagattctcccatagacccgtgcaggagaagttcgtgtgcctgaactgcggcttcgagacacacgcagccgagcaagccgccctgaacatcgccagatcctggctgttcctgcggagccaggagtacaagaaataccagacaaacaagacaaccggcaacaccgataagagagccttcgtcgagacctggcagtccttttaccggaagaagcttaaggaggtgtggaaacctgccgtgcggtctggcggatctggcggaggctccacaagcgacgccgtgaccttccccgacgtggccatcgacttcagcagggacgagtgggagtgcctgaacctggcccagaggaccctgtacaggaaggtgatgctggagaactacaggaccctggtgagcgtgggcctgtgcgtgagcaagcccgacgtgatcagcctgctggagcagggcgaggagccctgggtgaccgacggcgagatggccggcggcctgtgcccccacagcgagtgcgtgtggatgaccagccccaagaaaaagagaaaagtctaagctgccttctgcggggcttgccttctggccatgcccttcttctctcccttgcacctgtacctcttggtctttgaataaagcctgagtaggaaggctagcaaaaaaaaaaaaaaaaaaaaaaaaaaaaaaaaaaaaaaaaaaaaaaaaaaaaaaaaaaaaaaaaaaaaaaaaaaaaaaaa

SEQ ID NO: 3316 - RNA, 5419 nt, synthetic construct
  source 1..5419: mol_type = other RNA
aggaaataagagagaaaagaagagtaagaagaaatataagagccaccatggcccctaagaagaagcgtaaagtgagccgggtgaacggcagcggcagcggcggcggcatgaaccacgaccaggagttcgacccccctaaggtgtaccctcccgtccccgccgagaagagaaagcccatccgggtcctgagcctgttcgatggcatcgccaccggtctgctggtgctgaaggacctgggcatccaggtggataggtacattgcctccgaggtgtgcgaggactccatcaccgtgggaatggtgcgtcatcagggcaagatcatgtacgtgggcgacgtgcggagcgtgacacagaagcatatccaggagtggggccctttcgacctggtgatcggcggcagcccttgcaatgacctgagcatcgtgaacccagcccggaagggcctgtacgagggaaccggcagactgttcttcgagttttacagactgctgcacgacgcccggcctaaggaaggcgacgaccggcccttcttttggctgttcgagaatgtggtggccatgggagtcagcgacaagcgggatattagccggttcctggagagcaaccccgtgatgatcgatgccaaggaagtgagcgccgcccaccgggccagatacttctggggcaatctgcctggcatgaacagacccctggccagcaccgtgaacgacaagctggagctgcaggagtgcctggagcacggccggatcgccaagttcagcaaggtgagaaccatcaccacccgaagcaacagcatcaaacaaggcaaggaccagcactttcctgtgttcatgaacgagaaggaggacatcctgtggtgtaccgagatggagagagtgttcgggttcccagtccactacacagatgtcagcaacatgtctagactggccagacagagactgctgggaagaagctggtccgtccctgtgatcagacacctgttcgcccctctgaaggagtacttcgcctgcgtgagcagcggcaacagcaacgccaacagccggggccccagcttctctagcggcctggtgccactgtccctgagagggagccacatgggccccatggagatctacaaaaccgtgagcgcctggaagcggcagcctgtgcgcgtgctgagcctgtttcggaatatcgataaagtcctgaaaagcctgggattcctggagagcggctctggctccggcggtggcaccctgaagtacgtggaggatgtgacaaacgtggtcagacgggatgtggagaagtggggccccttcgatctggtgtacggcagcacccaacccctgggcagctcttgtgaccggtgccctggctggtacatgtttcagttccaccggatcctgcagtacgccctgccgagacaggagtcccagcggccattcttttggattttcatggacaacttgctgctgaccgaggatgaccaggaaactaccactcggttcctgcagaccgaagccgtgaccctgcaggacgtgagaggccgggactaccagaacgccatgcgggtgtggtccaacatccctggactgaaaagcaagcacgcacctctgacccctaaagaagaggagtacctgcaggcccaggtgcggagcagaagcaagctggacgcccctaaggtggatctgctggtgaagaattgcctcctgcccctgagagagtacttcaagtatttcagccagaatagtctgcccctgggcggcccaagcagcggcgcccctcctcccagcggcggcagcccagccggctccccaacctctaccgaggagggcacctctgagtccgccacccccgagagcggccctggcacctccaccgagcccagcgagggcagcgcacccggcagccctgccggcagccccacctccacagaggagggaaccagcaccgagcccagcgaaggcagcgccccaggcaccagcaccgagcctagtgagggcggctctggcggcggcagcgcccaggagattaaacggatcaacaagatcagaagaagacttgtgaaagacagcaacaccaagaaggccggcaagacaggccccatgaaaaccctgctggttagagtgatgacacccgatctgagagagcggctggaaaacctgagaaagaagcctgaaaatatcccccagcccatcagcaatacatctagagccaacctgaataagctgctgaccgattacaccgaaatgaagaaggcgatcctgcatgtgtactgggaagagttccagaaggaccctgtgggcctgatgagccgggtggcccagcctgccagcaagaagatcgatcagaacaagctgaaacctgagatggacgagaagggcaacctgaccaccgccggctttgcctgctctcagtgtggccagcccctgttcgtgtacaagctggagcaggtgtctgagaagggcaaggcttacaccaactacttcggacggtgcaatgtggccgagcacgaaaagctgatcctgctggcccagctgaagcccgagaaggatagcgacgaagccgtgacatatagcctgggaaagtttgggcagagggccctggatttctacagcattcatgtgaccaaggagtccacccaccccgtgaagcccctggcccagatcgccggaaacagatacgcctccggacctgtgggaaaggccctgagcgacgcatgtatgggcacaatcgcctccttcctgtctaagtaccaggacatcatcatcgaacaccagaaggtggtgaagggcaaccagaagagactggagagcctgcgggagctggccggcaaggaaaacctggaataccctagcgtgaccctgccacctcagcctcacaccaaggagggcgttgatgcctacaacgaagtgatcgcccgggtgcgaatgtgggtgaacctgaacctgtggcagaagctgaagctaagcagagatgatgccaagcctctgctgagactgaagggattcccttcctttcctctggtcgagagacaggccaacgaagtggactggtgggacatggtgtgtaacgtgaagaagctgatcaacgagaaaaaggaggatggcaaggtgttttggcagaatctggctggctacaagagacaggaagccctgagaccatacctgagcagcgaggaagatcggaagaagggaaagaaattcgctcggtaccagctgggcgacctgctgctgcacctggaaaagaagcacggcgaggactggggaaaggtgtacgacgaggcctgggagcggattgacaagaaagtggaaggcctgagcaagcacatcaagctggaagaggaacggagaagcgaggacgcccagagcaaggccgccctgaccgactggctgcgggctaaggccagcttcgtgatcgagggcctgaaggaggccgacaaggacgagttctgcagatgcgagctgaagctgcagaagtggtacggggacctgcggggaaagcccttcgccatcgaagccgagaacagcatcctggacatcagcggcttcagcaagcagtacaactgtgccttcatctggcagaaggacggcgtgaagaagctgaacctgtacctgatcatcaactacttcaagggcggcaagctgcggttcaagaagatcaaacctgaagccttcgaagccaacagattctacaccgtgatcaacaaaaagagcggcgagatcgtgcccatggaggtgaacttcaacttcgacgaccccaacctgatcatcctgcctctggcctttggcaagagacagggcagagaattcatctggaacgacctgctgtccctggaaaccggcagcctgaagctggccaacggaagagtgatcgagaagacactgtacaacagaagaacccggcaggatgagcctgccctgttcgtggccctgaccttcgagcggcgggaggtcctggactcctccaatatcaaaccaatgaacctgatcggcgtggcaagaggcgaaaacatccccgccgtgatcgccctgaccgaccccgagggctgcccactgagccggtttaaggatagcctgggaaacccaacccacatcctgagaatcggcgagagctataaggagaagcagcggaccatccaggccaagaaggaggtggagcagcggagagccggcggctacagccggaagtacgccagcaaagccaagaatctggcagacgatatggtgagaaacaccgctagagatctgctgtactacgccgtgacccaggatgccatgctgatcttcgccaacctgagccggggcttcggccggcagggcaagcggaccttcatggccgagagacagtacacacggatggaggactggctgaccgccaagctggcctacgagggcctgagcaagacctacctgtccaagacactggcccagtacacctccaagacatgcagcaactgtgggtttaccatcaccagcgccgactacgacagggtgctggagaagctgaagaagacagcaacaggctggatgaccacaattaacggcaaggagctgaaggtggagggccagattacctactacaacagatacaagagacagaacgtagtcaaggacctgtccgtcgagctggatagactgagcgaagaatctgtgaacaacgacatctcctcctggacaaagggcagaagcggagaagctctgagcctcctgaagaaaagattctcccatagacccgtgcaggagaagttcgtgtgcctgaactgcggcttcgagacacacgcagccgagcaagccgccctgaacatcgccagatcctggctgttcctgcggagccaggagtacaagaaataccagacaaacaagacaaccggcaacaccgataagagagccttcgtcgagacctggcagtccttttaccggaagaagcttaaggaggtgtggaaacctgccgtgcggtctggcggatctggcggaggctccacaagcttccagggcctgatgaccttcgaggacgtgaccgtggagttcacccagtgggagtggggccagctggaccccgcccagaaggacctgtacagggaggtgatgctggagaacttcaggaacctggccagcctgggcctgcccctgagcaagccctacgtgatctgccagctggaggagggccaggagccctgcatgctggagaaggagatcagcgtgggcacccagagcgtgggcgaggccaccaccagccccaagaaaaagagaaaagtctaagctgccttctgcggggcttgccttctggccatgcccttcttctctcccttgcacctgtacctcttggtctttgaataaagcctgagtaggaaggctagcaaaaaaaaaaaaaaaaaaaaaaaaaaaaaaaaaaaaaaaaaaaaaaaaaaaaaaaaaaaaaaaaaaaaaaaaaaaaaaaa

SEQ ID NO: 3317 - RNA, 5419 nt, synthetic construct
  source 1..5419: mol_type = other RNA
aggaaataagagagaaaagaagagtaagaagaaatataagagccaccatggcccctaagaagaagcgtaaagtgagccgggtgaacggcagcggcagcggcggcggcatgaaccacgaccaggagttcgacccccctaaggtgtaccctcccgtccccgccgagaagagaaagcccatccgggtcctgagcctgttcgatggcatcgccaccggtctgctggtgctgaaggacctgggcatccaggtggataggtacattgcctccgaggtgtgcgaggactccatcaccgtgggaatggtgcgtcatcagggcaagatcatgtacgtgggcgacgtgcggagcgtgacacagaagcatatccaggagtggggccctttcgacctggtgatcggcggcagcccttgcaatgacctgagcatcgtgaacccagcccggaagggcctgtacgagggaaccggcagactgttcttcgagttttacagactgctgcacgacgcccggcctaaggaaggcgacgaccggcccttcttttggctgttcgagaatgtggtggccatgggagtcagcgacaagcgggatattagccggttcctggagagcaaccccgtgatgatcgatgccaaggaagtgagcgccgcccaccgggccagatacttctggggcaatctgcctggcatgaacagacccctggccagcaccgtgaacgacaagctggagctgcaggagtgcctggagcacggccggatcgccaagttcagcaaggtgagaaccatcaccacccgaagcaacagcatcaaacaaggcaaggaccagcactttcctgtgttcatgaacgagaaggaggacatcctgtggtgtaccgagatggagagagtgttcgggttcccagtccactacacagatgtcagcaacatgtctagactggccagacagagactgctgggaagaagctggtccgtccctgtgatcagacacctgttcgcccctctgaaggagtacttcgcctgcgtgagcagcggcaacagcaacgccaacagccggggccccagcttctctagcggcctggtgccactgtccctgagagggagccacatgggccccatggagatctacaaaaccgtgagcgcctggaagcggcagcctgtgcgcgtgctgagcctgtttcggaatatcgataaagtcctgaaaagcctgggattcctggagagcggctctggctccggcggtggcaccctgaagtacgtggaggatgtgacaaacgtggtcagacgggatgtggagaagtggggccccttcgatctggtgtacggcagcacccaacccctgggcagctcttgtgaccggtgccctggctggtacatgtttcagttccaccggatcctgcagtacgccctgccgagacaggagtcccagcggccattcttttggattttcatggacaacttgctgctgaccgaggatgaccaggaaactaccactcggttcctgcagaccgaagccgtgaccctgcaggacgtgagaggccgggactaccagaacgccatgcgggtgtggtccaacatccctggactgaaaagcaagcacgcacctctgacccctaaagaagaggagtacctgcaggcccaggtgcggagcagaagcaagctggacgcccctaaggtggatctgctggtgaagaattgcctcctgcccctgagagagtacttcaagtatttcagccagaatagtctgcccctgggcggcccaagcagcggcgcccctcctcccagcggcggcagcccagccggctccccaacctctaccgaggagggcacctctgagtccgccacccccgagagcggccctggcacctccaccgagcccagcgagggcagcgcacccggcagccctgccggcagccccacctccacagaggagggaaccagcaccgagcccagcgaaggcagcgccccaggcaccagcaccgagcctagtgagggcggctctggcggcggcagcgcccaggagattaaacggatcaacaagatcagaagaagacttgtgaaagacagcaacaccaagaaggccggcaagacaggccccatgaaaaccctgctggttagagtgatgacacccgatctgagagagcggctggaaaacctgagaaagaagcctgaaaatatcccccagcccatcagcaatacatctagagccaacctgaataagctgctgaccgattacaccgaaatgaagaaggcgatcctgcatgtgtactgggaagagttccagaaggaccctgtgggcctgatgagccgggtggcccagcctgccagcaagaagatcgatcagaacaagctgaaacctgagatggacgagaagggcaacctgaccaccgccggctttgcctgctctcagtgtggccagcccctgttcgtgtacaagctggagcaggtgtctgagaagggcaaggcttacaccaactacttcggacggtgcaatgtggccgagcacgaaaagctgatcctgctggcccagctgaagcccgagaaggatagcgacgaagccgtgacatatagcctgggaaagtttgggcagagggccctggatttctacagcattcatgtgaccaaggagtccacccaccccgtgaagcccctggcccagatcgccggaaacagatacgcctccggacctgtgggaaaggccctgagcgacgcatgtatgggcacaatcgcctccttcctgtctaagtaccaggacatcatcatcgaacaccagaaggtggtgaagggcaaccagaagagactggagagcctgcgggagctggccggcaaggaaaacctggaataccctagcgtgaccctgccacctcagcctcacaccaaggagggcgttgatgcctacaacgaagtgatcgcccgggtgcgaatgtgggtgaacctgaacctgtggcagaagctgaagctaagcagagatgatgccaagcctctgctgagactgaagggattcccttcctttcctctggtcgagagacaggccaacgaagtggactggtgggacatggtgtgtaacgtgaagaagctgatcaacgagaaaaaggaggatggcaaggtgttttggcagaatctggctggctacaagagacaggaagccctgagaccatacctgagcagcgaggaagatcggaagaagggaaagaaattcgctcggtaccagctgggcgacctgctgctgcacctggaaaagaagcacggcgaggactggggaaaggtgtacgacgaggcctgggagcggattgacaagaaagtggaaggcctgagcaagcacatcaagctggaagaggaacggagaagcgaggacgcccagagcaaggccgccctgaccgactggctgcgggctaaggccagcttcgtgatcgagggcctgaaggaggccgacaaggacgagttctgcagatgcgagctgaagctgcagaagtggtacggggacctgcggggaaagcccttcgccatcgaagccgagaacagcatcctggacatcagcggcttcagcaagcagtacaactgtgccttcatctggcagaaggacggcgtgaagaagctgaacctgtacctgatcatcaactacttcaagggcggcaagctgcggttcaagaagatcaaacctgaagccttcgaagccaacagattctacaccgtgatcaacaaaaagagcggcgagatcgtgcccatggaggtgaacttcaacttcgacgaccccaacctgatcatcctgcctctggcctttggcaagagacagggcagagaattcatctggaacgacctgctgtccctggaaaccggcagcctgaagctggccaacggaagagtgatcgagaagacactgtacaacagaagaacccggcaggatgagcctgccctgttcgtggccctgaccttcgagcggcgggaggtcctggactcctccaatatcaaaccaatgaacctgatcggcgtggcaagaggcgaaaacatccccgccgtgatcgccctgaccgaccccgagggctgcccactgagccggtttaaggatagcctgggaaacccaacccacatcctgagaatcggcgagagctataaggagaagcagcggaccatccaggccaagaaggaggtggagcagcggagagccggcggctacagccggaagtacgccagcaaagccaagaatctggcagacgatatggtgagaaacaccgctagagatctgctgtactacgccgtgacccaggatgccatgctgatcttcgccaacctgagccggggcttcggccggcagggcaagcggaccttcatggccgagagacagtacacacggatggaggactggctgaccgccaagctggcctacgagggcctgagcaagacctacctgtccaagacactggcccagtacacctccaagacatgcagcaactgtgggtttaccatcaccagcgccgactacgacagggtgctggagaagctgaagaagacagcaacaggctggatgaccacaattaacggcaaggagctgaaggtggagggccagattacctactacaacagatacaagagacagaacgtagtcaaggacctgtccgtcgagctggatagactgagcgaagaatctgtgaacaacgacatctcctcctggacaaagggcagaagcggagaagctctgagcctcctgaagaaaagattctcccatagacccgtgcaggagaagttcgtgtgcctgaactgcggcttcgagacacacgcagccgagcaagccgccctgaacatcgccagatcctggctgttcctgcggagccaggagtacaagaaataccagacaaacaagacaaccggcaacaccgataagagagccttcgtcgagacctggcagtccttttaccggaagaagcttaaggaggtgtggaaacctgccgtgcggtctggcggatctggcggaggctccacaagcagcgaggagagcgtgaccttcgaggacgtggccatctacttcagcgagaacgagtggaccggcctggcccccgcccagagggtgctgtacagggacgtgatgctggagaactacggcgccgtggccgccctggccgccttccccttccccaagcccgccctgatcagccagctggagaggggcgaggccccctggtgcaaggccccccagggcgccctggacggcgagggccccaggggcatcaccagccccaagaaaaagagaaaagtctaagctgccttctgcggggcttgccttctggccatgcccttcttctctcccttgcacctgtacctcttggtctttgaataaagcctgagtaggaaggctagcaaaaaaaaaaaaaaaaaaaaaaaaaaaaaaaaaaaaaaaaaaaaaaaaaaaaaaaaaaaaaaaaaaaaaaaaaaaaaaaa

SEQ ID NO: 3318 - RNA, 5416 nt, synthetic construct
  source 1..5416: mol_type = other RNA
aggaaataagagagaaaagaagagtaagaagaaatataagagccaccatggcccctaagaagaagcgtaaagtgagccgggtgaacggcagcggcagcggcggcggcatgaaccacgaccaggagttcgacccccctaaggtgtaccctcccgtccccgccgagaagagaaagcccatccgggtcctgagcctgttcgatggcatcgccaccggtctgctggtgctgaaggacctgggcatccaggtggataggtacattgcctccgaggtgtgcgaggactccatcaccgtgggaatggtgcgtcatcagggcaagatcatgtacgtgggcgacgtgcggagcgtgacacagaagcatatccaggagtggggccctttcgacctggtgatcggcggcagcccttgcaatgacctgagcatcgtgaacccagcccggaagggcctgtacgagggaaccggcagactgttcttcgagttttacagactgctgcacgacgcccggcctaaggaaggcgacgaccggcccttcttttggctgttcgagaatgtggtggccatgggagtcagcgacaagcgggatattagccggttcctggagagcaaccccgtgatgatcgatgccaaggaagtgagcgccgcccaccgggccagatacttctggggcaatctgcctggcatgaacagacccctggccagcaccgtgaacgacaagctggagctgcaggagtgcctggagcacggccggatcgccaagttcagcaaggtgagaaccatcaccacccgaagcaacagcatcaaacaaggcaaggaccagcactttcctgtgttcatgaacgagaaggaggacatcctgtggtgtaccgagatggagagagtgttcgggttcccagtccactacacagatgtcagcaacatgtctagactggccagacagagactgctgggaagaagctggtccgtccctgtgatcagacacctgttcgcccctctgaaggagtacttcgcctgcgtgagcagcggcaacagcaacgccaacagccggggccccagcttctctagcggcctggtgccactgtccctgagagggagccacatgggccccatggagatctacaaaaccgtgagcgcctggaagcggcagcctgtgcgcgtgctgagcctgtttcggaatatcgataaagtcctgaaaagcctgggattcctggagagcggctctggctccggcggtggcaccctgaagtacgtggaggatgtgacaaacgtggtcagacgggatgtggagaagtggggccccttcgatctggtgtacggcagcacccaacccctgggcagctcttgtgaccggtgccctggctggtacatgtttcagttccaccggatcctgcagtacgccctgccgagacaggagtcccagcggccattcttttggattttcatggacaacttgctgctgaccgaggatgaccaggaaactaccactcggttcctgcagaccgaagccgtgaccctgcaggacgtgagaggccgggactaccagaacgccatgcgggtgtggtccaacatccctggactgaaaagcaagcacgcacctctgacccctaaagaagaggagtacctgcaggcccaggtgcggagcagaagcaagctggacgcccctaaggtggatctgctggtgaagaattgcctcctgcccctgagagagtacttcaagtatttcagccagaatagtctgcccctgggcggcccaagcagcggcgcccctcctcccagcggcggcagcccagccggctccccaacctctaccgaggagggcacctctgagtccgccacccccgagagcggccctggcacctccaccgagcccagcgagggcagcgcacccggcagccctgccggcagccccacctccacagaggagggaaccagcaccgagcccagcgaaggcagcgccccaggcaccagcaccgagcctagtgagggcggctctggcggcggcagcgcccaggagattaaacggatcaacaagatcagaagaagacttgtgaaagacagcaacaccaagaaggccggcaagacaggccccatgaaaaccctgctggttagagtgatgacacccgatctgagagagcggctggaaaacctgagaaagaagcctgaaaatatcccccagcccatcagcaatacatctagagccaacctgaataagctgctgaccgattacaccgaaatgaagaaggcgatcctgcatgtgtactgggaagagttccagaaggaccctgtgggcctgatgagccgggtggcccagcctgccagcaagaagatcgatcagaacaagctgaaacctgagatggacgagaagggcaacctgaccaccgccggctttgcctgctctcagtgtggccagcccctgttcgtgtacaagctggagcaggtgtctgagaagggcaaggcttacaccaactacttcggacggtgcaatgtggccgagcacgaaaagctgatcctgctggcccagctgaagcccgagaaggatagcgacgaagccgtgacatatagcctgggaaagtttgggcagagggccctggatttctacagcattcatgtgaccaaggagtccacccaccccgtgaagcccctggcccagatcgccggaaacagatacgcctccggacctgtgggaaaggccctgagcgacgcatgtatgggcacaatcgcctccttcctgtctaagtaccaggacatcatcatcgaacaccagaaggtggtgaagggcaaccagaagagactggagagcctgcgggagctggccggcaaggaaaacctggaataccctagcgtgaccctgccacctcagcctcacaccaaggagggcgttgatgcctacaacgaagtgatcgcccgggtgcgaatgtgggtgaacctgaacctgtggcagaagctgaagctaagcagagatgatgccaagcctctgctgagactgaagggattcccttcctttcctctggtcgagagacaggccaacgaagtggactggtgggacatggtgtgtaacgtgaagaagctgatcaacgagaaaaaggaggatggcaaggtgttttggcagaatctggctggctacaagagacaggaagccctgagaccatacctgagcagcgaggaagatcggaagaagggaaagaaattcgctcggtaccagctgggcgacctgctgctgcacctggaaaagaagcacggcgaggactggggaaaggtgtacgacgaggcctgggagcggattgacaagaaagtggaaggcctgagcaagcacatcaagctggaagaggaacggagaagcgaggacgcccagagcaaggccgccctgaccgactggctgcgggctaaggccagcttcgtgatcgagggcctgaaggaggccgacaaggacgagttctgcagatgcgagctgaagctgcagaagtggtacggggacctgcggggaaagcccttcgccatcgaagccgagaacagcatcctggacatcagcggcttcagcaagcagtacaactgtgccttcatctggcagaaggacggcgtgaagaagctgaacctgtacctgatcatcaactacttcaagggcggcaagctgcggttcaagaagatcaaacctgaagccttcgaagccaacagattctacaccgtgatcaacaaaaagagcggcgagatcgtgcccatggaggtgaacttcaacttcgacgaccccaacctgatcatcctgcctctggcctttggcaagagacagggcagagaattcatctggaacgacctgctgtccctggaaaccggcagcctgaagctggccaacggaagagtgatcgagaagacactgtacaacagaagaacccggcaggatgagcctgccctgttcgtggccctgaccttcgagcggcgggaggtcctggactcctccaatatcaaaccaatgaacctgatcggcgtggcaagaggcgaaaacatccccgccgtgatcgccctgaccgaccccgagggctgcccactgagccggtttaaggatagcctgggaaacccaacccacatcctgagaatcggcgagagctataaggagaagcagcggaccatccaggccaagaaggaggtggagcagcggagagccggcggctacagccggaagtacgccagcaaagccaagaatctggcagacgatatggtgagaaacaccgctagagatctgctgtactacgccgtgacccaggatgccatgctgatcttcgccaacctgagccggggcttcggccggcagggcaagcggaccttcatggccgagagacagtacacacggatggaggactggctgaccgccaagctggcctacgagggcctgagcaagacctacctgtccaagacactggcccagtacacctccaagacatgcagcaactgtgggtttaccatcaccagcgccgactacgacagggtgctggagaagctgaagaagacagcaacaggctggatgaccacaattaacggcaaggagctgaaggtggagggccagattacctactacaacagatacaagagacagaacgtagtcaaggacctgtccgtcgagctggatagactgagcgaagaatctgtgaacaacgacatctcctcctggacaaagggcagaagcggagaagctctgagcctcctgaagaaaagattctcccatagacccgtgcaggagaagttcgtgtgcctgaactgcggcttcgagacacacgcagccgagcaagccgccctgaacatcgccagatcctggctgttcctgcggagccaggagtacaagaaataccagacaaacaagacaaccggcaacaccgataagagagccttcgtcgagacctggcagtccttttaccggaagaagcttaaggaggtgtggaaacctgccgtgcggtctggcggatctggcggaggctccacaagcgagcccctgaagttcagagacgtggccatcgagttcagcctggaggagtggcagtgcctggacaccatccagcagaacctgtacagaaacgtgatgctggagaactacagaaacctggtgttcctgggcatcgtggtgagcaagcccgacctgatcacctgcctggagcaggagaaggagccctggaccagaaagagacacagaatggtggccgagccccccgtgatctgcagccacttcaccagccccaagaaaaagagaaaagtctaagctgccttctgcggggcttgccttctggccatgcccttcttctctcccttgcacctgtacctcttggtctttgaataaagcctgagtaggaaggctagcaaaaaaaaaaaaaaaaaaaaaaaaaaaaaaaaaaaaaaaaaaaaaaaaaaaaaaaaaaaaaaaaaaaaaaaaaaaaaaaa

SEQ ID NO: 3319 - RNA, 5419 nt, synthetic construct
  source 1..5419: mol_type = other RNA
aggaaataagagagaaaagaagagtaagaagaaatataagagccaccatggcccctaagaagaagcgtaaagtgagccgggtgaacggcagcggcagcggcggcggcatgaaccacgaccaggagttcgacccccctaaggtgtaccctcccgtccccgccgagaagagaaagcccatccgggtcctgagcctgttcgatggcatcgccaccggtctgctggtgctgaaggacctgggcatccaggtggataggtacattgcctccgaggtgtgcgaggactccatcaccgtgggaatggtgcgtcatcagggcaagatcatgtacgtgggcgacgtgcggagcgtgacacagaagcatatccaggagtggggccctttcgacctggtgatcggcggcagcccttgcaatgacctgagcatcgtgaacccagcccggaagggcctgtacgagggaaccggcagactgttcttcgagttttacagactgctgcacgacgcccggcctaaggaaggcgacgaccggcccttcttttggctgttcgagaatgtggtggccatgggagtcagcgacaagcgggatattagccggttcctggagagcaaccccgtgatgatcgatgccaaggaagtgagcgccgcccaccgggccagatacttctggggcaatctgcctggcatgaacagacccctggccagcaccgtgaacgacaagctggagctgcaggagtgcctggagcacggccggatcgccaagttcagcaaggtgagaaccatcaccacccgaagcaacagcatcaaacaaggcaaggaccagcactttcctgtgttcatgaacgagaaggaggacatcctgtggtgtaccgagatggagagagtgttcgggttcccagtccactacacagatgtcagcaacatgtctagactggccagacagagactgctgggaagaagctggtccgtccctgtgatcagacacctgttcgcccctctgaaggagtacttcgcctgcgtgagcagcggcaacagcaacgccaacagccggggccccagcttctctagcggcctggtgccactgtccctgagagggagccacatgggccccatggagatctacaaaaccgtgagcgcctggaagcggcagcctgtgcgcgtgctgagcctgtttcggaatatcgataaagtcctgaaaagcctgggattcctggagagcggctctggctccggcggtggcaccctgaagtacgtggaggatgtgacaaacgtggtcagacgggatgtggagaagtggggccccttcgatctggtgtacggcagcacccaacccctgggcagctcttgtgaccggtgccctggctggtacatgtttcagttccaccggatcctgcagtacgccctgccgagacaggagtcccagcggccattcttttggattttcatggacaacttgctgctgaccgaggatgaccaggaaactaccactcggttcctgcagaccgaagccgtgaccctgcaggacgtgagaggccgggactaccagaacgccatgcgggtgtggtccaacatccctggactgaaaagcaagcacgcacctctgacccctaaagaagaggagtacctgcaggcccaggtgcggagcagaagcaagctggacgcccctaaggtggatctgctggtgaagaattgcctcctgcccctgagagagtacttcaagtatttcagccagaatagtctgcccctgggcggcccaagcagcggcgcccctcctcccagcggcggcagcccagccggctccccaacctctaccgaggagggcacctctgagtccgccacccccgagagcggccctggcacctccaccgagcccagcgagggcagcgcacccggcagccctgccggcagccccacctccacagaggagggaaccagcaccgagcccagcgaaggcagcgccccaggcaccagcaccgagcctagtgagggcggctctggcggcggcagcgcccaggagattaaacggatcaacaagatcagaagaagacttgtgaaagacagcaacaccaagaaggccggcaagacaggccccatgaaaaccctgctggttagagtgatgacacccgatctgagagagcggctggaaaacctgagaaagaagcctgaaaatatcccccagcccatcagcaatacatctagagccaacctgaataagctgctgaccgattacaccgaaatgaagaaggcgatcctgcatgtgtactgggaagagttccagaaggaccctgtgggcctgatgagccgggtggcccagcctgccagcaagaagatcgatcagaacaagctgaaacctgagatggacgagaagggcaacctgaccaccgccggctttgcctgctctcagtgtggccagcccctgttcgtgtacaagctggagcaggtgtctgagaagggcaaggcttacaccaactacttcggacggtgcaatgtggccgagcacgaaaagctgatcctgctggcccagctgaagcccgagaaggatagcgacgaagccgtgacatatagcctgggaaagtttgggcagagggccctggatttctacagcattcatgtgaccaaggagtccacccaccccgtgaagcccctggcccagatcgccggaaacagatacgcctccggacctgtgggaaaggccctgagcgacgcatgtatgggcacaatcgcctccttcctgtctaagtaccaggacatcatcatcgaacaccagaaggtggtgaagggcaaccagaagagactggagagcctgcgggagctggccggcaaggaaaacctggaataccctagcgtgaccctgccacctcagcctcacaccaaggagggcgttgatgcctacaacgaagtgatcgcccgggtgcgaatgtgggtgaacctgaacctgtggcagaagctgaagctaagcagagatgatgccaagcctctgctgagactgaagggattcccttcctttcctctggtcgagagacaggccaacgaagtggactggtgggacatggtgtgtaacgtgaagaagctgatcaacgagaaaaaggaggatggcaaggtgttttggcagaatctggctggctacaagagacaggaagccctgagaccatacctgagcagcgaggaagatcggaagaagggaaagaaattcgctcggtaccagctgggcgacctgctgctgcacctggaaaagaagcacggcgaggactggggaaaggtgtacgacgaggcctgggagcggattgacaagaaagtggaaggcctgagcaagcacatcaagctggaagaggaacggagaagcgaggacgcccagagcaaggccgccctgaccgactggctgcgggctaaggccagcttcgtgatcgagggcctgaaggaggccgacaaggacgagttctgcagatgcgagctgaagctgcagaagtggtacggggacctgcggggaaagcccttcgccatcgaagccgagaacagcatcctggacatcagcggcttcagcaagcagtacaactgtgccttcatctggcagaaggacggcgtgaagaagctgaacctgtacctgatcatcaactacttcaagggcggcaagctgcggttcaagaagatcaaacctgaagccttcgaagccaacagattctacaccgtgatcaacaaaaagagcggcgagatcgtgcccatggaggtgaacttcaacttcgacgaccccaacctgatcatcctgcctctggcctttggcaagagacagggcagagaattcatctggaacgacctgctgtccctggaaaccggcagcctgaagctggccaacggaagagtgatcgagaagacactgtacaacagaagaacccggcaggatgagcctgccctgttcgtggccctgaccttcgagcggcgggaggtcctggactcctccaatatcaaaccaatgaacctgatcggcgtggcaagaggcgaaaacatccccgccgtgatcgccctgaccgaccccgagggctgcccactgagccggtttaaggatagcctgggaaacccaacccacatcctgagaatcggcgagagctataaggagaagcagcggaccatccaggccaagaaggaggtggagcagcggagagccggcggctacagccggaagtacgccagcaaagccaagaatctggcagacgatatggtgagaaacaccgctagagatctgctgtactacgccgtgacccaggatgccatgctgatcttcgccaacctgagccggggcttcggccggcagggcaagcggaccttcatggccgagagacagtacacacggatggaggactggctgaccgccaagctggcctacgagggcctgagcaagacctacctgtccaagacactggcccagtacacctccaagacatgcagcaactgtgggtttaccatcaccagcgccgactacgacagggtgctggagaagctgaagaagacagcaacaggctggatgaccacaattaacggcaaggagctgaaggtggagggccagattacctactacaacagatacaagagacagaacgtagtcaaggacctgtccgtcgagctggatagactgagcgaagaatctgtgaacaacgacatctcctcctggacaaagggcagaagcggagaagctctgagcctcctgaagaaaagattctcccatagacccgtgcaggagaagttcgtgtgcctgaactgcggcttcgagacacacgcagccgagcaagccgccctgaacatcgccagatcctggctgttcctgcggagccaggagtacaagaaataccagacaaacaagacaaccggcaacaccgataagagagccttcgtcgagacctggcagtccttttaccggaagaagcttaaggaggtgtggaaacctgccgtgcggtctggcggatctggcggaggctccacaagcctgctgaccttcgaggacgtggccgtgagcttcagcgaggaggagtggaagctgctggaccccgcccagaagatcctgtacaacgacgtgatgcaggagaactacgagaccgtgatcagcctgggcctgaagctgaagaacgacaccggcaacgaccagcccatcagcgtgagcgccctggagatccaggccagcggcaggaaggtgctgaggaaggccaggatgaaggtggcccagaagaccaccagccccaagaaaaagagaaaagtctaagctgccttctgcggggcttgccttctggccatgcccttcttctctcccttgcacctgtacctcttggtctttgaataaagcctgagtaggaaggctagcaaaaaaaaaaaaaaaaaaaaaaaaaaaaaaaaaaaaaaaaaaaaaaaaaaaaaaaaaaaaaaaaaaaaaaaaaaaaaaaa

SEQ ID NO: 3320 - RNA, 5419 nt, synthetic construct
  source 1..5419: mol_type = other RNA
aggaaataagagagaaaagaagagtaagaagaaatataagagccaccatggcccctaagaagaagcgtaaagtgagccgggtgaacggcagcggcagcggcggcggcatgaaccacgaccaggagttcgacccccctaaggtgtaccctcccgtccccgccgagaagagaaagcccatccgggtcctgagcctgttcgatggcatcgccaccggtctgctggtgctgaaggacctgggcatccaggtggataggtacattgcctccgaggtgtgcgaggactccatcaccgtgggaatggtgcgtcatcagggcaagatcatgtacgtgggcgacgtgcggagcgtgacacagaagcatatccaggagtggggccctttcgacctggtgatcggcggcagcccttgcaatgacctgagcatcgtgaacccagcccggaagggcctgtacgagggaaccggcagactgttcttcgagttttacagactgctgcacgacgcccggcctaaggaaggcgacgaccggcccttcttttggctgttcgagaatgtggtggccatgggagtcagcgacaagcgggatattagccggttcctggagagcaaccccgtgatgatcgatgccaaggaagtgagcgccgcccaccgggccagatacttctggggcaatctgcctggcatgaacagacccctggccagcaccgtgaacgacaagctggagctgcaggagtgcctggagcacggccggatcgccaagttcagcaaggtgagaaccatcaccacccgaagcaacagcatcaaacaaggcaaggaccagcactttcctgtgttcatgaacgagaaggaggacatcctgtggtgtaccgagatggagagagtgttcgggttcccagtccactacacagatgtcagcaacatgtctagactggccagacagagactgctgggaagaagctggtccgtccctgtgatcagacacctgttcgcccctctgaaggagtacttcgcctgcgtgagcagcggcaacagcaacgccaacagccggggccccagcttctctagcggcctggtgccactgtccctgagagggagccacatgggccccatggagatctacaaaaccgtgagcgcctggaagcggcagcctgtgcgcgtgctgagcctgtttcggaatatcgataaagtcctgaaaagcctgggattcctggagagcggctctggctccggcggtggcaccctgaagtacgtggaggatgtgacaaacgtggtcagacgggatgtggagaagtggggccccttcgatctggtgtacggcagcacccaacccctgggcagctcttgtgaccggtgccctggctggtacatgtttcagttccaccggatcctgcagtacgccctgccgagacaggagtcccagcggccattcttttggattttcatggacaacttgctgctgaccgaggatgaccaggaaactaccactcggttcctgcagaccgaagccgtgaccctgcaggacgtgagaggccgggactaccagaacgccatgcgggtgtggtccaacatccctggactgaaaagcaagcacgcacctctgacccctaaagaagaggagtacctgcaggcccaggtgcggagcagaagcaagctggacgcccctaaggtggatctgctggtgaagaattgcctcctgcccctgagagagtacttcaagtatttcagccagaatagtctgcccctgggcggcccaagcagcggcgcccctcctcccagcggcggcagcccagccggctccccaacctctaccgaggagggcacctctgagtccgccacccccgagagcggccctggcacctccaccgagcccagcgagggcagcgcacccggcagccctgccggcagccccacctccacagaggagggaaccagcaccgagcccagcgaaggcagcgccccaggcaccagcaccgagcctagtgagggcggctctggcggcggcagcgcccaggagattaaacggatcaacaagatcagaagaagacttgtgaaagacagcaacaccaagaaggccggcaagacaggccccatgaaaaccctgctggttagagtgatgacacccgatctgagagagcggctggaaaacctgagaaagaagcctgaaaatatcccccagcccatcagcaatacatctagagccaacctgaataagctgctgaccgattacaccgaaatgaagaaggcgatcctgcatgtgtactgggaagagttccagaaggaccctgtgggcctgatgagccgggtggcccagcctgccagcaagaagatcgatcagaacaagctgaaacctgagatggacgagaagggcaacctgaccaccgccggctttgcctgctctcagtgtggccagcccctgttcgtgtacaagctggagcaggtgtctgagaagggcaaggcttacaccaactacttcggacggtgcaatgtggccgagcacgaaaagctgatcctgctggcccagctgaagcccgagaaggatagcgacgaagccgtgacatatagcctgggaaagtttgggcagagggccctggatttctacagcattcatgtgaccaaggagtccacccaccccgtgaagcccctggcccagatcgccggaaacagatacgcctccggacctgtgggaaaggccctgagcgacgcatgtatgggcacaatcgcctccttcctgtctaagtaccaggacatcatcatcgaacaccagaaggtggtgaagggcaaccagaagagactggagagcctgcgggagctggccggcaaggaaaacctggaataccctagcgtgaccctgccacctcagcctcacaccaaggagggcgttgatgcctacaacgaagtgatcgcccgggtgcgaatgtgggtgaacctgaacctgtggcagaagctgaagctaagcagagatgatgccaagcctctgctgagactgaagggattcccttcctttcctctggtcgagagacaggccaacgaagtggactggtgggacatggtgtgtaacgtgaagaagctgatcaacgagaaaaaggaggatggcaaggtgttttggcagaatctggctggctacaagagacaggaagccctgagaccatacctgagcagcgaggaagatcggaagaagggaaagaaattcgctcggtaccagctgggcgacctgctgctgcacctggaaaagaagcacggcgaggactggggaaaggtgtacgacgaggcctgggagcggattgacaagaaagtggaaggcctgagcaagcacatcaagctggaagaggaacggagaagcgaggacgcccagagcaaggccgccctgaccgactggctgcgggctaaggccagcttcgtgatcgagggcctgaaggaggccgacaaggacgagttctgcagatgcgagctgaagctgcagaagtggtacggggacctgcggggaaagcccttcgccatcgaagccgagaacagcatcctggacatcagcggcttcagcaagcagtacaactgtgccttcatctggcagaaggacggcgtgaagaagctgaacctgtacctgatcatcaactacttcaagggcggcaagctgcggttcaagaagatcaaacctgaagccttcgaagccaacagattctacaccgtgatcaacaaaaagagcggcgagatcgtgcccatggaggtgaacttcaacttcgacgaccccaacctgatcatcctgcctctggcctttggcaagagacagggcagagaattcatctggaacgacctgctgtccctggaaaccggcagcctgaagctggccaacggaagagtgatcgagaagacactgtacaacagaagaacccggcaggatgagcctgccctgttcgtggccctgaccttcgagcggcgggaggtcctggactcctccaatatcaaaccaatgaacctgatcggcgtggcaagaggcgaaaacatccccgccgtgatcgccctgaccgaccccgagggctgcccactgagccggtttaaggatagcctgggaaacccaacccacatcctgagaatcggcgagagctataaggagaagcagcggaccatccaggccaagaaggaggtggagcagcggagagccggcggctacagccggaagtacgccagcaaagccaagaatctggcagacgatatggtgagaaacaccgctagagatctgctgtactacgccgtgacccaggatgccatgctgatcttcgccaacctgagccggggcttcggccggcagggcaagcggaccttcatggccgagagacagtacacacggatggaggactggctgaccgccaagctggcctacgagggcctgagcaagacctacctgtccaagacactggcccagtacacctccaagacatgcagcaactgtgggtttaccatcaccagcgccgactacgacagggtgctggagaagctgaagaagacagcaacaggctggatgaccacaattaacggcaaggagctgaaggtggagggccagattacctactacaacagatacaagagacagaacgtagtcaaggacctgtccgtcgagctggatagactgagcgaagaatctgtgaacaacgacatctcctcctggacaaagggcagaagcggagaagctctgagcctcctgaagaaaagattctcccatagacccgtgcaggagaagttcgtgtgcctgaactgcggcttcgagacacacgcagccgagcaagccgccctgaacatcgccagatcctggctgttcctgcggagccaggagtacaagaaataccagacaaacaagacaaccggcaacaccgataagagagccttcgtcgagacctggcagtccttttaccggaagaagcttaaggaggtgtggaaacctgccgtgcggtctggcggatctggcggaggctccacaagcccccagggctgcgccatcagcgaggacgtgttcgtgtacttcagcagggaggagtgggtgctgctggacgaggaccagaggctgctgtacagggacgtgatgctggagaacttcgccctgctggccagcctgggcatcgccagcagcaggagccacctggtgacccagctggagcagggcgaggagccctggatgcccgcccaggtggacatgacccccgccaccgagaaggaggcccagaagaccagccccaagaaaaagagaaaagtctaagctgccttctgcggggcttgccttctggccatgcccttcttctctcccttgcacctgtacctcttggtctttgaataaagcctgagtaggaaggctagcaaaaaaaaaaaaaaaaaaaaaaaaaaaaaaaaaaaaaaaaaaaaaaaaaaaaaaaaaaaaaaaaaaaaaaaaaaaaaaaa

SEQ ID NO: 3321 - RNA, 5419 nt, synthetic construct
  source 1..5419: mol_type = other RNA
aggaaataagagagaaaagaagagtaagaagaaatataagagccaccatggcccctaagaagaagcgtaaagtgagccgggtgaacggcagcggcagcggcggcggcatgaaccacgaccaggagttcgacccccctaaggtgtaccctcccgtccccgccgagaagagaaagcccatccgggtcctgagcctgttcgatggcatcgccaccggtctgctggtgctgaaggacctgggcatccaggtggataggtacattgcctccgaggtgtgcgaggactccatcaccgtgggaatggtgcgtcatcagggcaagatcatgtacgtgggcgacgtgcggagcgtgacacagaagcatatccaggagtggggccctttcgacctggtgatcggcggcagcccttgcaatgacctgagcatcgtgaacccagcccggaagggcctgtacgagggaaccggcagactgttcttcgagttttacagactgctgcacgacgcccggcctaaggaaggcgacgaccggcccttcttttggctgttcgagaatgtggtggccatgggagtcagcgacaagcgggatattagccggttcctggagagcaaccccgtgatgatcgatgccaaggaagtgagcgccgcccaccgggccagatacttctggggcaatctgcctggcatgaacagacccctggccagcaccgtgaacgacaagctggagctgcaggagtgcctggagcacggccggatcgccaagttcagcaaggtgagaaccatcaccacccgaagcaacagcatcaaacaaggcaaggaccagcactttcctgtgttcatgaacgagaaggaggacatcctgtggtgtaccgagatggagagagtgttcgggttcccagtccactacacagatgtcagcaacatgtctagactggccagacagagactgctgggaagaagctggtccgtccctgtgatcagacacctgttcgcccctctgaaggagtacttcgcctgcgtgagcagcggcaacagcaacgccaacagccggggccccagcttctctagcggcctggtgccactgtccctgagagggagccacatgggccccatggagatctacaaaaccgtgagcgcctggaagcggcagcctgtgcgcgtgctgagcctgtttcggaatatcgataaagtcctgaaaagcctgggattcctggagagcggctctggctccggcggtggcaccctgaagtacgtggaggatgtgacaaacgtggtcagacgggatgtggagaagtggggccccttcgatctggtgtacggcagcacccaacccctgggcagctcttgtgaccggtgccctggctggtacatgtttcagttccaccggatcctgcagtacgccctgccgagacaggagtcccagcggccattcttttggattttcatggacaacttgctgctgaccgaggatgaccaggaaactaccactcggttcctgcagaccgaagccgtgaccctgcaggacgtgagaggccgggactaccagaacgccatgcgggtgtggtccaacatccctggactgaaaagcaagcacgcacctctgacccctaaagaagaggagtacctgcaggcccaggtgcggagcagaagcaagctggacgcccctaaggtggatctgctggtgaagaattgcctcctgcccctgagagagtacttcaagtatttcagccagaatagtctgcccctgggcggcccaagcagcggcgcccctcctcccagcggcggcagcccagccggctccccaacctctaccgaggagggcacctctgagtccgccacccccgagagcggccctggcacctccaccgagcccagcgagggcagcgcacccggcagccctgccggcagccccacctccacagaggagggaaccagcaccgagcccagcgaaggcagcgccccaggcaccagcaccgagcctagtgagggcggctctggcggcggcagcgcccaggagattaaacggatcaacaagatcagaagaagacttgtgaaagacagcaacaccaagaaggccggcaagacaggccccatgaaaaccctgctggttagagtgatgacacccgatctgagagagcggctggaaaacctgagaaagaagcctgaaaatatcccccagcccatcagcaatacatctagagccaacctgaataagctgctgaccgattacaccgaaatgaagaaggcgatcctgcatgtgtactgggaagagttccagaaggaccctgtgggcctgatgagccgggtggcccagcctgccagcaagaagatcgatcagaacaagctgaaacctgagatggacgagaagggcaacctgaccaccgccggctttgcctgctctcagtgtggccagcccctgttcgtgtacaagctggagcaggtgtctgagaagggcaaggcttacaccaactacttcggacggtgcaatgtggccgagcacgaaaagctgatcctgctggcccagctgaagcccgagaaggatagcgacgaagccgtgacatatagcctgggaaagtttgggcagagggccctggatttctacagcattcatgtgaccaaggagtccacccaccccgtgaagcccctggcccagatcgccggaaacagatacgcctccggacctgtgggaaaggccctgagcgacgcatgtatgggcacaatcgcctccttcctgtctaagtaccaggacatcatcatcgaacaccagaaggtggtgaagggcaaccagaagagactggagagcctgcgggagctggccggcaaggaaaacctggaataccctagcgtgaccctgccacctcagcctcacaccaaggagggcgttgatgcctacaacgaagtgatcgcccgggtgcgaatgtgggtgaacctgaacctgtggcagaagctgaagctaagcagagatgatgccaagcctctgctgagactgaagggattcccttcctttcctctggtcgagagacaggccaacgaagtggactggtgggacatggtgtgtaacgtgaagaagctgatcaacgagaaaaaggaggatggcaaggtgttttggcagaatctggctggctacaagagacaggaagccctgagaccatacctgagcagcgaggaagatcggaagaagggaaagaaattcgctcggtaccagctgggcgacctgctgctgcacctggaaaagaagcacggcgaggactggggaaaggtgtacgacgaggcctgggagcggattgacaagaaagtggaaggcctgagcaagcacatcaagctggaagaggaacggagaagcgaggacgcccagagcaaggccgccctgaccgactggctgcgggctaaggccagcttcgtgatcgagggcctgaaggaggccgacaaggacgagttctgcagatgcgagctgaagctgcagaagtggtacggggacctgcggggaaagcccttcgccatcgaagccgagaacagcatcctggacatcagcggcttcagcaagcagtacaactgtgccttcatctggcagaaggacggcgtgaagaagctgaacctgtacctgatcatcaactacttcaagggcggcaagctgcggttcaagaagatcaaacctgaagccttcgaagccaacagattctacaccgtgatcaacaaaaagagcggcgagatcgtgcccatggaggtgaacttcaacttcgacgaccccaacctgatcatcctgcctctggcctttggcaagagacagggcagagaattcatctggaacgacctgctgtccctggaaaccggcagcctgaagctggccaacggaagagtgatcgagaagacactgtacaacagaagaacccggcaggatgagcctgccctgttcgtggccctgaccttcgagcggcgggaggtcctggactcctccaatatcaaaccaatgaacctgatcggcgtggcaagaggcgaaaacatccccgccgtgatcgccctgaccgaccccgagggctgcccactgagccggtttaaggatagcctgggaaacccaacccacatcctgagaatcggcgagagctataaggagaagcagcggaccatccaggccaagaaggaggtggagcagcggagagccggcggctacagccggaagtacgccagcaaagccaagaatctggcagacgatatggtgagaaacaccgctagagatctgctgtactacgccgtgacccaggatgccatgctgatcttcgccaacctgagccggggcttcggccggcagggcaagcggaccttcatggccgagagacagtacacacggatggaggactggctgaccgccaagctggcctacgagggcctgagcaagacctacctgtccaagacactggcccagtacacctccaagacatgcagcaactgtgggtttaccatcaccagcgccgactacgacagggtgctggagaagctgaagaagacagcaacaggctggatgaccacaattaacggcaaggagctgaaggtggagggccagattacctactacaacagatacaagagacagaacgtagtcaaggacctgtccgtcgagctggatagactgagcgaagaatctgtgaacaacgacatctcctcctggacaaagggcagaagcggagaagctctgagcctcctgaagaaaagattctcccatagacccgtgcaggagaagttcgtgtgcctgaactgcggcttcgagacacacgcagccgagcaagccgccctgaacatcgccagatcctggctgttcctgcggagccaggagtacaagaaataccagacaaacaagacaaccggcaacaccgataagagagccttcgtcgagacctggcagtccttttaccggaagaagcttaaggaggtgtggaaacctgccgtgcggtctggcggatctggcggaggctccacaagcgtgcagggcagcgtgaccttcagggacgtggccgtgctgttcagccaggacgagtggctgcacctggacaccgcccagaggaccctgtacagggaggtgatgctggagaactacagcaacctggtgagcctgggcatcctgttcagcaagcccaaggtgatcagccagctggagcagggccaggacccctggaaggtggagcacggcgccccccagggcacctgccccggctgggagagcctgaccagccccaagaaaaagagaaaagtctaagctgccttctgcggggcttgccttctggccatgcccttcttctctcccttgcacctgtacctcttggtctttgaataaagcctgagtaggaaggctagcaaaaaaaaaaaaaaaaaaaaaaaaaaaaaaaaaaaaaaaaaaaaaaaaaaaaaaaaaaaaaaaaaaaaaaaaaaaaaaaa

SEQ ID NO: 3322 - RNA, 5419 nt, synthetic construct
  source 1..5419: mol_type = other RNA
aggaaataagagagaaaagaagagtaagaagaaatataagagccaccatggcccctaagaagaagcgtaaagtgagccgggtgaacggcagcggcagcggcggcggcatgaaccacgaccaggagttcgacccccctaaggtgtaccctcccgtccccgccgagaagagaaagcccatccgggtcctgagcctgttcgatggcatcgccaccggtctgctggtgctgaaggacctgggcatccaggtggataggtacattgcctccgaggtgtgcgaggactccatcaccgtgggaatggtgcgtcatcagggcaagatcatgtacgtgggcgacgtgcggagcgtgacacagaagcatatccaggagtggggccctttcgacctggtgatcggcggcagcccttgcaatgacctgagcatcgtgaacccagcccggaagggcctgtacgagggaaccggcagactgttcttcgagttttacagactgctgcacgacgcccggcctaaggaaggcgacgaccggcccttcttttggctgttcgagaatgtggtggccatgggagtcagcgacaagcgggatattagccggttcctggagagcaaccccgtgatgatcgatgccaaggaagtgagcgccgcccaccgggccagatacttctggggcaatctgcctggcatgaacagacccctggccagcaccgtgaacgacaagctggagctgcaggagtgcctggagcacggccggatcgccaagttcagcaaggtgagaaccatcaccacccgaagcaacagcatcaaacaaggcaaggaccagcactttcctgtgttcatgaacgagaaggaggacatcctgtggtgtaccgagatggagagagtgttcgggttcccagtccactacacagatgtcagcaacatgtctagactggccagacagagactgctgggaagaagctggtccgtccctgtgatcagacacctgttcgcccctctgaaggagtacttcgcctgcgtgagcagcggcaacagcaacgccaacagccggggccccagcttctctagcggcctggtgccactgtccctgagagggagccacatgggccccatggagatctacaaaaccgtgagcgcctggaagcggcagcctgtgcgcgtgctgagcctgtttcggaatatcgataaagtcctgaaaagcctgggattcctggagagcggctctggctccggcggtggcaccctgaagtacgtggaggatgtgacaaacgtggtcagacgggatgtggagaagtggggccccttcgatctggtgtacggcagcacccaacccctgggcagctcttgtgaccggtgccctggctggtacatgtttcagttccaccggatcctgcagtacgccctgccgagacaggagtcccagcggccattcttttggattttcatggacaacttgctgctgaccgaggatgaccaggaaactaccactcggttcctgcagaccgaagccgtgaccctgcaggacgtgagaggccgggactaccagaacgccatgcgggtgtggtccaacatccctggactgaaaagcaagcacgcacctctgacccctaaagaagaggagtacctgcaggcccaggtgcggagcagaagcaagctggacgcccctaaggtggatctgctggtgaagaattgcctcctgcccctgagagagtacttcaagtatttcagccagaatagtctgcccctgggcggcccaagcagcggcgcccctcctcccagcggcggcagcccagccggctccccaacctctaccgaggagggcacctctgagtccgccacccccgagagcggccctggcacctccaccgagcccagcgagggcagcgcacccggcagccctgccggcagccccacctccacagaggagggaaccagcaccgagcccagcgaaggcagcgccccaggcaccagcaccgagcctagtgagggcggctctggcggcggcagcgcccaggagattaaacggatcaacaagatcagaagaagacttgtgaaagacagcaacaccaagaaggccggcaagacaggccccatgaaaaccctgctggttagagtgatgacacccgatctgagagagcggctggaaaacctgagaaagaagcctgaaaatatcccccagcccatcagcaatacatctagagccaacctgaataagctgctgaccgattacaccgaaatgaagaaggcgatcctgcatgtgtactgggaagagttccagaaggaccctgtgggcctgatgagccgggtggcccagcctgccagcaagaagatcgatcagaacaagctgaaacctgagatggacgagaagggcaacctgaccaccgccggctttgcctgctctcagtgtggccagcccctgttcgtgtacaagctggagcaggtgtctgagaagggcaaggcttacaccaactacttcggacggtgcaatgtggccgagcacgaaaagctgatcctgctggcccagctgaagcccgagaaggatagcgacgaagccgtgacatatagcctgggaaagtttgggcagagggccctggatttctacagcattcatgtgaccaaggagtccacccaccccgtgaagcccctggcccagatcgccggaaacagatacgcctccggacctgtgggaaaggccctgagcgacgcatgtatgggcacaatcgcctccttcctgtctaagtaccaggacatcatcatcgaacaccagaaggtggtgaagggcaaccagaagagactggagagcctgcgggagctggccggcaaggaaaacctggaataccctagcgtgaccctgccacctcagcctcacaccaaggagggcgttgatgcctacaacgaagtgatcgcccgggtgcgaatgtgggtgaacctgaacctgtggcagaagctgaagctaagcagagatgatgccaagcctctgctgagactgaagggattcccttcctttcctctggtcgagagacaggccaacgaagtggactggtgggacatggtgtgtaacgtgaagaagctgatcaacgagaaaaaggaggatggcaaggtgttttggcagaatctggctggctacaagagacaggaagccctgagaccatacctgagcagcgaggaagatcggaagaagggaaagaaattcgctcggtaccagctgggcgacctgctgctgcacctggaaaagaagcacggcgaggactggggaaaggtgtacgacgaggcctgggagcggattgacaagaaagtggaaggcctgagcaagcacatcaagctggaagaggaacggagaagcgaggacgcccagagcaaggccgccctgaccgactggctgcgggctaaggccagcttcgtgatcgagggcctgaaggaggccgacaaggacgagttctgcagatgcgagctgaagctgcagaagtggtacggggacctgcggggaaagcccttcgccatcgaagccgagaacagcatcctggacatcagcggcttcagcaagcagtacaactgtgccttcatctggcagaaggacggcgtgaagaagctgaacctgtacctgatcatcaactacttcaagggcggcaagctgcggttcaagaagatcaaacctgaagccttcgaagccaacagattctacaccgtgatcaacaaaaagagcggcgagatcgtgcccatggaggtgaacttcaacttcgacgaccccaacctgatcatcctgcctctggcctttggcaagagacagggcagagaattcatctggaacgacctgctgtccctggaaaccggcagcctgaagctggccaacggaagagtgatcgagaagacactgtacaacagaagaacccggcaggatgagcctgccctgttcgtggccctgaccttcgagcggcgggaggtcctggactcctccaatatcaaaccaatgaacctgatcggcgtggcaagaggcgaaaacatccccgccgtgatcgccctgaccgaccccgagggctgcccactgagccggtttaaggatagcctgggaaacccaacccacatcctgagaatcggcgagagctataaggagaagcagcggaccatccaggccaagaaggaggtggagcagcggagagccggcggctacagccggaagtacgccagcaaagccaagaatctggcagacgatatggtgagaaacaccgctagagatctgctgtactacgccgtgacccaggatgccatgctgatcttcgccaacctgagccggggcttcggccggcagggcaagcggaccttcatggccgagagacagtacacacggatggaggactggctgaccgccaagctggcctacgagggcctgagcaagacctacctgtccaagacactggcccagtacacctccaagacatgcagcaactgtgggtttaccatcaccagcgccgactacgacagggtgctggagaagctgaagaagacagcaacaggctggatgaccacaattaacggcaaggagctgaaggtggagggccagattacctactacaacagatacaagagacagaacgtagtcaaggacctgtccgtcgagctggatagactgagcgaagaatctgtgaacaacgacatctcctcctggacaaagggcagaagcggagaagctctgagcctcctgaagaaaagattctcccatagacccgtgcaggagaagttcgtgtgcctgaactgcggcttcgagacacacgcagccgagcaagccgccctgaacatcgccagatcctggctgttcctgcggagccaggagtacaagaaataccagacaaacaagacaaccggcaacaccgataagagagccttcgtcgagacctggcagtccttttaccggaagaagcttaaggaggtgtggaaacctgccgtgcggtctggcggatctggcggaggctccacaagccaccaggacctggtgaccttcaaggacgtggccgtgtacttcacccagaccgagtgggccggcctgagccccgcccagaaggccctgtacaggagcgtgatgctggagaactacggcaacctgaccagcctgggctaccccgtgcccaagcccgccctgatcagcctgctggagggcggcaacctgccctggggcctggaggcccaggacaaccccagcgccgagaggaccaaggacatctgcaccagccccaagaaaaagagaaaagtctaagctgccttctgcggggcttgccttctggccatgcccttcttctctcccttgcacctgtacctcttggtctttgaataaagcctgagtaggaaggctagcaaaaaaaaaaaaaaaaaaaaaaaaaaaaaaaaaaaaaaaaaaaaaaaaaaaaaaaaaaaaaaaaaaaaaaaaaaaaaaaa

SEQ ID NO: 3323 - RNA, 5419 nt, synthetic construct
  source 1..5419: mol_type = other RNA
aggaaataagagagaaaagaagagtaagaagaaatataagagccaccatggcccctaagaagaagcgtaaagtgagccgggtgaacggcagcggcagcggcggcggcatgaaccacgaccaggagttcgacccccctaaggtgtaccctcccgtccccgccgagaagagaaagcccatccgggtcctgagcctgttcgatggcatcgccaccggtctgctggtgctgaaggacctgggcatccaggtggataggtacattgcctccgaggtgtgcgaggactccatcaccgtgggaatggtgcgtcatcagggcaagatcatgtacgtgggcgacgtgcggagcgtgacacagaagcatatccaggagtggggccctttcgacctggtgatcggcggcagcccttgcaatgacctgagcatcgtgaacccagcccggaagggcctgtacgagggaaccggcagactgttcttcgagttttacagactgctgcacgacgcccggcctaaggaaggcgacgaccggcccttcttttggctgttcgagaatgtggtggccatgggagtcagcgacaagcgggatattagccggttcctggagagcaaccccgtgatgatcgatgccaaggaagtgagcgccgcccaccgggccagatacttctggggcaatctgcctggcatgaacagacccctggccagcaccgtgaacgacaagctggagctgcaggagtgcctggagcacggccggatcgccaagttcagcaaggtgagaaccatcaccacccgaagcaacagcatcaaacaaggcaaggaccagcactttcctgtgttcatgaacgagaaggaggacatcctgtggtgtaccgagatggagagagtgttcgggttcccagtccactacacagatgtcagcaacatgtctagactggccagacagagactgctgggaagaagctggtccgtccctgtgatcagacacctgttcgcccctctgaaggagtacttcgcctgcgtgagcagcggcaacagcaacgccaacagccggggccccagcttctctagcggcctggtgccactgtccctgagagggagccacatgggccccatggagatctacaaaaccgtgagcgcctggaagcggcagcctgtgcgcgtgctgagcctgtttcggaatatcgataaagtcctgaaaagcctgggattcctggagagcggctctggctccggcggtggcaccctgaagtacgtggaggatgtgacaaacgtggtcagacgggatgtggagaagtggggccccttcgatctggtgtacggcagcacccaacccctgggcagctcttgtgaccggtgccctggctggtacatgtttcagttccaccggatcctgcagtacgccctgccgagacaggagtcccagcggccattcttttggattttcatggacaacttgctgctgaccgaggatgaccaggaaactaccactcggttcctgcagaccgaagccgtgaccctgcaggacgtgagaggccgggactaccagaacgccatgcgggtgtggtccaacatccctggactgaaaagcaagcacgcacctctgacccctaaagaagaggagtacctgcaggcccaggtgcggagcagaagcaagctggacgcccctaaggtggatctgctggtgaagaattgcctcctgcccctgagagagtacttcaagtatttcagccagaatagtctgcccctgggcggcccaagcagcggcgcccctcctcccagcggcggcagcccagccggctccccaacctctaccgaggagggcacctctgagtccgccacccccgagagcggccctggcacctccaccgagcccagcgagggcagcgcacccggcagccctgccggcagccccacctccacagaggagggaaccagcaccgagcccagcgaaggcagcgccccaggcaccagcaccgagcctagtgagggcggctctggcggcggcagcgcccaggagattaaacggatcaacaagatcagaagaagacttgtgaaagacagcaacaccaagaaggccggcaagacaggccccatgaaaaccctgctggttagagtgatgacacccgatctgagagagcggctggaaaacctgagaaagaagcctgaaaatatcccccagcccatcagcaatacatctagagccaacctgaataagctgctgaccgattacaccgaaatgaagaaggcgatcctgcatgtgtactgggaagagttccagaaggaccctgtgggcctgatgagccgggtggcccagcctgccagcaagaagatcgatcagaacaagctgaaacctgagatggacgagaagggcaacctgaccaccgccggctttgcctgctctcagtgtggccagcccctgttcgtgtacaagctggagcaggtgtctgagaagggcaaggcttacaccaactacttcggacggtgcaatgtggccgagcacgaaaagctgatcctgctggcccagctgaagcccgagaaggatagcgacgaagccgtgacatatagcctgggaaagtttgggcagagggccctggatttctacagcattcatgtgaccaaggagtccacccaccccgtgaagcccctggcccagatcgccggaaacagatacgcctccggacctgtgggaaaggccctgagcgacgcatgtatgggcacaatcgcctccttcctgtctaagtaccaggacatcatcatcgaacaccagaaggtggtgaagggcaaccagaagagactggagagcctgcgggagctggccggcaaggaaaacctggaataccctagcgtgaccctgccacctcagcctcacaccaaggagggcgttgatgcctacaacgaagtgatcgcccgggtgcgaatgtgggtgaacctgaacctgtggcagaagctgaagctaagcagagatgatgccaagcctctgctgagactgaagggattcccttcctttcctctggtcgagagacaggccaacgaagtggactggtgggacatggtgtgtaacgtgaagaagctgatcaacgagaaaaaggaggatggcaaggtgttttggcagaatctggctggctacaagagacaggaagccctgagaccatacctgagcagcgaggaagatcggaagaagggaaagaaattcgctcggtaccagctgggcgacctgctgctgcacctggaaaagaagcacggcgaggactggggaaaggtgtacgacgaggcctgggagcggattgacaagaaagtggaaggcctgagcaagcacatcaagctggaagaggaacggagaagcgaggacgcccagagcaaggccgccctgaccgactggctgcgggctaaggccagcttcgtgatcgagggcctgaaggaggccgacaaggacgagttctgcagatgcgagctgaagctgcagaagtggtacggggacctgcggggaaagcccttcgccatcgaagccgagaacagcatcctggacatcagcggcttcagcaagcagtacaactgtgccttcatctggcagaaggacggcgtgaagaagctgaacctgtacctgatcatcaactacttcaagggcggcaagctgcggttcaagaagatcaaacctgaagccttcgaagccaacagattctacaccgtgatcaacaaaaagagcggcgagatcgtgcccatggaggtgaacttcaacttcgacgaccccaacctgatcatcctgcctctggcctttggcaagagacagggcagagaattcatctggaacgacctgctgtccctggaaaccggcagcctgaagctggccaacggaagagtgatcgagaagacactgtacaacagaagaacccggcaggatgagcctgccctgttcgtggccctgaccttcgagcggcgggaggtcctggactcctccaatatcaaaccaatgaacctgatcggcgtggcaagaggcgaaaacatccccgccgtgatcgccctgaccgaccccgagggctgcccactgagccggtttaaggatagcctgggaaacccaacccacatcctgagaatcggcgagagctataaggagaagcagcggaccatccaggccaagaaggaggtggagcagcggagagccggcggctacagccggaagtacgccagcaaagccaagaatctggcagacgatatggtgagaaacaccgctagagatctgctgtactacgccgtgacccaggatgccatgctgatcttcgccaacctgagccggggcttcggccggcagggcaagcggaccttcatggccgagagacagtacacacggatggaggactggctgaccgccaagctggcctacgagggcctgagcaagacctacctgtccaagacactggcccagtacacctccaagacatgcagcaactgtgggtttaccatcaccagcgccgactacgacagggtgctggagaagctgaagaagacagcaacaggctggatgaccacaattaacggcaaggagctgaaggtggagggccagattacctactacaacagatacaagagacagaacgtagtcaaggacctgtccgtcgagctggatagactgagcgaagaatctgtgaacaacgacatctcctcctggacaaagggcagaagcggagaagctctgagcctcctgaagaaaagattctcccatagacccgtgcaggagaagttcgtgtgcctgaactgcggcttcgagacacacgcagccgagcaagccgccctgaacatcgccagatcctggctgttcctgcggagccaggagtacaagaaataccagacaaacaagacaaccggcaacaccgataagagagccttcgtcgagacctggcagtccttttaccggaagaagcttaaggaggtgtggaaacctgccgtgcggtctggcggatctggcggaggctccacaagcgtgaccttcgaggacgtggccctgtacttcagcagggacgagtggaggctgctggacgaggcccagaggaggctgtaccacgacgtgatgctgcagaacttcagcctgatcagcagcctgggctgctgctgcggcgccgaggacgccgagagccccttccagcccagcatgttcagggacgtgagccaggccaggaccctgaaggccgccagcctgagccagaagaaccacccctgcgagaagaccagccccaagaaaaagagaaaagtctaagctgccttctgcggggcttgccttctggccatgcccttcttctctcccttgcacctgtacctcttggtctttgaataaagcctgagtaggaaggctagcaaaaaaaaaaaaaaaaaaaaaaaaaaaaaaaaaaaaaaaaaaaaaaaaaaaaaaaaaaaaaaaaaaaaaaaaaaaaaaaa

SEQ ID NO: 3324 - RNA, 5419 nt, synthetic construct
  source 1..5419: mol_type = other RNA
aggaaataagagagaaaagaagagtaagaagaaatataagagccaccatggcccctaagaagaagcgtaaagtgagccgggtgaacggcagcggcagcggcggcggcatgaaccacgaccaggagttcgacccccctaaggtgtaccctcccgtccccgccgagaagagaaagcccatccgggtcctgagcctgttcgatggcatcgccaccggtctgctggtgctgaaggacctgggcatccaggtggataggtacattgcctccgaggtgtgcgaggactccatcaccgtgggaatggtgcgtcatcagggcaagatcatgtacgtgggcgacgtgcggagcgtgacacagaagcatatccaggagtggggccctttcgacctggtgatcggcggcagcccttgcaatgacctgagcatcgtgaacccagcccggaagggcctgtacgagggaaccggcagactgttcttcgagttttacagactgctgcacgacgcccggcctaaggaaggcgacgaccggcccttcttttggctgttcgagaatgtggtggccatgggagtcagcgacaagcgggatattagccggttcctggagagcaaccccgtgatgatcgatgccaaggaagtgagcgccgcccaccgggccagatacttctggggcaatctgcctggcatgaacagacccctggccagcaccgtgaacgacaagctggagctgcaggagtgcctggagcacggccggatcgccaagttcagcaaggtgagaaccatcaccacccgaagcaacagcatcaaacaaggcaaggaccagcactttcctgtgttcatgaacgagaaggaggacatcctgtggtgtaccgagatggagagagtgttcgggttcccagtccactacacagatgtcagcaacatgtctagactggccagacagagactgctgggaagaagctggtccgtccctgtgatcagacacctgttcgcccctctgaaggagtacttcgcctgcgtgagcagcggcaacagcaacgccaacagccggggccccagcttctctagcggcctggtgccactgtccctgagagggagccacatgggccccatggagatctacaaaaccgtgagcgcctggaagcggcagcctgtgcgcgtgctgagcctgtttcggaatatcgataaagtcctgaaaagcctgggattcctggagagcggctctggctccggcggtggcaccctgaagtacgtggaggatgtgacaaacgtggtcagacgggatgtggagaagtggggccccttcgatctggtgtacggcagcacccaacccctgggcagctcttgtgaccggtgccctggctggtacatgtttcagttccaccggatcctgcagtacgccctgccgagacaggagtcccagcggccattcttttggattttcatggacaacttgctgctgaccgaggatgaccaggaaactaccactcggttcctgcagaccgaagccgtgaccctgcaggacgtgagaggccgggactaccagaacgccatgcgggtgtggtccaacatccctggactgaaaagcaagcacgcacctctgacccctaaagaagaggagtacctgcaggcccaggtgcggagcagaagcaagctggacgcccctaaggtggatctgctggtgaagaattgcctcctgcccctgagagagtacttcaagtatttcagccagaatagtctgcccctgggcggcccaagcagcggcgcccctcctcccagcggcggcagcccagccggctccccaacctctaccgaggagggcacctctgagtccgccacccccgagagcggccctggcacctccaccgagcccagcgagggcagcgcacccggcagccctgccggcagccccacctccacagaggagggaaccagcaccgagcccagcgaaggcagcgccccaggcaccagcaccgagcctagtgagggcggctctggcggcggcagcgcccaggagattaaacggatcaacaagatcagaagaagacttgtgaaagacagcaacaccaagaaggccggcaagacaggccccatgaaaaccctgctggttagagtgatgacacccgatctgagagagcggctggaaaacctgagaaagaagcctgaaaatatcccccagcccatcagcaatacatctagagccaacctgaataagctgctgaccgattacaccgaaatgaagaaggcgatcctgcatgtgtactgggaagagttccagaaggaccctgtgggcctgatgagccgggtggcccagcctgccagcaagaagatcgatcagaacaagctgaaacctgagatggacgagaagggcaacctgaccaccgccggctttgcctgctctcagtgtggccagcccctgttcgtgtacaagctggagcaggtgtctgagaagggcaaggcttacaccaactacttcggacggtgcaatgtggccgagcacgaaaagctgatcctgctggcccagctgaagcccgagaaggatagcgacgaagccgtgacatatagcctgggaaagtttgggcagagggccctggatttctacagcattcatgtgaccaaggagtccacccaccccgtgaagcccctggcccagatcgccggaaacagatacgcctccggacctgtgggaaaggccctgagcgacgcatgtatgggcacaatcgcctccttcctgtctaagtaccaggacatcatcatcgaacaccagaaggtggtgaagggcaaccagaagagactggagagcctgcgggagctggccggcaaggaaaacctggaataccctagcgtgaccctgccacctcagcctcacaccaaggagggcgttgatgcctacaacgaagtgatcgcccgggtgcgaatgtgggtgaacctgaacctgtggcagaagctgaagctaagcagagatgatgccaagcctctgctgagactgaagggattcccttcctttcctctggtcgagagacaggccaacgaagtggactggtgggacatggtgtgtaacgtgaagaagctgatcaacgagaaaaaggaggatggcaaggtgttttggcagaatctggctggctacaagagacaggaagccctgagaccatacctgagcagcgaggaagatcggaagaagggaaagaaattcgctcggtaccagctgggcgacctgctgctgcacctggaaaagaagcacggcgaggactggggaaaggtgtacgacgaggcctgggagcggattgacaagaaagtggaaggcctgagcaagcacatcaagctggaagaggaacggagaagcgaggacgcccagagcaaggccgccctgaccgactggctgcgggctaaggccagcttcgtgatcgagggcctgaaggaggccgacaaggacgagttctgcagatgcgagctgaagctgcagaagtggtacggggacctgcggggaaagcccttcgccatcgaagccgagaacagcatcctggacatcagcggcttcagcaagcagtacaactgtgccttcatctggcagaaggacggcgtgaagaagctgaacctgtacctgatcatcaactacttcaagggcggcaagctgcggttcaagaagatcaaacctgaagccttcgaagccaacagattctacaccgtgatcaacaaaaagagcggcgagatcgtgcccatggaggtgaacttcaacttcgacgaccccaacctgatcatcctgcctctggcctttggcaagagacagggcagagaattcatctggaacgacctgctgtccctggaaaccggcagcctgaagctggccaacggaagagtgatcgagaagacactgtacaacagaagaacccggcaggatgagcctgccctgttcgtggccctgaccttcgagcggcgggaggtcctggactcctccaatatcaaaccaatgaacctgatcggcgtggcaagaggcgaaaacatccccgccgtgatcgccctgaccgaccccgagggctgcccactgagccggtttaaggatagcctgggaaacccaacccacatcctgagaatcggcgagagctataaggagaagcagcggaccatccaggccaagaaggaggtggagcagcggagagccggcggctacagccggaagtacgccagcaaagccaagaatctggcagacgatatggtgagaaacaccgctagagatctgctgtactacgccgtgacccaggatgccatgctgatcttcgccaacctgagccggggcttcggccggcagggcaagcggaccttcatggccgagagacagtacacacggatggaggactggctgaccgccaagctggcctacgagggcctgagcaagacctacctgtccaagacactggcccagtacacctccaagacatgcagcaactgtgggtttaccatcaccagcgccgactacgacagggtgctggagaagctgaagaagacagcaacaggctggatgaccacaattaacggcaaggagctgaaggtggagggccagattacctactacaacagatacaagagacagaacgtagtcaaggacctgtccgtcgagctggatagactgagcgaagaatctgtgaacaacgacatctcctcctggacaaagggcagaagcggagaagctctgagcctcctgaagaaaagattctcccatagacccgtgcaggagaagttcgtgtgcctgaactgcggcttcgagacacacgcagccgagcaagccgccctgaacatcgccagatcctggctgttcctgcggagccaggagtacaagaaataccagacaaacaagacaaccggcaacaccgataagagagccttcgtcgagacctggcagtccttttaccggaagaagcttaaggaggtgtggaaacctgccgtgcggtctggcggatctggcggaggctccacaagcatgcccgccaacgaggacaccccccagcccggcggccacggcagcgcctgcgaggtgagcgtgagcttcgaggacgtgaccgtggacttcagcagggaggagtggcagcagctggacagcacccagaggaggctgtaccaggacgtgatgctggagaactacagccacctgctgagcgtgggcttcgaggtgcccaagcccgaggtgatcttcaagctggagcagggcgagggcccctggaccaccagccccaagaaaaagagaaaagtctaagctgccttctgcggggcttgccttctggccatgcccttcttctctcccttgcacctgtacctcttggtctttgaataaagcctgagtaggaaggctagcaaaaaaaaaaaaaaaaaaaaaaaaaaaaaaaaaaaaaaaaaaaaaaaaaaaaaaaaaaaaaaaaaaaaaaaaaaaaaaaa

SEQ ID NO: 3325 - RNA, 5419 nt, synthetic construct
  source 1..5419: mol_type = other RNA
aggaaataagagagaaaagaagagtaagaagaaatataagagccaccatggcccctaagaagaagcgtaaagtgagccgggtgaacggcagcggcagcggcggcggcatgaaccacgaccaggagttcgacccccctaaggtgtaccctcccgtccccgccgagaagagaaagcccatccgggtcctgagcctgttcgatggcatcgccaccggtctgctggtgctgaaggacctgggcatccaggtggataggtacattgcctccgaggtgtgcgaggactccatcaccgtgggaatggtgcgtcatcagggcaagatcatgtacgtgggcgacgtgcggagcgtgacacagaagcatatccaggagtggggccctttcgacctggtgatcggcggcagcccttgcaatgacctgagcatcgtgaacccagcccggaagggcctgtacgagggaaccggcagactgttcttcgagttttacagactgctgcacgacgcccggcctaaggaaggcgacgaccggcccttcttttggctgttcgagaatgtggtggccatgggagtcagcgacaagcgggatattagccggttcctggagagcaaccccgtgatgatcgatgccaaggaagtgagcgccgcccaccgggccagatacttctggggcaatctgcctggcatgaacagacccctggccagcaccgtgaacgacaagctggagctgcaggagtgcctggagcacggccggatcgccaagttcagcaaggtgagaaccatcaccacccgaagcaacagcatcaaacaaggcaaggaccagcactttcctgtgttcatgaacgagaaggaggacatcctgtggtgtaccgagatggagagagtgttcgggttcccagtccactacacagatgtcagcaacatgtctagactggccagacagagactgctgggaagaagctggtccgtccctgtgatcagacacctgttcgcccctctgaaggagtacttcgcctgcgtgagcagcggcaacagcaacgccaacagccggggccccagcttctctagcggcctggtgccactgtccctgagagggagccacatgggccccatggagatctacaaaaccgtgagcgcctggaagcggcagcctgtgcgcgtgctgagcctgtttcggaatatcgataaagtcctgaaaagcctgggattcctggagagcggctctggctccggcggtggcaccctgaagtacgtggaggatgtgacaaacgtggtcagacgggatgtggagaagtggggccccttcgatctggtgtacggcagcacccaacccctgggcagctcttgtgaccggtgccctggctggtacatgtttcagttccaccggatcctgcagtacgccctgccgagacaggagtcccagcggccattcttttggattttcatggacaacttgctgctgaccgaggatgaccaggaaactaccactcggttcctgcagaccgaagccgtgaccctgcaggacgtgagaggccgggactaccagaacgccatgcgggtgtggtccaacatccctggactgaaaagcaagcacgcacctctgacccctaaagaagaggagtacctgcaggcccaggtgcggagcagaagcaagctggacgcccctaaggtggatctgctggtgaagaattgcctcctgcccctgagagagtacttcaagtatttcagccagaatagtctgcccctgggcggcccaagcagcggcgcccctcctcccagcggcggcagcccagccggctccccaacctctaccgaggagggcacctctgagtccgccacccccgagagcggccctggcacctccaccgagcccagcgagggcagcgcacccggcagccctgccggcagccccacctccacagaggagggaaccagcaccgagcccagcgaaggcagcgccccaggcaccagcaccgagcctagtgagggcggctctggcggcggcagcgcccaggagattaaacggatcaacaagatcagaagaagacttgtgaaagacagcaacaccaagaaggccggcaagacaggccccatgaaaaccctgctggttagagtgatgacacccgatctgagagagcggctggaaaacctgagaaagaagcctgaaaatatcccccagcccatcagcaatacatctagagccaacctgaataagctgctgaccgattacaccgaaatgaagaaggcgatcctgcatgtgtactgggaagagttccagaaggaccctgtgggcctgatgagccgggtggcccagcctgccagcaagaagatcgatcagaacaagctgaaacctgagatggacgagaagggcaacctgaccaccgccggctttgcctgctctcagtgtggccagcccctgttcgtgtacaagctggagcaggtgtctgagaagggcaaggcttacaccaactacttcggacggtgcaatgtggccgagcacgaaaagctgatcctgctggcccagctgaagcccgagaaggatagcgacgaagccgtgacatatagcctgggaaagtttgggcagagggccctggatttctacagcattcatgtgaccaaggagtccacccaccccgtgaagcccctggcccagatcgccggaaacagatacgcctccggacctgtgggaaaggccctgagcgacgcatgtatgggcacaatcgcctccttcctgtctaagtaccaggacatcatcatcgaacaccagaaggtggtgaagggcaaccagaagagactggagagcctgcgggagctggccggcaaggaaaacctggaataccctagcgtgaccctgccacctcagcctcacaccaaggagggcgttgatgcctacaacgaagtgatcgcccgggtgcgaatgtgggtgaacctgaacctgtggcagaagctgaagctaagcagagatgatgccaagcctctgctgagactgaagggattcccttcctttcctctggtcgagagacaggccaacgaagtggactggtgggacatggtgtgtaacgtgaagaagctgatcaacgagaaaaaggaggatggcaaggtgttttggcagaatctggctggctacaagagacaggaagccctgagaccatacctgagcagcgaggaagatcggaagaagggaaagaaattcgctcggtaccagctgggcgacctgctgctgcacctggaaaagaagcacggcgaggactggggaaaggtgtacgacgaggcctgggagcggattgacaagaaagtggaaggcctgagcaagcacatcaagctggaagaggaacggagaagcgaggacgcccagagcaaggccgccctgaccgactggctgcgggctaaggccagcttcgtgatcgagggcctgaaggaggccgacaaggacgagttctgcagatgcgagctgaagctgcagaagtggtacggggacctgcggggaaagcccttcgccatcgaagccgagaacagcatcctggacatcagcggcttcagcaagcagtacaactgtgccttcatctggcagaaggacggcgtgaagaagctgaacctgtacctgatcatcaactacttcaagggcggcaagctgcggttcaagaagatcaaacctgaagccttcgaagccaacagattctacaccgtgatcaacaaaaagagcggcgagatcgtgcccatggaggtgaacttcaacttcgacgaccccaacctgatcatcctgcctctggcctttggcaagagacagggcagagaattcatctggaacgacctgctgtccctggaaaccggcagcctgaagctggccaacggaagagtgatcgagaagacactgtacaacagaagaacccggcaggatgagcctgccctgttcgtggccctgaccttcgagcggcgggaggtcctggactcctccaatatcaaaccaatgaacctgatcggcgtggcaagaggcgaaaacatccccgccgtgatcgccctgaccgaccccgagggctgcccactgagccggtttaaggatagcctgggaaacccaacccacatcctgagaatcggcgagagctataaggagaagcagcggaccatccaggccaagaaggaggtggagcagcggagagccggcggctacagccggaagtacgccagcaaagccaagaatctggcagacgatatggtgagaaacaccgctagagatctgctgtactacgccgtgacccaggatgccatgctgatcttcgccaacctgagccggggcttcggccggcagggcaagcggaccttcatggccgagagacagtacacacggatggaggactggctgaccgccaagctggcctacgagggcctgagcaagacctacctgtccaagacactggcccagtacacctccaagacatgcagcaactgtgggtttaccatcaccagcgccgactacgacagggtgctggagaagctgaagaagacagcaacaggctggatgaccacaattaacggcaaggagctgaaggtggagggccagattacctactacaacagatacaagagacagaacgtagtcaaggacctgtccgtcgagctggatagactgagcgaagaatctgtgaacaacgacatctcctcctggacaaagggcagaagcggagaagctctgagcctcctgaagaaaagattctcccatagacccgtgcaggagaagttcgtgtgcctgaactgcggcttcgagacacacgcagccgagcaagccgccctgaacatcgccagatcctggctgttcctgcggagccaggagtacaagaaataccagacaaacaagacaaccggcaacaccgataagagagccttcgtcgagacctggcagtccttttaccggaagaagcttaaggaggtgtggaaacctgccgtgcggtctggcggatctggcggaggctccacaagccaggaccccagcgccgagcagctgagcgaggaggtgcccgtggtgttcgaggagctgcccgtggtgttcgaggacgtggccgtgtacttcaccagggaggagtggggcatgctggacaagaggcagaaggagctgtacagggacgtgatgaggatgaactacgagctgctggccagcctgggccccgccgccgccaagcccgacctgatcagcaagctggagaggagggccgccccctggatcaccagccccaagaaaaagagaaaagtctaagctgccttctgcggggcttgccttctggccatgcccttcttctctcccttgcacctgtacctcttggtctttgaataaagcctgagtaggaaggctagcaaaaaaaaaaaaaaaaaaaaaaaaaaaaaaaaaaaaaaaaaaaaaaaaaaaaaaaaaaaaaaaaaaaaaaaaaaaaaaaa

SEQ ID NO: 3326 - RNA, 5419 nt, synthetic construct
  source 1..5419: mol_type = other RNA
aggaaataagagagaaaagaagagtaagaagaaatataagagccaccatggcccctaagaagaagcgtaaagtgagccgggtgaacggcagcggcagcggcggcggcatgaaccacgaccaggagttcgacccccctaaggtgtaccctcccgtccccgccgagaagagaaagcccatccgggtcctgagcctgttcgatggcatcgccaccggtctgctggtgctgaaggacctgggcatccaggtggataggtacattgcctccgaggtgtgcgaggactccatcaccgtgggaatggtgcgtcatcagggcaagatcatgtacgtgggcgacgtgcggagcgtgacacagaagcatatccaggagtggggccctttcgacctggtgatcggcggcagcccttgcaatgacctgagcatcgtgaacccagcccggaagggcctgtacgagggaaccggcagactgttcttcgagttttacagactgctgcacgacgcccggcctaaggaaggcgacgaccggcccttcttttggctgttcgagaatgtggtggccatgggagtcagcgacaagcgggatattagccggttcctggagagcaaccccgtgatgatcgatgccaaggaagtgagcgccgcccaccgggccagatacttctggggcaatctgcctggcatgaacagacccctggccagcaccgtgaacgacaagctggagctgcaggagtgcctggagcacggccggatcgccaagttcagcaaggtgagaaccatcaccacccgaagcaacagcatcaaacaaggcaaggaccagcactttcctgtgttcatgaacgagaaggaggacatcctgtggtgtaccgagatggagagagtgttcgggttcccagtccactacacagatgtcagcaacatgtctagactggccagacagagactgctgggaagaagctggtccgtccctgtgatcagacacctgttcgcccctctgaaggagtacttcgcctgcgtgagcagcggcaacagcaacgccaacagccggggccccagcttctctagcggcctggtgccactgtccctgagagggagccacatgggccccatggagatctacaaaaccgtgagcgcctggaagcggcagcctgtgcgcgtgctgagcctgtttcggaatatcgataaagtcctgaaaagcctgggattcctggagagcggctctggctccggcggtggcaccctgaagtacgtggaggatgtgacaaacgtggtcagacgggatgtggagaagtggggccccttcgatctggtgtacggcagcacccaacccctgggcagctcttgtgaccggtgccctggctggtacatgtttcagttccaccggatcctgcagtacgccctgccgagacaggagtcccagcggccattcttttggattttcatggacaacttgctgctgaccgaggatgaccaggaaactaccactcggttcctgcagaccgaagccgtgaccctgcaggacgtgagaggccgggactaccagaacgccatgcgggtgtggtccaacatccctggactgaaaagcaagcacgcacctctgacccctaaagaagaggagtacctgcaggcccaggtgcggagcagaagcaagctggacgcccctaaggtggatctgctggtgaagaattgcctcctgcccctgagagagtacttcaagtatttcagccagaatagtctgcccctgggcggcccaagcagcggcgcccctcctcccagcggcggcagcccagccggctccccaacctctaccgaggagggcacctctgagtccgccacccccgagagcggccctggcacctccaccgagcccagcgagggcagcgcacccggcagccctgccggcagccccacctccacagaggagggaaccagcaccgagcccagcgaaggcagcgccccaggcaccagcaccgagcctagtgagggcggctctggcggcggcagcgcccaggagattaaacggatcaacaagatcagaagaagacttgtgaaagacagcaacaccaagaaggccggcaagacaggccccatgaaaaccctgctggttagagtgatgacacccgatctgagagagcggctggaaaacctgagaaagaagcctgaaaatatcccccagcccatcagcaatacatctagagccaacctgaataagctgctgaccgattacaccgaaatgaagaaggcgatcctgcatgtgtactgggaagagttccagaaggaccctgtgggcctgatgagccgggtggcccagcctgccagcaagaagatcgatcagaacaagctgaaacctgagatggacgagaagggcaacctgaccaccgccggctttgcctgctctcagtgtggccagcccctgttcgtgtacaagctggagcaggtgtctgagaagggcaaggcttacaccaactacttcggacggtgcaatgtggccgagcacgaaaagctgatcctgctggcccagctgaagcccgagaaggatagcgacgaagccgtgacatatagcctgggaaagtttgggcagagggccctggatttctacagcattcatgtgaccaaggagtccacccaccccgtgaagcccctggcccagatcgccggaaacagatacgcctccggacctgtgggaaaggccctgagcgacgcatgtatgggcacaatcgcctccttcctgtctaagtaccaggacatcatcatcgaacaccagaaggtggtgaagggcaaccagaagagactggagagcctgcgggagctggccggcaaggaaaacctggaataccctagcgtgaccctgccacctcagcctcacaccaaggagggcgttgatgcctacaacgaagtgatcgcccgggtgcgaatgtgggtgaacctgaacctgtggcagaagctgaagctaagcagagatgatgccaagcctctgctgagactgaagggattcccttcctttcctctggtcgagagacaggccaacgaagtggactggtgggacatggtgtgtaacgtgaagaagctgatcaacgagaaaaaggaggatggcaaggtgttttggcagaatctggctggctacaagagacaggaagccctgagaccatacctgagcagcgaggaagatcggaagaagggaaagaaattcgctcggtaccagctgggcgacctgctgctgcacctggaaaagaagcacggcgaggactggggaaaggtgtacgacgaggcctgggagcggattgacaagaaagtggaaggcctgagcaagcacatcaagctggaagaggaacggagaagcgaggacgcccagagcaaggccgccctgaccgactggctgcgggctaaggccagcttcgtgatcgagggcctgaaggaggccgacaaggacgagttctgcagatgcgagctgaagctgcagaagtggtacggggacctgcggggaaagcccttcgccatcgaagccgagaacagcatcctggacatcagcggcttcagcaagcagtacaactgtgccttcatctggcagaaggacggcgtgaagaagctgaacctgtacctgatcatcaactacttcaagggcggcaagctgcggttcaagaagatcaaacctgaagccttcgaagccaacagattctacaccgtgatcaacaaaaagagcggcgagatcgtgcccatggaggtgaacttcaacttcgacgaccccaacctgatcatcctgcctctggcctttggcaagagacagggcagagaattcatctggaacgacctgctgtccctggaaaccggcagcctgaagctggccaacggaagagtgatcgagaagacactgtacaacagaagaacccggcaggatgagcctgccctgttcgtggccctgaccttcgagcggcgggaggtcctggactcctccaatatcaaaccaatgaacctgatcggcgtggcaagaggcgaaaacatccccgccgtgatcgccctgaccgaccccgagggctgcccactgagccggtttaaggatagcctgggaaacccaacccacatcctgagaatcggcgagagctataaggagaagcagcggaccatccaggccaagaaggaggtggagcagcggagagccggcggctacagccggaagtacgccagcaaagccaagaatctggcagacgatatggtgagaaacaccgctagagatctgctgtactacgccgtgacccaggatgccatgctgatcttcgccaacctgagccggggcttcggccggcagggcaagcggaccttcatggccgagagacagtacacacggatggaggactggctgaccgccaagctggcctacgagggcctgagcaagacctacctgtccaagacactggcccagtacacctccaagacatgcagcaactgtgggtttaccatcaccagcgccgactacgacagggtgctggagaagctgaagaagacagcaacaggctggatgaccacaattaacggcaaggagctgaaggtggagggccagattacctactacaacagatacaagagacagaacgtagtcaaggacctgtccgtcgagctggatagactgagcgaagaatctgtgaacaacgacatctcctcctggacaaagggcagaagcggagaagctctgagcctcctgaagaaaagattctcccatagacccgtgcaggagaagttcgtgtgcctgaactgcggcttcgagacacacgcagccgagcaagccgccctgaacatcgccagatcctggctgttcctgcggagccaggagtacaagaaataccagacaaacaagacaaccggcaacaccgataagagagccttcgtcgagacctggcagtccttttaccggaagaagcttaaggaggtgtggaaacctgccgtgcggtctggcggatctggcggaggctccacaagcctgctgaccttcgaggacgtggccctgagcttcaccgaggaggagtggcagctgctggaccccacccagaagatcctgtacaacgacgtgatgcaggagaactacgagaccgtgatcagcctgggcctgaagctgaagaacgacaccggcaacgaccagcccatcagcctgagcaccctggagatccagggcagcggctgcaaggtgctgaggaaggccagggtgaaggtggcccagaagaccaccagccccaagaaaaagagaaaagtctaagctgccttctgcggggcttgccttctggccatgcccttcttctctcccttgcacctgtacctcttggtctttgaataaagcctgagtaggaaggctagcaaaaaaaaaaaaaaaaaaaaaaaaaaaaaaaaaaaaaaaaaaaaaaaaaaaaaaaaaaaaaaaaaaaaaaaaaaaaaaaa

SEQ ID NO: 3327 - RNA, 5419 nt, synthetic construct
  source 1..5419: mol_type = other RNA
aggaaataagagagaaaagaagagtaagaagaaatataagagccaccatggcccctaagaagaagcgtaaagtgagccgggtgaacggcagcggcagcggcggcggcatgaaccacgaccaggagttcgacccccctaaggtgtaccctcccgtccccgccgagaagagaaagcccatccgggtcctgagcctgttcgatggcatcgccaccggtctgctggtgctgaaggacctgggcatccaggtggataggtacattgcctccgaggtgtgcgaggactccatcaccgtgggaatggtgcgtcatcagggcaagatcatgtacgtgggcgacgtgcggagcgtgacacagaagcatatccaggagtggggccctttcgacctggtgatcggcggcagcccttgcaatgacctgagcatcgtgaacccagcccggaagggcctgtacgagggaaccggcagactgttcttcgagttttacagactgctgcacgacgcccggcctaaggaaggcgacgaccggcccttcttttggctgttcgagaatgtggtggccatgggagtcagcgacaagcgggatattagccggttcctggagagcaaccccgtgatgatcgatgccaaggaagtgagcgccgcccaccgggccagatacttctggggcaatctgcctggcatgaacagacccctggccagcaccgtgaacgacaagctggagctgcaggagtgcctggagcacggccggatcgccaagttcagcaaggtgagaaccatcaccacccgaagcaacagcatcaaacaaggcaaggaccagcactttcctgtgttcatgaacgagaaggaggacatcctgtggtgtaccgagatggagagagtgttcgggttcccagtccactacacagatgtcagcaacatgtctagactggccagacagagactgctgggaagaagctggtccgtccctgtgatcagacacctgttcgcccctctgaaggagtacttcgcctgcgtgagcagcggcaacagcaacgccaacagccggggccccagcttctctagcggcctggtgccactgtccctgagagggagccacatgggccccatggagatctacaaaaccgtgagcgcctggaagcggcagcctgtgcgcgtgctgagcctgtttcggaatatcgataaagtcctgaaaagcctgggattcctggagagcggctctggctccggcggtggcaccctgaagtacgtggaggatgtgacaaacgtggtcagacgggatgtggagaagtggggccccttcgatctggtgtacggcagcacccaacccctgggcagctcttgtgaccggtgccctggctggtacatgtttcagttccaccggatcctgcagtacgccctgccgagacaggagtcccagcggccattcttttggattttcatggacaacttgctgctgaccgaggatgaccaggaaactaccactcggttcctgcagaccgaagccgtgaccctgcaggacgtgagaggccgggactaccagaacgccatgcgggtgtggtccaacatccctggactgaaaagcaagcacgcacctctgacccctaaagaagaggagtacctgcaggcccaggtgcggagcagaagcaagctggacgcccctaaggtggatctgctggtgaagaattgcctcctgcccctgagagagtacttcaagtatttcagccagaatagtctgcccctgggcggcccaagcagcggcgcccctcctcccagcggcggcagcccagccggctccccaacctctaccgaggagggcacctctgagtccgccacccccgagagcggccctggcacctccaccgagcccagcgagggcagcgcacccggcagccctgccggcagccccacctccacagaggagggaaccagcaccgagcccagcgaaggcagcgccccaggcaccagcaccgagcctagtgagggcggctctggcggcggcagcgcccaggagattaaacggatcaacaagatcagaagaagacttgtgaaagacagcaacaccaagaaggccggcaagacaggccccatgaaaaccctgctggttagagtgatgacacccgatctgagagagcggctggaaaacctgagaaagaagcctgaaaatatcccccagcccatcagcaatacatctagagccaacctgaataagctgctgaccgattacaccgaaatgaagaaggcgatcctgcatgtgtactgggaagagttccagaaggaccctgtgggcctgatgagccgggtggcccagcctgccagcaagaagatcgatcagaacaagctgaaacctgagatggacgagaagggcaacctgaccaccgccggctttgcctgctctcagtgtggccagcccctgttcgtgtacaagctggagcaggtgtctgagaagggcaaggcttacaccaactacttcggacggtgcaatgtggccgagcacgaaaagctgatcctgctggcccagctgaagcccgagaaggatagcgacgaagccgtgacatatagcctgggaaagtttgggcagagggccctggatttctacagcattcatgtgaccaaggagtccacccaccccgtgaagcccctggcccagatcgccggaaacagatacgcctccggacctgtgggaaaggccctgagcgacgcatgtatgggcacaatcgcctccttcctgtctaagtaccaggacatcatcatcgaacaccagaaggtggtgaagggcaaccagaagagactggagagcctgcgggagctggccggcaaggaaaacctggaataccctagcgtgaccctgccacctcagcctcacaccaaggagggcgttgatgcctacaacgaagtgatcgcccgggtgcgaatgtgggtgaacctgaacctgtggcagaagctgaagctaagcagagatgatgccaagcctctgctgagactgaagggattcccttcctttcctctggtcgagagacaggccaacgaagtggactggtgggacatggtgtgtaacgtgaagaagctgatcaacgagaaaaaggaggatggcaaggtgttttggcagaatctggctggctacaagagacaggaagccctgagaccatacctgagcagcgaggaagatcggaagaagggaaagaaattcgctcggtaccagctgggcgacctgctgctgcacctggaaaagaagcacggcgaggactggggaaaggtgtacgacgaggcctgggagcggattgacaagaaagtggaaggcctgagcaagcacatcaagctggaagaggaacggagaagcgaggacgcccagagcaaggccgccctgaccgactggctgcgggctaaggccagcttcgtgatcgagggcctgaaggaggccgacaaggacgagttctgcagatgcgagctgaagctgcagaagtggtacggggacctgcggggaaagcccttcgccatcgaagccgagaacagcatcctggacatcagcggcttcagcaagcagtacaactgtgccttcatctggcagaaggacggcgtgaagaagctgaacctgtacctgatcatcaactacttcaagggcggcaagctgcggttcaagaagatcaaacctgaagccttcgaagccaacagattctacaccgtgatcaacaaaaagagcggcgagatcgtgcccatggaggtgaacttcaacttcgacgaccccaacctgatcatcctgcctctggcctttggcaagagacagggcagagaattcatctggaacgacctgctgtccctggaaaccggcagcctgaagctggccaacggaagagtgatcgagaagacactgtacaacagaagaacccggcaggatgagcctgccctgttcgtggccctgaccttcgagcggcgggaggtcctggactcctccaatatcaaaccaatgaacctgatcggcgtggcaagaggcgaaaacatccccgccgtgatcgccctgaccgaccccgagggctgcccactgagccggtttaaggatagcctgggaaacccaacccacatcctgagaatcggcgagagctataaggagaagcagcggaccatccaggccaagaaggaggtggagcagcggagagccggcggctacagccggaagtacgccagcaaagccaagaatctggcagacgatatggtgagaaacaccgctagagatctgctgtactacgccgtgacccaggatgccatgctgatcttcgccaacctgagccggggcttcggccggcagggcaagcggaccttcatggccgagagacagtacacacggatggaggactggctgaccgccaagctggcctacgagggcctgagcaagacctacctgtccaagacactggcccagtacacctccaagacatgcagcaactgtgggtttaccatcaccagcgccgactacgacagggtgctggagaagctgaagaagacagcaacaggctggatgaccacaattaacggcaaggagctgaaggtggagggccagattacctactacaacagatacaagagacagaacgtagtcaaggacctgtccgtcgagctggatagactgagcgaagaatctgtgaacaacgacatctcctcctggacaaagggcagaagcggagaagctctgagcctcctgaagaaaagattctcccatagacccgtgcaggagaagttcgtgtgcctgaactgcggcttcgagacacacgcagccgagcaagccgccctgaacatcgccagatcctggctgttcctgcggagccaggagtacaagaaataccagacaaacaagacaaccggcaacaccgataagagagccttcgtcgagacctggcagtccttttaccggaagaagcttaaggaggtgtggaaacctgccgtgcggtctggcggatctggcggaggctccacaagcagggccgaggaggccgtgaccttcaaggacgtggccgtggtgttcaccgaggaggagctgcagctgctggacctggcccagaggaagctgtacagggacgtgatgctggagaacttcaggaacctgctgagcgtgggccaccagcccttccacggcgacaccttccacttcctgagggaggagaagttctgggtgatggagaccaccagccagagggagggcaacagcggcggcaagatccagaccagccccaagaaaaagagaaaagtctaagctgccttctgcggggcttgccttctggccatgcccttcttctctcccttgcacctgtacctcttggtctttgaataaagcctgagtaggaaggctagcaaaaaaaaaaaaaaaaaaaaaaaaaaaaaaaaaaaaaaaaaaaaaaaaaaaaaaaaaaaaaaaaaaaaaaaaaaaaaaaa

SEQ ID NO: 3328 - RNA, 5419 nt, synthetic construct
  source 1..5419: mol_type = other RNA
aggaaataagagagaaaagaagagtaagaagaaatataagagccaccatggcccctaagaagaagcgtaaagtgagccgggtgaacggcagcggcagcggcggcggcatgaaccacgaccaggagttcgacccccctaaggtgtaccctcccgtccccgccgagaagagaaagcccatccgggtcctgagcctgttcgatggcatcgccaccggtctgctggtgctgaaggacctgggcatccaggtggataggtacattgcctccgaggtgtgcgaggactccatcaccgtgggaatggtgcgtcatcagggcaagatcatgtacgtgggcgacgtgcggagcgtgacacagaagcatatccaggagtggggccctttcgacctggtgatcggcggcagcccttgcaatgacctgagcatcgtgaacccagcccggaagggcctgtacgagggaaccggcagactgttcttcgagttttacagactgctgcacgacgcccggcctaaggaaggcgacgaccggcccttcttttggctgttcgagaatgtggtggccatgggagtcagcgacaagcgggatattagccggttcctggagagcaaccccgtgatgatcgatgccaaggaagtgagcgccgcccaccgggccagatacttctggggcaatctgcctggcatgaacagacccctggccagcaccgtgaacgacaagctggagctgcaggagtgcctggagcacggccggatcgccaagttcagcaaggtgagaaccatcaccacccgaagcaacagcatcaaacaaggcaaggaccagcactttcctgtgttcatgaacgagaaggaggacatcctgtggtgtaccgagatggagagagtgttcgggttcccagtccactacacagatgtcagcaacatgtctagactggccagacagagactgctgggaagaagctggtccgtccctgtgatcagacacctgttcgcccctctgaaggagtacttcgcctgcgtgagcagcggcaacagcaacgccaacagccggggccccagcttctctagcggcctggtgccactgtccctgagagggagccacatgggccccatggagatctacaaaaccgtgagcgcctggaagcggcagcctgtgcgcgtgctgagcctgtttcggaatatcgataaagtcctgaaaagcctgggattcctggagagcggctctggctccggcggtggcaccctgaagtacgtggaggatgtgacaaacgtggtcagacgggatgtggagaagtggggccccttcgatctggtgtacggcagcacccaacccctgggcagctcttgtgaccggtgccctggctggtacatgtttcagttccaccggatcctgcagtacgccctgccgagacaggagtcccagcggccattcttttggattttcatggacaacttgctgctgaccgaggatgaccaggaaactaccactcggttcctgcagaccgaagccgtgaccctgcaggacgtgagaggccgggactaccagaacgccatgcgggtgtggtccaacatccctggactgaaaagcaagcacgcacctctgacccctaaagaagaggagtacctgcaggcccaggtgcggagcagaagcaagctggacgcccctaaggtggatctgctggtgaagaattgcctcctgcccctgagagagtacttcaagtatttcagccagaatagtctgcccctgggcggcccaagcagcggcgcccctcctcccagcggcggcagcccagccggctccccaacctctaccgaggagggcacctctgagtccgccacccccgagagcggccctggcacctccaccgagcccagcgagggcagcgcacccggcagccctgccggcagccccacctccacagaggagggaaccagcaccgagcccagcgaaggcagcgccccaggcaccagcaccgagcctagtgagggcggctctggcggcggcagcgcccaggagattaaacggatcaacaagatcagaagaagacttgtgaaagacagcaacaccaagaaggccggcaagacaggccccatgaaaaccctgctggttagagtgatgacacccgatctgagagagcggctggaaaacctgagaaagaagcctgaaaatatcccccagcccatcagcaatacatctagagccaacctgaataagctgctgaccgattacaccgaaatgaagaaggcgatcctgcatgtgtactgggaagagttccagaaggaccctgtgggcctgatgagccgggtggcccagcctgccagcaagaagatcgatcagaacaagctgaaacctgagatggacgagaagggcaacctgaccaccgccggctttgcctgctctcagtgtggccagcccctgttcgtgtacaagctggagcaggtgtctgagaagggcaaggcttacaccaactacttcggacggtgcaatgtggccgagcacgaaaagctgatcctgctggcccagctgaagcccgagaaggatagcgacgaagccgtgacatatagcctgggaaagtttgggcagagggccctggatttctacagcattcatgtgaccaaggagtccacccaccccgtgaagcccctggcccagatcgccggaaacagatacgcctccggacctgtgggaaaggccctgagcgacgcatgtatgggcacaatcgcctccttcctgtctaagtaccaggacatcatcatcgaacaccagaaggtggtgaagggcaaccagaagagactggagagcctgcgggagctggccggcaaggaaaacctggaataccctagcgtgaccctgccacctcagcctcacaccaaggagggcgttgatgcctacaacgaagtgatcgcccgggtgcgaatgtgggtgaacctgaacctgtggcagaagctgaagctaagcagagatgatgccaagcctctgctgagactgaagggattcccttcctttcctctggtcgagagacaggccaacgaagtggactggtgggacatggtgtgtaacgtgaagaagctgatcaacgagaaaaaggaggatggcaaggtgttttggcagaatctggctggctacaagagacaggaagccctgagaccatacctgagcagcgaggaagatcggaagaagggaaagaaattcgctcggtaccagctgggcgacctgctgctgcacctggaaaagaagcacggcgaggactggggaaaggtgtacgacgaggcctgggagcggattgacaagaaagtggaaggcctgagcaagcacatcaagctggaagaggaacggagaagcgaggacgcccagagcaaggccgccctgaccgactggctgcgggctaaggccagcttcgtgatcgagggcctgaaggaggccgacaaggacgagttctgcagatgcgagctgaagctgcagaagtggtacggggacctgcggggaaagcccttcgccatcgaagccgagaacagcatcctggacatcagcggcttcagcaagcagtacaactgtgccttcatctggcagaaggacggcgtgaagaagctgaacctgtacctgatcatcaactacttcaagggcggcaagctgcggttcaagaagatcaaacctgaagccttcgaagccaacagattctacaccgtgatcaacaaaaagagcggcgagatcgtgcccatggaggtgaacttcaacttcgacgaccccaacctgatcatcctgcctctggcctttggcaagagacagggcagagaattcatctggaacgacctgctgtccctggaaaccggcagcctgaagctggccaacggaagagtgatcgagaagacactgtacaacagaagaacccggcaggatgagcctgccctgttcgtggccctgaccttcgagcggcgggaggtcctggactcctccaatatcaaaccaatgaacctgatcggcgtggcaagaggcgaaaacatccccgccgtgatcgccctgaccgaccccgagggctgcccactgagccggtttaaggatagcctgggaaacccaacccacatcctgagaatcggcgagagctataaggagaagcagcggaccatccaggccaagaaggaggtggagcagcggagagccggcggctacagccggaagtacgccagcaaagccaagaatctggcagacgatatggtgagaaacaccgctagagatctgctgtactacgccgtgacccaggatgccatgctgatcttcgccaacctgagccggggcttcggccggcagggcaagcggaccttcatggccgagagacagtacacacggatggaggactggctgaccgccaagctggcctacgagggcctgagcaagacctacctgtccaagacactggcccagtacacctccaagacatgcagcaactgtgggtttaccatcaccagcgccgactacgacagggtgctggagaagctgaagaagacagcaacaggctggatgaccacaattaacggcaaggagctgaaggtggagggccagattacctactacaacagatacaagagacagaacgtagtcaaggacctgtccgtcgagctggatagactgagcgaagaatctgtgaacaacgacatctcctcctggacaaagggcagaagcggagaagctctgagcctcctgaagaaaagattctcccatagacccgtgcaggagaagttcgtgtgcctgaactgcggcttcgagacacacgcagccgagcaagccgccctgaacatcgccagatcctggctgttcctgcggagccaggagtacaagaaataccagacaaacaagacaaccggcaacaccgataagagagccttcgtcgagacctggcagtccttttaccggaagaagcttaaggaggtgtggaaacctgccgtgcggtctggcggatctggcggaggctccacaagcatgttcccccccgccaggggcaaggagctgctgagcttcgaggacgtggccatgtacttcaccagggaggagtggggccacctgagctggggccagaaggacctgtacagggacgtgatgctggagaactacaggaacatggtgctgctgggcttccagttccccaagcccgaggtgatctgccagctggagaactgggacgagcagtggatcctggacctgcccagggccggcaacaggaagaccagccccaagaaaaagagaaaagtctaagctgccttctgcggggcttgccttctggccatgcccttcttctctcccttgcacctgtacctcttggtctttgaataaagcctgagtaggaaggctagcaaaaaaaaaaaaaaaaaaaaaaaaaaaaaaaaaaaaaaaaaaaaaaaaaaaaaaaaaaaaaaaaaaaaaaaaaaaaaaaa

SEQ ID NO: 3329 - RNA, 5419 nt, synthetic construct
  source 1..5419: mol_type = other RNA
aggaaataagagagaaaagaagagtaagaagaaatataagagccaccatggcccctaagaagaagcgtaaagtgagccgggtgaacggcagcggcagcggcggcggcatgaaccacgaccaggagttcgacccccctaaggtgtaccctcccgtccccgccgagaagagaaagcccatccgggtcctgagcctgttcgatggcatcgccaccggtctgctggtgctgaaggacctgggcatccaggtggataggtacattgcctccgaggtgtgcgaggactccatcaccgtgggaatggtgcgtcatcagggcaagatcatgtacgtgggcgacgtgcggagcgtgacacagaagcatatccaggagtggggccctttcgacctggtgatcggcggcagcccttgcaatgacctgagcatcgtgaacccagcccggaagggcctgtacgagggaaccggcagactgttcttcgagttttacagactgctgcacgacgcccggcctaaggaaggcgacgaccggcccttcttttggctgttcgagaatgtggtggccatgggagtcagcgacaagcgggatattagccggttcctggagagcaaccccgtgatgatcgatgccaaggaagtgagcgccgcccaccgggccagatacttctggggcaatctgcctggcatgaacagacccctggccagcaccgtgaacgacaagctggagctgcaggagtgcctggagcacggccggatcgccaagttcagcaaggtgagaaccatcaccacccgaagcaacagcatcaaacaaggcaaggaccagcactttcctgtgttcatgaacgagaaggaggacatcctgtggtgtaccgagatggagagagtgttcgggttcccagtccactacacagatgtcagcaacatgtctagactggccagacagagactgctgggaagaagctggtccgtccctgtgatcagacacctgttcgcccctctgaaggagtacttcgcctgcgtgagcagcggcaacagcaacgccaacagccggggccccagcttctctagcggcctggtgccactgtccctgagagggagccacatgggccccatggagatctacaaaaccgtgagcgcctggaagcggcagcctgtgcgcgtgctgagcctgtttcggaatatcgataaagtcctgaaaagcctgggattcctggagagcggctctggctccggcggtggcaccctgaagtacgtggaggatgtgacaaacgtggtcagacgggatgtggagaagtggggccccttcgatctggtgtacggcagcacccaacccctgggcagctcttgtgaccggtgccctggctggtacatgtttcagttccaccggatcctgcagtacgccctgccgagacaggagtcccagcggccattcttttggattttcatggacaacttgctgctgaccgaggatgaccaggaaactaccactcggttcctgcagaccgaagccgtgaccctgcaggacgtgagaggccgggactaccagaacgccatgcgggtgtggtccaacatccctggactgaaaagcaagcacgcacctctgacccctaaagaagaggagtacctgcaggcccaggtgcggagcagaagcaagctggacgcccctaaggtggatctgctggtgaagaattgcctcctgcccctgagagagtacttcaagtatttcagccagaatagtctgcccctgggcggcccaagcagcggcgcccctcctcccagcggcggcagcccagccggctccccaacctctaccgaggagggcacctctgagtccgccacccccgagagcggccctggcacctccaccgagcccagcgagggcagcgcacccggcagccctgccggcagccccacctccacagaggagggaaccagcaccgagcccagcgaaggcagcgccccaggcaccagcaccgagcctagtgagggcggctctggcggcggcagcgcccaggagattaaacggatcaacaagatcagaagaagacttgtgaaagacagcaacaccaagaaggccggcaagacaggccccatgaaaaccctgctggttagagtgatgacacccgatctgagagagcggctggaaaacctgagaaagaagcctgaaaatatcccccagcccatcagcaatacatctagagccaacctgaataagctgctgaccgattacaccgaaatgaagaaggcgatcctgcatgtgtactgggaagagttccagaaggaccctgtgggcctgatgagccgggtggcccagcctgccagcaagaagatcgatcagaacaagctgaaacctgagatggacgagaagggcaacctgaccaccgccggctttgcctgctctcagtgtggccagcccctgttcgtgtacaagctggagcaggtgtctgagaagggcaaggcttacaccaactacttcggacggtgcaatgtggccgagcacgaaaagctgatcctgctggcccagctgaagcccgagaaggatagcgacgaagccgtgacatatagcctgggaaagtttgggcagagggccctggatttctacagcattcatgtgaccaaggagtccacccaccccgtgaagcccctggcccagatcgccggaaacagatacgcctccggacctgtgggaaaggccctgagcgacgcatgtatgggcacaatcgcctccttcctgtctaagtaccaggacatcatcatcgaacaccagaaggtggtgaagggcaaccagaagagactggagagcctgcgggagctggccggcaaggaaaacctggaataccctagcgtgaccctgccacctcagcctcacaccaaggagggcgttgatgcctacaacgaagtgatcgcccgggtgcgaatgtgggtgaacctgaacctgtggcagaagctgaagctaagcagagatgatgccaagcctctgctgagactgaagggattcccttcctttcctctggtcgagagacaggccaacgaagtggactggtgggacatggtgtgtaacgtgaagaagctgatcaacgagaaaaaggaggatggcaaggtgttttggcagaatctggctggctacaagagacaggaagccctgagaccatacctgagcagcgaggaagatcggaagaagggaaagaaattcgctcggtaccagctgggcgacctgctgctgcacctggaaaagaagcacggcgaggactggggaaaggtgtacgacgaggcctgggagcggattgacaagaaagtggaaggcctgagcaagcacatcaagctggaagaggaacggagaagcgaggacgcccagagcaaggccgccctgaccgactggctgcgggctaaggccagcttcgtgatcgagggcctgaaggaggccgacaaggacgagttctgcagatgcgagctgaagctgcagaagtggtacggggacctgcggggaaagcccttcgccatcgaagccgagaacagcatcctggacatcagcggcttcagcaagcagtacaactgtgccttcatctggcagaaggacggcgtgaagaagctgaacctgtacctgatcatcaactacttcaagggcggcaagctgcggttcaagaagatcaaacctgaagccttcgaagccaacagattctacaccgtgatcaacaaaaagagcggcgagatcgtgcccatggaggtgaacttcaacttcgacgaccccaacctgatcatcctgcctctggcctttggcaagagacagggcagagaattcatctggaacgacctgctgtccctggaaaccggcagcctgaagctggccaacggaagagtgatcgagaagacactgtacaacagaagaacccggcaggatgagcctgccctgttcgtggccctgaccttcgagcggcgggaggtcctggactcctccaatatcaaaccaatgaacctgatcggcgtggcaagaggcgaaaacatccccgccgtgatcgccctgaccgaccccgagggctgcccactgagccggtttaaggatagcctgggaaacccaacccacatcctgagaatcggcgagagctataaggagaagcagcggaccatccaggccaagaaggaggtggagcagcggagagccggcggctacagccggaagtacgccagcaaagccaagaatctggcagacgatatggtgagaaacaccgctagagatctgctgtactacgccgtgacccaggatgccatgctgatcttcgccaacctgagccggggcttcggccggcagggcaagcggaccttcatggccgagagacagtacacacggatggaggactggctgaccgccaagctggcctacgagggcctgagcaagacctacctgtccaagacactggcccagtacacctccaagacatgcagcaactgtgggtttaccatcaccagcgccgactacgacagggtgctggagaagctgaagaagacagcaacaggctggatgaccacaattaacggcaaggagctgaaggtggagggccagattacctactacaacagatacaagagacagaacgtagtcaaggacctgtccgtcgagctggatagactgagcgaagaatctgtgaacaacgacatctcctcctggacaaagggcagaagcggagaagctctgagcctcctgaagaaaagattctcccatagacccgtgcaggagaagttcgtgtgcctgaactgcggcttcgagacacacgcagccgagcaagccgccctgaacatcgccagatcctggctgttcctgcggagccaggagtacaagaaataccagacaaacaagacaaccggcaacaccgataagagagccttcgtcgagacctggcagtccttttaccggaagaagcttaaggaggtgtggaaacctgccgtgcggtctggcggatctggcggaggctccacaagcatgaacgtggaggtggtgaaggtgatgccccaggacctggtgaccttcaaggacgtggccatcgacttcagccaggaggagtggcagtggatgaaccccgcccagaagcacctgtacaggagcatgatgctggagaactaccagagcctggtgagcctgggcctgtgcatcagcaagccctgcgtgatcagcctgctggagcagggcagggagccctgggagatgaccagcgagatgaccaggaccagccccaagaaaaagagaaaagtctaagctgccttctgcggggcttgccttctggccatgcccttcttctctcccttgcacctgtacctcttggtctttgaataaagcctgagtaggaaggctagcaaaaaaaaaaaaaaaaaaaaaaaaaaaaaaaaaaaaaaaaaaaaaaaaaaaaaaaaaaaaaaaaaaaaaaaaaaaaaaaa

SEQ ID NO: 3330 - RNA, 5419 nt, synthetic construct
  source 1..5419: mol_type = other RNA
aggaaataagagagaaaagaagagtaagaagaaatataagagccaccatggcccctaagaagaagcgtaaagtgagccgggtgaacggcagcggcagcggcggcggcatgaaccacgaccaggagttcgacccccctaaggtgtaccctcccgtccccgccgagaagagaaagcccatccgggtcctgagcctgttcgatggcatcgccaccggtctgctggtgctgaaggacctgggcatccaggtggataggtacattgcctccgaggtgtgcgaggactccatcaccgtgggaatggtgcgtcatcagggcaagatcatgtacgtgggcgacgtgcggagcgtgacacagaagcatatccaggagtggggccctttcgacctggtgatcggcggcagcccttgcaatgacctgagcatcgtgaacccagcccggaagggcctgtacgagggaaccggcagactgttcttcgagttttacagactgctgcacgacgcccggcctaaggaaggcgacgaccggcccttcttttggctgttcgagaatgtggtggccatgggagtcagcgacaagcgggatattagccggttcctggagagcaaccccgtgatgatcgatgccaaggaagtgagcgccgcccaccgggccagatacttctggggcaatctgcctggcatgaacagacccctggccagcaccgtgaacgacaagctggagctgcaggagtgcctggagcacggccggatcgccaagttcagcaaggtgagaaccatcaccacccgaagcaacagcatcaaacaaggcaaggaccagcactttcctgtgttcatgaacgagaaggaggacatcctgtggtgtaccgagatggagagagtgttcgggttcccagtccactacacagatgtcagcaacatgtctagactggccagacagagactgctgggaagaagctggtccgtccctgtgatcagacacctgttcgcccctctgaaggagtacttcgcctgcgtgagcagcggcaacagcaacgccaacagccggggccccagcttctctagcggcctggtgccactgtccctgagagggagccacatgggccccatggagatctacaaaaccgtgagcgcctggaagcggcagcctgtgcgcgtgctgagcctgtttcggaatatcgataaagtcctgaaaagcctgggattcctggagagcggctctggctccggcggtggcaccctgaagtacgtggaggatgtgacaaacgtggtcagacgggatgtggagaagtggggccccttcgatctggtgtacggcagcacccaacccctgggcagctcttgtgaccggtgccctggctggtacatgtttcagttccaccggatcctgcagtacgccctgccgagacaggagtcccagcggccattcttttggattttcatggacaacttgctgctgaccgaggatgaccaggaaactaccactcggttcctgcagaccgaagccgtgaccctgcaggacgtgagaggccgggactaccagaacgccatgcgggtgtggtccaacatccctggactgaaaagcaagcacgcacctctgacccctaaagaagaggagtacctgcaggcccaggtgcggagcagaagcaagctggacgcccctaaggtggatctgctggtgaagaattgcctcctgcccctgagagagtacttcaagtatttcagccagaatagtctgcccctgggcggcccaagcagcggcgcccctcctcccagcggcggcagcccagccggctccccaacctctaccgaggagggcacctctgagtccgccacccccgagagcggccctggcacctccaccgagcccagcgagggcagcgcacccggcagccctgccggcagccccacctccacagaggagggaaccagcaccgagcccagcgaaggcagcgccccaggcaccagcaccgagcctagtgagggcggctctggcggcggcagcgcccaggagattaaacggatcaacaagatcagaagaagacttgtgaaagacagcaacaccaagaaggccggcaagacaggccccatgaaaaccctgctggttagagtgatgacacccgatctgagagagcggctggaaaacctgagaaagaagcctgaaaatatcccccagcccatcagcaatacatctagagccaacctgaataagctgctgaccgattacaccgaaatgaagaaggcgatcctgcatgtgtactgggaagagttccagaaggaccctgtgggcctgatgagccgggtggcccagcctgccagcaagaagatcgatcagaacaagctgaaacctgagatggacgagaagggcaacctgaccaccgccggctttgcctgctctcagtgtggccagcccctgttcgtgtacaagctggagcaggtgtctgagaagggcaaggcttacaccaactacttcggacggtgcaatgtggccgagcacgaaaagctgatcctgctggcccagctgaagcccgagaaggatagcgacgaagccgtgacatatagcctgggaaagtttgggcagagggccctggatttctacagcattcatgtgaccaaggagtccacccaccccgtgaagcccctggcccagatcgccggaaacagatacgcctccggacctgtgggaaaggccctgagcgacgcatgtatgggcacaatcgcctccttcctgtctaagtaccaggacatcatcatcgaacaccagaaggtggtgaagggcaaccagaagagactggagagcctgcgggagctggccggcaaggaaaacctggaataccctagcgtgaccctgccacctcagcctcacaccaaggagggcgttgatgcctacaacgaagtgatcgcccgggtgcgaatgtgggtgaacctgaacctgtggcagaagctgaagctaagcagagatgatgccaagcctctgctgagactgaagggattcccttcctttcctctggtcgagagacaggccaacgaagtggactggtgggacatggtgtgtaacgtgaagaagctgatcaacgagaaaaaggaggatggcaaggtgttttggcagaatctggctggctacaagagacaggaagccctgagaccatacctgagcagcgaggaagatcggaagaagggaaagaaattcgctcggtaccagctgggcgacctgctgctgcacctggaaaagaagcacggcgaggactggggaaaggtgtacgacgaggcctgggagcggattgacaagaaagtggaaggcctgagcaagcacatcaagctggaagaggaacggagaagcgaggacgcccagagcaaggccgccctgaccgactggctgcgggctaaggccagcttcgtgatcgagggcctgaaggaggccgacaaggacgagttctgcagatgcgagctgaagctgcagaagtggtacggggacctgcggggaaagcccttcgccatcgaagccgagaacagcatcctggacatcagcggcttcagcaagcagtacaactgtgccttcatctggcagaaggacggcgtgaagaagctgaacctgtacctgatcatcaactacttcaagggcggcaagctgcggttcaagaagatcaaacctgaagccttcgaagccaacagattctacaccgtgatcaacaaaaagagcggcgagatcgtgcccatggaggtgaacttcaacttcgacgaccccaacctgatcatcctgcctctggcctttggcaagagacagggcagagaattcatctggaacgacctgctgtccctggaaaccggcagcctgaagctggccaacggaagagtgatcgagaagacactgtacaacagaagaacccggcaggatgagcctgccctgttcgtggccctgaccttcgagcggcgggaggtcctggactcctccaatatcaaaccaatgaacctgatcggcgtggcaagaggcgaaaacatccccgccgtgatcgccctgaccgaccccgagggctgcccactgagccggtttaaggatagcctgggaaacccaacccacatcctgagaatcggcgagagctataaggagaagcagcggaccatccaggccaagaaggaggtggagcagcggagagccggcggctacagccggaagtacgccagcaaagccaagaatctggcagacgatatggtgagaaacaccgctagagatctgctgtactacgccgtgacccaggatgccatgctgatcttcgccaacctgagccggggcttcggccggcagggcaagcggaccttcatggccgagagacagtacacacggatggaggactggctgaccgccaagctggcctacgagggcctgagcaagacctacctgtccaagacactggcccagtacacctccaagacatgcagcaactgtgggtttaccatcaccagcgccgactacgacagggtgctggagaagctgaagaagacagcaacaggctggatgaccacaattaacggcaaggagctgaaggtggagggccagattacctactacaacagatacaagagacagaacgtagtcaaggacctgtccgtcgagctggatagactgagcgaagaatctgtgaacaacgacatctcctcctggacaaagggcagaagcggagaagctctgagcctcctgaagaaaagattctcccatagacccgtgcaggagaagttcgtgtgcctgaactgcggcttcgagacacacgcagccgagcaagccgccctgaacatcgccagatcctggctgttcctgcggagccaggagtacaagaaataccagacaaacaagacaaccggcaacaccgataagagagccttcgtcgagacctggcagtccttttaccggaagaagcttaaggaggtgtggaaacctgccgtgcggtctggcggatctggcggaggctccacaagcaagcccgccgccgtgaggttcgccgacgtggccgtgtacttcagccccgaggagtggggctgcctgaggcccgcccagaggaccctgtacagggacgtgatgagggagacctacggccacctgggcgccctgggcttccccggccccaagcccgccctgatcagctggatggagcaggagagcgaggtgtggagccccgccgcccaggaccccgaggagggcgagagcctgggcggcgccaggaccagccccaagaaaaagagaaaagtctaagctgccttctgcggggcttgccttctggccatgcccttcttctctcccttgcacctgtacctcttggtctttgaataaagcctgagtaggaaggctagcaaaaaaaaaaaaaaaaaaaaaaaaaaaaaaaaaaaaaaaaaaaaaaaaaaaaaaaaaaaaaaaaaaaaaaaaaaaaaaaa

SEQ ID NO: 3331 - RNA, 5419 nt, synthetic construct
  source 1..5419: mol_type = other RNA
aggaaataagagagaaaagaagagtaagaagaaatataagagccaccatggcccctaagaagaagcgtaaagtgagccgggtgaacggcagcggcagcggcggcggcatgaaccacgaccaggagttcgacccccctaaggtgtaccctcccgtccccgccgagaagagaaagcccatccgggtcctgagcctgttcgatggcatcgccaccggtctgctggtgctgaaggacctgggcatccaggtggataggtacattgcctccgaggtgtgcgaggactccatcaccgtgggaatggtgcgtcatcagggcaagatcatgtacgtgggcgacgtgcggagcgtgacacagaagcatatccaggagtggggccctttcgacctggtgatcggcggcagcccttgcaatgacctgagcatcgtgaacccagcccggaagggcctgtacgagggaaccggcagactgttcttcgagttttacagactgctgcacgacgcccggcctaaggaaggcgacgaccggcccttcttttggctgttcgagaatgtggtggccatgggagtcagcgacaagcgggatattagccggttcctggagagcaaccccgtgatgatcgatgccaaggaagtgagcgccgcccaccgggccagatacttctggggcaatctgcctggcatgaacagacccctggccagcaccgtgaacgacaagctggagctgcaggagtgcctggagcacggccggatcgccaagttcagcaaggtgagaaccatcaccacccgaagcaacagcatcaaacaaggcaaggaccagcactttcctgtgttcatgaacgagaaggaggacatcctgtggtgtaccgagatggagagagtgttcgggttcccagtccactacacagatgtcagcaacatgtctagactggccagacagagactgctgggaagaagctggtccgtccctgtgatcagacacctgttcgcccctctgaaggagtacttcgcctgcgtgagcagcggcaacagcaacgccaacagccggggccccagcttctctagcggcctggtgccactgtccctgagagggagccacatgggccccatggagatctacaaaaccgtgagcgcctggaagcggcagcctgtgcgcgtgctgagcctgtttcggaatatcgataaagtcctgaaaagcctgggattcctggagagcggctctggctccggcggtggcaccctgaagtacgtggaggatgtgacaaacgtggtcagacgggatgtggagaagtggggccccttcgatctggtgtacggcagcacccaacccctgggcagctcttgtgaccggtgccctggctggtacatgtttcagttccaccggatcctgcagtacgccctgccgagacaggagtcccagcggccattcttttggattttcatggacaacttgctgctgaccgaggatgaccaggaaactaccactcggttcctgcagaccgaagccgtgaccctgcaggacgtgagaggccgggactaccagaacgccatgcgggtgtggtccaacatccctggactgaaaagcaagcacgcacctctgacccctaaagaagaggagtacctgcaggcccaggtgcggagcagaagcaagctggacgcccctaaggtggatctgctggtgaagaattgcctcctgcccctgagagagtacttcaagtatttcagccagaatagtctgcccctgggcggcccaagcagcggcgcccctcctcccagcggcggcagcccagccggctccccaacctctaccgaggagggcacctctgagtccgccacccccgagagcggccctggcacctccaccgagcccagcgagggcagcgcacccggcagccctgccggcagccccacctccacagaggagggaaccagcaccgagcccagcgaaggcagcgccccaggcaccagcaccgagcctagtgagggcggctctggcggcggcagcgcccaggagattaaacggatcaacaagatcagaagaagacttgtgaaagacagcaacaccaagaaggccggcaagacaggccccatgaaaaccctgctggttagagtgatgacacccgatctgagagagcggctggaaaacctgagaaagaagcctgaaaatatcccccagcccatcagcaatacatctagagccaacctgaataagctgctgaccgattacaccgaaatgaagaaggcgatcctgcatgtgtactgggaagagttccagaaggaccctgtgggcctgatgagccgggtggcccagcctgccagcaagaagatcgatcagaacaagctgaaacctgagatggacgagaagggcaacctgaccaccgccggctttgcctgctctcagtgtggccagcccctgttcgtgtacaagctggagcaggtgtctgagaagggcaaggcttacaccaactacttcggacggtgcaatgtggccgagcacgaaaagctgatcctgctggcccagctgaagcccgagaaggatagcgacgaagccgtgacatatagcctgggaaagtttgggcagagggccctggatttctacagcattcatgtgaccaaggagtccacccaccccgtgaagcccctggcccagatcgccggaaacagatacgcctccggacctgtgggaaaggccctgagcgacgcatgtatgggcacaatcgcctccttcctgtctaagtaccaggacatcatcatcgaacaccagaaggtggtgaagggcaaccagaagagactggagagcctgcgggagctggccggcaaggaaaacctggaataccctagcgtgaccctgccacctcagcctcacaccaaggagggcgttgatgcctacaacgaagtgatcgcccgggtgcgaatgtgggtgaacctgaacctgtggcagaagctgaagctaagcagagatgatgccaagcctctgctgagactgaagggattcccttcctttcctctggtcgagagacaggccaacgaagtggactggtgggacatggtgtgtaacgtgaagaagctgatcaacgagaaaaaggaggatggcaaggtgttttggcagaatctggctggctacaagagacaggaagccctgagaccatacctgagcagcgaggaagatcggaagaagggaaagaaattcgctcggtaccagctgggcgacctgctgctgcacctggaaaagaagcacggcgaggactggggaaaggtgtacgacgaggcctgggagcggattgacaagaaagtggaaggcctgagcaagcacatcaagctggaagaggaacggagaagcgaggacgcccagagcaaggccgccctgaccgactggctgcgggctaaggccagcttcgtgatcgagggcctgaaggaggccgacaaggacgagttctgcagatgcgagctgaagctgcagaagtggtacggggacctgcggggaaagcccttcgccatcgaagccgagaacagcatcctggacatcagcggcttcagcaagcagtacaactgtgccttcatctggcagaaggacggcgtgaagaagctgaacctgtacctgatcatcaactacttcaagggcggcaagctgcggttcaagaagatcaaacctgaagccttcgaagccaacagattctacaccgtgatcaacaaaaagagcggcgagatcgtgcccatggaggtgaacttcaacttcgacgaccccaacctgatcatcctgcctctggcctttggcaagagacagggcagagaattcatctggaacgacctgctgtccctggaaaccggcagcctgaagctggccaacggaagagtgatcgagaagacactgtacaacagaagaacccggcaggatgagcctgccctgttcgtggccctgaccttcgagcggcgggaggtcctggactcctccaatatcaaaccaatgaacctgatcggcgtggcaagaggcgaaaacatccccgccgtgatcgccctgaccgaccccgagggctgcccactgagccggtttaaggatagcctgggaaacccaacccacatcctgagaatcggcgagagctataaggagaagcagcggaccatccaggccaagaaggaggtggagcagcggagagccggcggctacagccggaagtacgccagcaaagccaagaatctggcagacgatatggtgagaaacaccgctagagatctgctgtactacgccgtgacccaggatgccatgctgatcttcgccaacctgagccggggcttcggccggcagggcaagcggaccttcatggccgagagacagtacacacggatggaggactggctgaccgccaagctggcctacgagggcctgagcaagacctacctgtccaagacactggcccagtacacctccaagacatgcagcaactgtgggtttaccatcaccagcgccgactacgacagggtgctggagaagctgaagaagacagcaacaggctggatgaccacaattaacggcaaggagctgaaggtggagggccagattacctactacaacagatacaagagacagaacgtagtcaaggacctgtccgtcgagctggatagactgagcgaagaatctgtgaacaacgacatctcctcctggacaaagggcagaagcggagaagctctgagcctcctgaagaaaagattctcccatagacccgtgcaggagaagttcgtgtgcctgaactgcggcttcgagacacacgcagccgagcaagccgccctgaacatcgccagatcctggctgttcctgcggagccaggagtacaagaaataccagacaaacaagacaaccggcaacaccgataagagagccttcgtcgagacctggcagtccttttaccggaagaagcttaaggaggtgtggaaacctgccgtgcggtctggcggatctggcggaggctccacaagcatgggcctggtgagcttcaaggacgtggccgtggacttcacccaggaggagtggcagcagctggaccccagccagaggaccctgtacagggacgtgatgctggagaactacagccacctggtgagcatgggctaccccgtgagcaagcccgacgtgatcagcaagctggagcagggcgaggagccctggatcatcaagggcgacatcagcaactggatctaccccgacgagtaccaggccgacaccagccccaagaaaaagagaaaagtctaagctgccttctgcggggcttgccttctggccatgcccttcttctctcccttgcacctgtacctcttggtctttgaataaagcctgagtaggaaggctagcaaaaaaaaaaaaaaaaaaaaaaaaaaaaaaaaaaaaaaaaaaaaaaaaaaaaaaaaaaaaaaaaaaaaaaaaaaaaaaaa

SEQ ID NO: 3332 - RNA, 5419 nt, synthetic construct
  source 1..5419: mol_type = other RNA
aggaaataagagagaaaagaagagtaagaagaaatataagagccaccatggcccctaagaagaagcgtaaagtgagccgggtgaacggcagcggcagcggcggcggcatgaaccacgaccaggagttcgacccccctaaggtgtaccctcccgtccccgccgagaagagaaagcccatccgggtcctgagcctgttcgatggcatcgccaccggtctgctggtgctgaaggacctgggcatccaggtggataggtacattgcctccgaggtgtgcgaggactccatcaccgtgggaatggtgcgtcatcagggcaagatcatgtacgtgggcgacgtgcggagcgtgacacagaagcatatccaggagtggggccctttcgacctggtgatcggcggcagcccttgcaatgacctgagcatcgtgaacccagcccggaagggcctgtacgagggaaccggcagactgttcttcgagttttacagactgctgcacgacgcccggcctaaggaaggcgacgaccggcccttcttttggctgttcgagaatgtggtggccatgggagtcagcgacaagcgggatattagccggttcctggagagcaaccccgtgatgatcgatgccaaggaagtgagcgccgcccaccgggccagatacttctggggcaatctgcctggcatgaacagacccctggccagcaccgtgaacgacaagctggagctgcaggagtgcctggagcacggccggatcgccaagttcagcaaggtgagaaccatcaccacccgaagcaacagcatcaaacaaggcaaggaccagcactttcctgtgttcatgaacgagaaggaggacatcctgtggtgtaccgagatggagagagtgttcgggttcccagtccactacacagatgtcagcaacatgtctagactggccagacagagactgctgggaagaagctggtccgtccctgtgatcagacacctgttcgcccctctgaaggagtacttcgcctgcgtgagcagcggcaacagcaacgccaacagccggggccccagcttctctagcggcctggtgccactgtccctgagagggagccacatgggccccatggagatctacaaaaccgtgagcgcctggaagcggcagcctgtgcgcgtgctgagcctgtttcggaatatcgataaagtcctgaaaagcctgggattcctggagagcggctctggctccggcggtggcaccctgaagtacgtggaggatgtgacaaacgtggtcagacgggatgtggagaagtggggccccttcgatctggtgtacggcagcacccaacccctgggcagctcttgtgaccggtgccctggctggtacatgtttcagttccaccggatcctgcagtacgccctgccgagacaggagtcccagcggccattcttttggattttcatggacaacttgctgctgaccgaggatgaccaggaaactaccactcggttcctgcagaccgaagccgtgaccctgcaggacgtgagaggccgggactaccagaacgccatgcgggtgtggtccaacatccctggactgaaaagcaagcacgcacctctgacccctaaagaagaggagtacctgcaggcccaggtgcggagcagaagcaagctggacgcccctaaggtggatctgctggtgaagaattgcctcctgcccctgagagagtacttcaagtatttcagccagaatagtctgcccctgggcggcccaagcagcggcgcccctcctcccagcggcggcagcccagccggctccccaacctctaccgaggagggcacctctgagtccgccacccccgagagcggccctggcacctccaccgagcccagcgagggcagcgcacccggcagccctgccggcagccccacctccacagaggagggaaccagcaccgagcccagcgaaggcagcgccccaggcaccagcaccgagcctagtgagggcggctctggcggcggcagcgcccaggagattaaacggatcaacaagatcagaagaagacttgtgaaagacagcaacaccaagaaggccggcaagacaggccccatgaaaaccctgctggttagagtgatgacacccgatctgagagagcggctggaaaacctgagaaagaagcctgaaaatatcccccagcccatcagcaatacatctagagccaacctgaataagctgctgaccgattacaccgaaatgaagaaggcgatcctgcatgtgtactgggaagagttccagaaggaccctgtgggcctgatgagccgggtggcccagcctgccagcaagaagatcgatcagaacaagctgaaacctgagatggacgagaagggcaacctgaccaccgccggctttgcctgctctcagtgtggccagcccctgttcgtgtacaagctggagcaggtgtctgagaagggcaaggcttacaccaactacttcggacggtgcaatgtggccgagcacgaaaagctgatcctgctggcccagctgaagcccgagaaggatagcgacgaagccgtgacatatagcctgggaaagtttgggcagagggccctggatttctacagcattcatgtgaccaaggagtccacccaccccgtgaagcccctggcccagatcgccggaaacagatacgcctccggacctgtgggaaaggccctgagcgacgcatgtatgggcacaatcgcctccttcctgtctaagtaccaggacatcatcatcgaacaccagaaggtggtgaagggcaaccagaagagactggagagcctgcgggagctggccggcaaggaaaacctggaataccctagcgtgaccctgccacctcagcctcacaccaaggagggcgttgatgcctacaacgaagtgatcgcccgggtgcgaatgtgggtgaacctgaacctgtggcagaagctgaagctaagcagagatgatgccaagcctctgctgagactgaagggattcccttcctttcctctggtcgagagacaggccaacgaagtggactggtgggacatggtgtgtaacgtgaagaagctgatcaacgagaaaaaggaggatggcaaggtgttttggcagaatctggctggctacaagagacaggaagccctgagaccatacctgagcagcgaggaagatcggaagaagggaaagaaattcgctcggtaccagctgggcgacctgctgctgcacctggaaaagaagcacggcgaggactggggaaaggtgtacgacgaggcctgggagcggattgacaagaaagtggaaggcctgagcaagcacatcaagctggaagaggaacggagaagcgaggacgcccagagcaaggccgccctgaccgactggctgcgggctaaggccagcttcgtgatcgagggcctgaaggaggccgacaaggacgagttctgcagatgcgagctgaagctgcagaagtggtacggggacctgcggggaaagcccttcgccatcgaagccgagaacagcatcctggacatcagcggcttcagcaagcagtacaactgtgccttcatctggcagaaggacggcgtgaagaagctgaacctgtacctgatcatcaactacttcaagggcggcaagctgcggttcaagaagatcaaacctgaagccttcgaagccaacagattctacaccgtgatcaacaaaaagagcggcgagatcgtgcccatggaggtgaacttcaacttcgacgaccccaacctgatcatcctgcctctggcctttggcaagagacagggcagagaattcatctggaacgacctgctgtccctggaaaccggcagcctgaagctggccaacggaagagtgatcgagaagacactgtacaacagaagaacccggcaggatgagcctgccctgttcgtggccctgaccttcgagcggcgggaggtcctggactcctccaatatcaaaccaatgaacctgatcggcgtggcaagaggcgaaaacatccccgccgtgatcgccctgaccgaccccgagggctgcccactgagccggtttaaggatagcctgggaaacccaacccacatcctgagaatcggcgagagctataaggagaagcagcggaccatccaggccaagaaggaggtggagcagcggagagccggcggctacagccggaagtacgccagcaaagccaagaatctggcagacgatatggtgagaaacaccgctagagatctgctgtactacgccgtgacccaggatgccatgctgatcttcgccaacctgagccggggcttcggccggcagggcaagcggaccttcatggccgagagacagtacacacggatggaggactggctgaccgccaagctggcctacgagggcctgagcaagacctacctgtccaagacactggcccagtacacctccaagacatgcagcaactgtgggtttaccatcaccagcgccgactacgacagggtgctggagaagctgaagaagacagcaacaggctggatgaccacaattaacggcaaggagctgaaggtggagggccagattacctactacaacagatacaagagacagaacgtagtcaaggacctgtccgtcgagctggatagactgagcgaagaatctgtgaacaacgacatctcctcctggacaaagggcagaagcggagaagctctgagcctcctgaagaaaagattctcccatagacccgtgcaggagaagttcgtgtgcctgaactgcggcttcgagacacacgcagccgagcaagccgccctgaacatcgccagatcctggctgttcctgcggagccaggagtacaagaaataccagacaaacaagacaaccggcaacaccgataagagagccttcgtcgagacctggcagtccttttaccggaagaagcttaaggaggtgtggaaacctgccgtgcggtctggcggatctggcggaggctccacaagcctgcaggagcccgtgagcttcgccgaggtggccgtgtgcttcagcagggaggagtgggccctgctggaccccgcccagagggtgctgtacagggacgtgatgctggagacctaccagtgcgtggccagcctggccagcctgctgacccccaagcccgtgctgatcagcctgctggagggcggcgaggagccctggatccccgacgtgaggagccccgaggccacccccggcgacctgagccccaccagccccaagaaaaagagaaaagtctaagctgccttctgcggggcttgccttctggccatgcccttcttctctcccttgcacctgtacctcttggtctttgaataaagcctgagtaggaaggctagcaaaaaaaaaaaaaaaaaaaaaaaaaaaaaaaaaaaaaaaaaaaaaaaaaaaaaaaaaaaaaaaaaaaaaaaaaaaaaaaa

SEQ ID NO: 3333 - RNA, 5416 nt, synthetic construct
  source 1..5416: mol_type = other RNA
aggaaataagagagaaaagaagagtaagaagaaatataagagccaccatggcccctaagaagaagcgtaaagtgagccgggtgaacggcagcggcagcggcggcggcatgaaccacgaccaggagttcgacccccctaaggtgtaccctcccgtccccgccgagaagagaaagcccatccgggtcctgagcctgttcgatggcatcgccaccggtctgctggtgctgaaggacctgggcatccaggtggataggtacattgcctccgaggtgtgcgaggactccatcaccgtgggaatggtgcgtcatcagggcaagatcatgtacgtgggcgacgtgcggagcgtgacacagaagcatatccaggagtggggccctttcgacctggtgatcggcggcagcccttgcaatgacctgagcatcgtgaacccagcccggaagggcctgtacgagggaaccggcagactgttcttcgagttttacagactgctgcacgacgcccggcctaaggaaggcgacgaccggcccttcttttggctgttcgagaatgtggtggccatgggagtcagcgacaagcgggatattagccggttcctggagagcaaccccgtgatgatcgatgccaaggaagtgagcgccgcccaccgggccagatacttctggggcaatctgcctggcatgaacagacccctggccagcaccgtgaacgacaagctggagctgcaggagtgcctggagcacggccggatcgccaagttcagcaaggtgagaaccatcaccacccgaagcaacagcatcaaacaaggcaaggaccagcactttcctgtgttcatgaacgagaaggaggacatcctgtggtgtaccgagatggagagagtgttcgggttcccagtccactacacagatgtcagcaacatgtctagactggccagacagagactgctgggaagaagctggtccgtccctgtgatcagacacctgttcgcccctctgaaggagtacttcgcctgcgtgagcagcggcaacagcaacgccaacagccggggccccagcttctctagcggcctggtgccactgtccctgagagggagccacatgggccccatggagatctacaaaaccgtgagcgcctggaagcggcagcctgtgcgcgtgctgagcctgtttcggaatatcgataaagtcctgaaaagcctgggattcctggagagcggctctggctccggcggtggcaccctgaagtacgtggaggatgtgacaaacgtggtcagacgggatgtggagaagtggggccccttcgatctggtgtacggcagcacccaacccctgggcagctcttgtgaccggtgccctggctggtacatgtttcagttccaccggatcctgcagtacgccctgccgagacaggagtcccagcggccattcttttggattttcatggacaacttgctgctgaccgaggatgaccaggaaactaccactcggttcctgcagaccgaagccgtgaccctgcaggacgtgagaggccgggactaccagaacgccatgcgggtgtggtccaacatccctggactgaaaagcaagcacgcacctctgacccctaaagaagaggagtacctgcaggcccaggtgcggagcagaagcaagctggacgcccctaaggtggatctgctggtgaagaattgcctcctgcccctgagagagtacttcaagtatttcagccagaatagtctgcccctgggcggcccaagcagcggcgcccctcctcccagcggcggcagcccagccggctccccaacctctaccgaggagggcacctctgagtccgccacccccgagagcggccctggcacctccaccgagcccagcgagggcagcgcacccggcagccctgccggcagccccacctccacagaggagggaaccagcaccgagcccagcgaaggcagcgccccaggcaccagcaccgagcctagtgagggcggctctggcggcggcagcgcccaggagattaaacggatcaacaagatcagaagaagacttgtgaaagacagcaacaccaagaaggccggcaagacaggccccatgaaaaccctgctggttagagtgatgacacccgatctgagagagcggctggaaaacctgagaaagaagcctgaaaatatcccccagcccatcagcaatacatctagagccaacctgaataagctgctgaccgattacaccgaaatgaagaaggcgatcctgcatgtgtactgggaagagttccagaaggaccctgtgggcctgatgagccgggtggcccagcctgccagcaagaagatcgatcagaacaagctgaaacctgagatggacgagaagggcaacctgaccaccgccggctttgcctgctctcagtgtggccagcccctgttcgtgtacaagctggagcaggtgtctgagaagggcaaggcttacaccaactacttcggacggtgcaatgtggccgagcacgaaaagctgatcctgctggcccagctgaagcccgagaaggatagcgacgaagccgtgacatatagcctgggaaagtttgggcagagggccctggatttctacagcattcatgtgaccaaggagtccacccaccccgtgaagcccctggcccagatcgccggaaacagatacgcctccggacctgtgggaaaggccctgagcgacgcatgtatgggcacaatcgcctccttcctgtctaagtaccaggacatcatcatcgaacaccagaaggtggtgaagggcaaccagaagagactggagagcctgcgggagctggccggcaaggaaaacctggaataccctagcgtgaccctgccacctcagcctcacaccaaggagggcgttgatgcctacaacgaagtgatcgcccgggtgcgaatgtgggtgaacctgaacctgtggcagaagctgaagctaagcagagatgatgccaagcctctgctgagactgaagggattcccttcctttcctctggtcgagagacaggccaacgaagtggactggtgggacatggtgtgtaacgtgaagaagctgatcaacgagaaaaaggaggatggcaaggtgttttggcagaatctggctggctacaagagacaggaagccctgagaccatacctgagcagcgaggaagatcggaagaagggaaagaaattcgctcggtaccagctgggcgacctgctgctgcacctggaaaagaagcacggcgaggactggggaaaggtgtacgacgaggcctgggagcggattgacaagaaagtggaaggcctgagcaagcacatcaagctggaagaggaacggagaagcgaggacgcccagagcaaggccgccctgaccgactggctgcgggctaaggccagcttcgtgatcgagggcctgaaggaggccgacaaggacgagttctgcagatgcgagctgaagctgcagaagtggtacggggacctgcggggaaagcccttcgccatcgaagccgagaacagcatcctggacatcagcggcttcagcaagcagtacaactgtgccttcatctggcagaaggacggcgtgaagaagctgaacctgtacctgatcatcaactacttcaagggcggcaagctgcggttcaagaagatcaaacctgaagccttcgaagccaacagattctacaccgtgatcaacaaaaagagcggcgagatcgtgcccatggaggtgaacttcaacttcgacgaccccaacctgatcatcctgcctctggcctttggcaagagacagggcagagaattcatctggaacgacctgctgtccctggaaaccggcagcctgaagctggccaacggaagagtgatcgagaagacactgtacaacagaagaacccggcaggatgagcctgccctgttcgtggccctgaccttcgagcggcgggaggtcctggactcctccaatatcaaaccaatgaacctgatcggcgtggcaagaggcgaaaacatccccgccgtgatcgccctgaccgaccccgagggctgcccactgagccggtttaaggatagcctgggaaacccaacccacatcctgagaatcggcgagagctataaggagaagcagcggaccatccaggccaagaaggaggtggagcagcggagagccggcggctacagccggaagtacgccagcaaagccaagaatctggcagacgatatggtgagaaacaccgctagagatctgctgtactacgccgtgacccaggatgccatgctgatcttcgccaacctgagccggggcttcggccggcagggcaagcggaccttcatggccgagagacagtacacacggatggaggactggctgaccgccaagctggcctacgagggcctgagcaagacctacctgtccaagacactggcccagtacacctccaagacatgcagcaactgtgggtttaccatcaccagcgccgactacgacagggtgctggagaagctgaagaagacagcaacaggctggatgaccacaattaacggcaaggagctgaaggtggagggccagattacctactacaacagatacaagagacagaacgtagtcaaggacctgtccgtcgagctggatagactgagcgaagaatctgtgaacaacgacatctcctcctggacaaagggcagaagcggagaagctctgagcctcctgaagaaaagattctcccatagacccgtgcaggagaagttcgtgtgcctgaactgcggcttcgagacacacgcagccgagcaagccgccctgaacatcgccagatcctggctgttcctgcggagccaggagtacaagaaataccagacaaacaagacaaccggcaacaccgataagagagccttcgtcgagacctggcagtccttttaccggaagaagcttaaggaggtgtggaaacctgccgtgcggtctggcggatctggcggaggctccacaagcgccctgagaagcgtgatgttcagcgacgtgagcatcgacttcagccccgaggagtgggagtacctggacctggagcagaaggacctgtacagagacgtgatgctggagaactacagcaacctggtgagcctgggctgcttcatcagcaagcccgacgtgatcagcagcctggagcagggcaaggagccctggaaggtggtgagaaagggcagaagacagtaccccgacctggagaccaagaccagccccaagaaaaagagaaaagtctaagctgccttctgcggggcttgccttctggccatgcccttcttctctcccttgcacctgtacctcttggtctttgaataaagcctgagtaggaaggctagcaaaaaaaaaaaaaaaaaaaaaaaaaaaaaaaaaaaaaaaaaaaaaaaaaaaaaaaaaaaaaaaaaaaaaaaaaaaaaaaa

SEQ ID NO: 3334 - RNA, 5419 nt, synthetic construct
  source 1..5419: mol_type = other RNA
aggaaataagagagaaaagaagagtaagaagaaatataagagccaccatggcccctaagaagaagcgtaaagtgagccgggtgaacggcagcggcagcggcggcggcatgaaccacgaccaggagttcgacccccctaaggtgtaccctcccgtccccgccgagaagagaaagcccatccgggtcctgagcctgttcgatggcatcgccaccggtctgctggtgctgaaggacctgggcatccaggtggataggtacattgcctccgaggtgtgcgaggactccatcaccgtgggaatggtgcgtcatcagggcaagatcatgtacgtgggcgacgtgcggagcgtgacacagaagcatatccaggagtggggccctttcgacctggtgatcggcggcagcccttgcaatgacctgagcatcgtgaacccagcccggaagggcctgtacgagggaaccggcagactgttcttcgagttttacagactgctgcacgacgcccggcctaaggaaggcgacgaccggcccttcttttggctgttcgagaatgtggtggccatgggagtcagcgacaagcgggatattagccggttcctggagagcaaccccgtgatgatcgatgccaaggaagtgagcgccgcccaccgggccagatacttctggggcaatctgcctggcatgaacagacccctggccagcaccgtgaacgacaagctggagctgcaggagtgcctggagcacggccggatcgccaagttcagcaaggtgagaaccatcaccacccgaagcaacagcatcaaacaaggcaaggaccagcactttcctgtgttcatgaacgagaaggaggacatcctgtggtgtaccgagatggagagagtgttcgggttcccagtccactacacagatgtcagcaacatgtctagactggccagacagagactgctgggaagaagctggtccgtccctgtgatcagacacctgttcgcccctctgaaggagtacttcgcctgcgtgagcagcggcaacagcaacgccaacagccggggccccagcttctctagcggcctggtgccactgtccctgagagggagccacatgggccccatggagatctacaaaaccgtgagcgcctggaagcggcagcctgtgcgcgtgctgagcctgtttcggaatatcgataaagtcctgaaaagcctgggattcctggagagcggctctggctccggcggtggcaccctgaagtacgtggaggatgtgacaaacgtggtcagacgggatgtggagaagtggggccccttcgatctggtgtacggcagcacccaacccctgggcagctcttgtgaccggtgccctggctggtacatgtttcagttccaccggatcctgcagtacgccctgccgagacaggagtcccagcggccattcttttggattttcatggacaacttgctgctgaccgaggatgaccaggaaactaccactcggttcctgcagaccgaagccgtgaccctgcaggacgtgagaggccgggactaccagaacgccatgcgggtgtggtccaacatccctggactgaaaagcaagcacgcacctctgacccctaaagaagaggagtacctgcaggcccaggtgcggagcagaagcaagctggacgcccctaaggtggatctgctggtgaagaattgcctcctgcccctgagagagtacttcaagtatttcagccagaatagtctgcccctgggcggcccaagcagcggcgcccctcctcccagcggcggcagcccagccggctccccaacctctaccgaggagggcacctctgagtccgccacccccgagagcggccctggcacctccaccgagcccagcgagggcagcgcacccggcagccctgccggcagccccacctccacagaggagggaaccagcaccgagcccagcgaaggcagcgccccaggcaccagcaccgagcctagtgagggcggctctggcggcggcagcgcccaggagattaaacggatcaacaagatcagaagaagacttgtgaaagacagcaacaccaagaaggccggcaagacaggccccatgaaaaccctgctggttagagtgatgacacccgatctgagagagcggctggaaaacctgagaaagaagcctgaaaatatcccccagcccatcagcaatacatctagagccaacctgaataagctgctgaccgattacaccgaaatgaagaaggcgatcctgcatgtgtactgggaagagttccagaaggaccctgtgggcctgatgagccgggtggcccagcctgccagcaagaagatcgatcagaacaagctgaaacctgagatggacgagaagggcaacctgaccaccgccggctttgcctgctctcagtgtggccagcccctgttcgtgtacaagctggagcaggtgtctgagaagggcaaggcttacaccaactacttcggacggtgcaatgtggccgagcacgaaaagctgatcctgctggcccagctgaagcccgagaaggatagcgacgaagccgtgacatatagcctgggaaagtttgggcagagggccctggatttctacagcattcatgtgaccaaggagtccacccaccccgtgaagcccctggcccagatcgccggaaacagatacgcctccggacctgtgggaaaggccctgagcgacgcatgtatgggcacaatcgcctccttcctgtctaagtaccaggacatcatcatcgaacaccagaaggtggtgaagggcaaccagaagagactggagagcctgcgggagctggccggcaaggaaaacctggaataccctagcgtgaccctgccacctcagcctcacaccaaggagggcgttgatgcctacaacgaagtgatcgcccgggtgcgaatgtgggtgaacctgaacctgtggcagaagctgaagctaagcagagatgatgccaagcctctgctgagactgaagggattcccttcctttcctctggtcgagagacaggccaacgaagtggactggtgggacatggtgtgtaacgtgaagaagctgatcaacgagaaaaaggaggatggcaaggtgttttggcagaatctggctggctacaagagacaggaagccctgagaccatacctgagcagcgaggaagatcggaagaagggaaagaaattcgctcggtaccagctgggcgacctgctgctgcacctggaaaagaagcacggcgaggactggggaaaggtgtacgacgaggcctgggagcggattgacaagaaagtggaaggcctgagcaagcacatcaagctggaagaggaacggagaagcgaggacgcccagagcaaggccgccctgaccgactggctgcgggctaaggccagcttcgtgatcgagggcctgaaggaggccgacaaggacgagttctgcagatgcgagctgaagctgcagaagtggtacggggacctgcggggaaagcccttcgccatcgaagccgagaacagcatcctggacatcagcggcttcagcaagcagtacaactgtgccttcatctggcagaaggacggcgtgaagaagctgaacctgtacctgatcatcaactacttcaagggcggcaagctgcggttcaagaagatcaaacctgaagccttcgaagccaacagattctacaccgtgatcaacaaaaagagcggcgagatcgtgcccatggaggtgaacttcaacttcgacgaccccaacctgatcatcctgcctctggcctttggcaagagacagggcagagaattcatctggaacgacctgctgtccctggaaaccggcagcctgaagctggccaacggaagagtgatcgagaagacactgtacaacagaagaacccggcaggatgagcctgccctgttcgtggccctgaccttcgagcggcgggaggtcctggactcctccaatatcaaaccaatgaacctgatcggcgtggcaagaggcgaaaacatccccgccgtgatcgccctgaccgaccccgagggctgcccactgagccggtttaaggatagcctgggaaacccaacccacatcctgagaatcggcgagagctataaggagaagcagcggaccatccaggccaagaaggaggtggagcagcggagagccggcggctacagccggaagtacgccagcaaagccaagaatctggcagacgatatggtgagaaacaccgctagagatctgctgtactacgccgtgacccaggatgccatgctgatcttcgccaacctgagccggggcttcggccggcagggcaagcggaccttcatggccgagagacagtacacacggatggaggactggctgaccgccaagctggcctacgagggcctgagcaagacctacctgtccaagacactggcccagtacacctccaagacatgcagcaactgtgggtttaccatcaccagcgccgactacgacagggtgctggagaagctgaagaagacagcaacaggctggatgaccacaattaacggcaaggagctgaaggtggagggccagattacctactacaacagatacaagagacagaacgtagtcaaggacctgtccgtcgagctggatagactgagcgaagaatctgtgaacaacgacatctcctcctggacaaagggcagaagcggagaagctctgagcctcctgaagaaaagattctcccatagacccgtgcaggagaagttcgtgtgcctgaactgcggcttcgagacacacgcagccgagcaagccgccctgaacatcgccagatcctggctgttcctgcggagccaggagtacaagaaataccagacaaacaagacaaccggcaacaccgataagagagccttcgtcgagacctggcagtccttttaccggaagaagcttaaggaggtgtggaaacctgccgtgcggtctggcggatctggcggaggctccacaagccagctgaccttcgaggacgtggccctgagcttcagcaaggaggagtggcagatcatggaccccaaccagaagaccctgtacatcgacgtgatgcaggagatctacgagaccgtgaccagcctgggcctgaagctgaagaacgacaccggcaacgaccagcccgtgagcctgagcaccagcgagatccagcccagcggctgcaaggtgctgaggaaggccaggatgaaggtggcccagaccaccaccagccccaagaaaaagagaaaagtctaagctgccttctgcggggcttgccttctggccatgcccttcttctctcccttgcacctgtacctcttggtctttgaataaagcctgagtaggaaggctagcaaaaaaaaaaaaaaaaaaaaaaaaaaaaaaaaaaaaaaaaaaaaaaaaaaaaaaaaaaaaaaaaaaaaaaaaaaaaaaaa

SEQ ID NO: 3335 - RNA, 5419 nt, synthetic construct
  source 1..5419: mol_type = other RNA
aggaaataagagagaaaagaagagtaagaagaaatataagagccaccatggcccctaagaagaagcgtaaagtgagccgggtgaacggcagcggcagcggcggcggcatgaaccacgaccaggagttcgacccccctaaggtgtaccctcccgtccccgccgagaagagaaagcccatccgggtcctgagcctgttcgatggcatcgccaccggtctgctggtgctgaaggacctgggcatccaggtggataggtacattgcctccgaggtgtgcgaggactccatcaccgtgggaatggtgcgtcatcagggcaagatcatgtacgtgggcgacgtgcggagcgtgacacagaagcatatccaggagtggggccctttcgacctggtgatcggcggcagcccttgcaatgacctgagcatcgtgaacccagcccggaagggcctgtacgagggaaccggcagactgttcttcgagttttacagactgctgcacgacgcccggcctaaggaaggcgacgaccggcccttcttttggctgttcgagaatgtggtggccatgggagtcagcgacaagcgggatattagccggttcctggagagcaaccccgtgatgatcgatgccaaggaagtgagcgccgcccaccgggccagatacttctggggcaatctgcctggcatgaacagacccctggccagcaccgtgaacgacaagctggagctgcaggagtgcctggagcacggccggatcgccaagttcagcaaggtgagaaccatcaccacccgaagcaacagcatcaaacaaggcaaggaccagcactttcctgtgttcatgaacgagaaggaggacatcctgtggtgtaccgagatggagagagtgttcgggttcccagtccactacacagatgtcagcaacatgtctagactggccagacagagactgctgggaagaagctggtccgtccctgtgatcagacacctgttcgcccctctgaaggagtacttcgcctgcgtgagcagcggcaacagcaacgccaacagccggggccccagcttctctagcggcctggtgccactgtccctgagagggagccacatgggccccatggagatctacaaaaccgtgagcgcctggaagcggcagcctgtgcgcgtgctgagcctgtttcggaatatcgataaagtcctgaaaagcctgggattcctggagagcggctctggctccggcggtggcaccctgaagtacgtggaggatgtgacaaacgtggtcagacgggatgtggagaagtggggccccttcgatctggtgtacggcagcacccaacccctgggcagctcttgtgaccggtgccctggctggtacatgtttcagttccaccggatcctgcagtacgccctgccgagacaggagtcccagcggccattcttttggattttcatggacaacttgctgctgaccgaggatgaccaggaaactaccactcggttcctgcagaccgaagccgtgaccctgcaggacgtgagaggccgggactaccagaacgccatgcgggtgtggtccaacatccctggactgaaaagcaagcacgcacctctgacccctaaagaagaggagtacctgcaggcccaggtgcggagcagaagcaagctggacgcccctaaggtggatctgctggtgaagaattgcctcctgcccctgagagagtacttcaagtatttcagccagaatagtctgcccctgggcggcccaagcagcggcgcccctcctcccagcggcggcagcccagccggctccccaacctctaccgaggagggcacctctgagtccgccacccccgagagcggccctggcacctccaccgagcccagcgagggcagcgcacccggcagccctgccggcagccccacctccacagaggagggaaccagcaccgagcccagcgaaggcagcgccccaggcaccagcaccgagcctagtgagggcggctctggcggcggcagcgcccaggagattaaacggatcaacaagatcagaagaagacttgtgaaagacagcaacaccaagaaggccggcaagacaggccccatgaaaaccctgctggttagagtgatgacacccgatctgagagagcggctggaaaacctgagaaagaagcctgaaaatatcccccagcccatcagcaatacatctagagccaacctgaataagctgctgaccgattacaccgaaatgaagaaggcgatcctgcatgtgtactgggaagagttccagaaggaccctgtgggcctgatgagccgggtggcccagcctgccagcaagaagatcgatcagaacaagctgaaacctgagatggacgagaagggcaacctgaccaccgccggctttgcctgctctcagtgtggccagcccctgttcgtgtacaagctggagcaggtgtctgagaagggcaaggcttacaccaactacttcggacggtgcaatgtggccgagcacgaaaagctgatcctgctggcccagctgaagcccgagaaggatagcgacgaagccgtgacatatagcctgggaaagtttgggcagagggccctggatttctacagcattcatgtgaccaaggagtccacccaccccgtgaagcccctggcccagatcgccggaaacagatacgcctccggacctgtgggaaaggccctgagcgacgcatgtatgggcacaatcgcctccttcctgtctaagtaccaggacatcatcatcgaacaccagaaggtggtgaagggcaaccagaagagactggagagcctgcgggagctggccggcaaggaaaacctggaataccctagcgtgaccctgccacctcagcctcacaccaaggagggcgttgatgcctacaacgaagtgatcgcccgggtgcgaatgtgggtgaacctgaacctgtggcagaagctgaagctaagcagagatgatgccaagcctctgctgagactgaagggattcccttcctttcctctggtcgagagacaggccaacgaagtggactggtgggacatggtgtgtaacgtgaagaagctgatcaacgagaaaaaggaggatggcaaggtgttttggcagaatctggctggctacaagagacaggaagccctgagaccatacctgagcagcgaggaagatcggaagaagggaaagaaattcgctcggtaccagctgggcgacctgctgctgcacctggaaaagaagcacggcgaggactggggaaaggtgtacgacgaggcctgggagcggattgacaagaaagtggaaggcctgagcaagcacatcaagctggaagaggaacggagaagcgaggacgcccagagcaaggccgccctgaccgactggctgcgggctaaggccagcttcgtgatcgagggcctgaaggaggccgacaaggacgagttctgcagatgcgagctgaagctgcagaagtggtacggggacctgcggggaaagcccttcgccatcgaagccgagaacagcatcctggacatcagcggcttcagcaagcagtacaactgtgccttcatctggcagaaggacggcgtgaagaagctgaacctgtacctgatcatcaactacttcaagggcggcaagctgcggttcaagaagatcaaacctgaagccttcgaagccaacagattctacaccgtgatcaacaaaaagagcggcgagatcgtgcccatggaggtgaacttcaacttcgacgaccccaacctgatcatcctgcctctggcctttggcaagagacagggcagagaattcatctggaacgacctgctgtccctggaaaccggcagcctgaagctggccaacggaagagtgatcgagaagacactgtacaacagaagaacccggcaggatgagcctgccctgttcgtggccctgaccttcgagcggcgggaggtcctggactcctccaatatcaaaccaatgaacctgatcggcgtggcaagaggcgaaaacatccccgccgtgatcgccctgaccgaccccgagggctgcccactgagccggtttaaggatagcctgggaaacccaacccacatcctgagaatcggcgagagctataaggagaagcagcggaccatccaggccaagaaggaggtggagcagcggagagccggcggctacagccggaagtacgccagcaaagccaagaatctggcagacgatatggtgagaaacaccgctagagatctgctgtactacgccgtgacccaggatgccatgctgatcttcgccaacctgagccggggcttcggccggcagggcaagcggaccttcatggccgagagacagtacacacggatggaggactggctgaccgccaagctggcctacgagggcctgagcaagacctacctgtccaagacactggcccagtacacctccaagacatgcagcaactgtgggtttaccatcaccagcgccgactacgacagggtgctggagaagctgaagaagacagcaacaggctggatgaccacaattaacggcaaggagctgaaggtggagggccagattacctactacaacagatacaagagacagaacgtagtcaaggacctgtccgtcgagctggatagactgagcgaagaatctgtgaacaacgacatctcctcctggacaaagggcagaagcggagaagctctgagcctcctgaagaaaagattctcccatagacccgtgcaggagaagttcgtgtgcctgaactgcggcttcgagacacacgcagccgagcaagccgccctgaacatcgccagatcctggctgttcctgcggagccaggagtacaagaaataccagacaaacaagacaaccggcaacaccgataagagagccttcgtcgagacctggcagtccttttaccggaagaagcttaaggaggtgtggaaacctgccgtgcggtctggcggatctggcggaggctccacaagccagctgcaggagaccatgaccttcaaggacgtggaggtgaccttcagccaggacgagtggggctggctggacagcgcccagaggaacctgtacagggacgtgatgctggagaactacaggaacatggccagcctggtgggccccttcaccaagcccgccctgatcagctggctggaggccagggagccctggggcctgaacatgcaggccgcccagcccaagggcaaccccgtggccgcccccaccagccccaagaaaaagagaaaagtctaagctgccttctgcggggcttgccttctggccatgcccttcttctctcccttgcacctgtacctcttggtctttgaataaagcctgagtaggaaggctagcaaaaaaaaaaaaaaaaaaaaaaaaaaaaaaaaaaaaaaaaaaaaaaaaaaaaaaaaaaaaaaaaaaaaaaaaaaaaaaaa

SEQ ID NO: 3336 - RNA, 5419 nt, synthetic construct
  source 1..5419: mol_type = other RNA
aggaaataagagagaaaagaagagtaagaagaaatataagagccaccatggcccctaagaagaagcgtaaagtgagccgggtgaacggcagcggcagcggcggcggcatgaaccacgaccaggagttcgacccccctaaggtgtaccctcccgtccccgccgagaagagaaagcccatccgggtcctgagcctgttcgatggcatcgccaccggtctgctggtgctgaaggacctgggcatccaggtggataggtacattgcctccgaggtgtgcgaggactccatcaccgtgggaatggtgcgtcatcagggcaagatcatgtacgtgggcgacgtgcggagcgtgacacagaagcatatccaggagtggggccctttcgacctggtgatcggcggcagcccttgcaatgacctgagcatcgtgaacccagcccggaagggcctgtacgagggaaccggcagactgttcttcgagttttacagactgctgcacgacgcccggcctaaggaaggcgacgaccggcccttcttttggctgttcgagaatgtggtggccatgggagtcagcgacaagcgggatattagccggttcctggagagcaaccccgtgatgatcgatgccaaggaagtgagcgccgcccaccgggccagatacttctggggcaatctgcctggcatgaacagacccctggccagcaccgtgaacgacaagctggagctgcaggagtgcctggagcacggccggatcgccaagttcagcaaggtgagaaccatcaccacccgaagcaacagcatcaaacaaggcaaggaccagcactttcctgtgttcatgaacgagaaggaggacatcctgtggtgtaccgagatggagagagtgttcgggttcccagtccactacacagatgtcagcaacatgtctagactggccagacagagactgctgggaagaagctggtccgtccctgtgatcagacacctgttcgcccctctgaaggagtacttcgcctgcgtgagcagcggcaacagcaacgccaacagccggggccccagcttctctagcggcctggtgccactgtccctgagagggagccacatgggccccatggagatctacaaaaccgtgagcgcctggaagcggcagcctgtgcgcgtgctgagcctgtttcggaatatcgataaagtcctgaaaagcctgggattcctggagagcggctctggctccggcggtggcaccctgaagtacgtggaggatgtgacaaacgtggtcagacgggatgtggagaagtggggccccttcgatctggtgtacggcagcacccaacccctgggcagctcttgtgaccggtgccctggctggtacatgtttcagttccaccggatcctgcagtacgccctgccgagacaggagtcccagcggccattcttttggattttcatggacaacttgctgctgaccgaggatgaccaggaaactaccactcggttcctgcagaccgaagccgtgaccctgcaggacgtgagaggccgggactaccagaacgccatgcgggtgtggtccaacatccctggactgaaaagcaagcacgcacctctgacccctaaagaagaggagtacctgcaggcccaggtgcggagcagaagcaagctggacgcccctaaggtggatctgctggtgaagaattgcctcctgcccctgagagagtacttcaagtatttcagccagaatagtctgcccctgggcggcccaagcagcggcgcccctcctcccagcggcggcagcccagccggctccccaacctctaccgaggagggcacctctgagtccgccacccccgagagcggccctggcacctccaccgagcccagcgagggcagcgcacccggcagccctgccggcagccccacctccacagaggagggaaccagcaccgagcccagcgaaggcagcgccccaggcaccagcaccgagcctagtgagggcggctctggcggcggcagcgcccaggagattaaacggatcaacaagatcagaagaagacttgtgaaagacagcaacaccaagaaggccggcaagacaggccccatgaaaaccctgctggttagagtgatgacacccgatctgagagagcggctggaaaacctgagaaagaagcctgaaaatatcccccagcccatcagcaatacatctagagccaacctgaataagctgctgaccgattacaccgaaatgaagaaggcgatcctgcatgtgtactgggaagagttccagaaggaccctgtgggcctgatgagccgggtggcccagcctgccagcaagaagatcgatcagaacaagctgaaacctgagatggacgagaagggcaacctgaccaccgccggctttgcctgctctcagtgtggccagcccctgttcgtgtacaagctggagcaggtgtctgagaagggcaaggcttacaccaactacttcggacggtgcaatgtggccgagcacgaaaagctgatcctgctggcccagctgaagcccgagaaggatagcgacgaagccgtgacatatagcctgggaaagtttgggcagagggccctggatttctacagcattcatgtgaccaaggagtccacccaccccgtgaagcccctggcccagatcgccggaaacagatacgcctccggacctgtgggaaaggccctgagcgacgcatgtatgggcacaatcgcctccttcctgtctaagtaccaggacatcatcatcgaacaccagaaggtggtgaagggcaaccagaagagactggagagcctgcgggagctggccggcaaggaaaacctggaataccctagcgtgaccctgccacctcagcctcacaccaaggagggcgttgatgcctacaacgaagtgatcgcccgggtgcgaatgtgggtgaacctgaacctgtggcagaagctgaagctaagcagagatgatgccaagcctctgctgagactgaagggattcccttcctttcctctggtcgagagacaggccaacgaagtggactggtgggacatggtgtgtaacgtgaagaagctgatcaacgagaaaaaggaggatggcaaggtgttttggcagaatctggctggctacaagagacaggaagccctgagaccatacctgagcagcgaggaagatcggaagaagggaaagaaattcgctcggtaccagctgggcgacctgctgctgcacctggaaaagaagcacggcgaggactggggaaaggtgtacgacgaggcctgggagcggattgacaagaaagtggaaggcctgagcaagcacatcaagctggaagaggaacggagaagcgaggacgcccagagcaaggccgccctgaccgactggctgcgggctaaggccagcttcgtgatcgagggcctgaaggaggccgacaaggacgagttctgcagatgcgagctgaagctgcagaagtggtacggggacctgcggggaaagcccttcgccatcgaagccgagaacagcatcctggacatcagcggcttcagcaagcagtacaactgtgccttcatctggcagaaggacggcgtgaagaagctgaacctgtacctgatcatcaactacttcaagggcggcaagctgcggttcaagaagatcaaacctgaagccttcgaagccaacagattctacaccgtgatcaacaaaaagagcggcgagatcgtgcccatggaggtgaacttcaacttcgacgaccccaacctgatcatcctgcctctggcctttggcaagagacagggcagagaattcatctggaacgacctgctgtccctggaaaccggcagcctgaagctggccaacggaagagtgatcgagaagacactgtacaacagaagaacccggcaggatgagcctgccctgttcgtggccctgaccttcgagcggcgggaggtcctggactcctccaatatcaaaccaatgaacctgatcggcgtggcaagaggcgaaaacatccccgccgtgatcgccctgaccgaccccgagggctgcccactgagccggtttaaggatagcctgggaaacccaacccacatcctgagaatcggcgagagctataaggagaagcagcggaccatccaggccaagaaggaggtggagcagcggagagccggcggctacagccggaagtacgccagcaaagccaagaatctggcagacgatatggtgagaaacaccgctagagatctgctgtactacgccgtgacccaggatgccatgctgatcttcgccaacctgagccggggcttcggccggcagggcaagcggaccttcatggccgagagacagtacacacggatggaggactggctgaccgccaagctggcctacgagggcctgagcaagacctacctgtccaagacactggcccagtacacctccaagacatgcagcaactgtgggtttaccatcaccagcgccgactacgacagggtgctggagaagctgaagaagacagcaacaggctggatgaccacaattaacggcaaggagctgaaggtggagggccagattacctactacaacagatacaagagacagaacgtagtcaaggacctgtccgtcgagctggatagactgagcgaagaatctgtgaacaacgacatctcctcctggacaaagggcagaagcggagaagctctgagcctcctgaagaaaagattctcccatagacccgtgcaggagaagttcgtgtgcctgaactgcggcttcgagacacacgcagccgagcaagccgccctgaacatcgccagatcctggctgttcctgcggagccaggagtacaagaaataccagacaaacaagacaaccggcaacaccgataagagagccttcgtcgagacctggcagtccttttaccggaagaagcttaaggaggtgtggaaacctgccgtgcggtctggcggatctggcggaggctccacaagcttccagggcagcgtgagcttcaaggacgtgaccgtgggcttcaccctggaggagtggcagcacctggacagcacccagaggagcctgtacagggacgtgatgctggagaactacagcaacctggtgagcctgggctactgcgtgaccaagcccgaggtgatcttcaggctggagcagggcgaggagccctggatcctggaggaggagttccccagccagagcttccccgagagctgggagaccaccagccccaagaaaaagagaaaagtctaagctgccttctgcggggcttgccttctggccatgcccttcttctctcccttgcacctgtacctcttggtctttgaataaagcctgagtaggaaggctagcaaaaaaaaaaaaaaaaaaaaaaaaaaaaaaaaaaaaaaaaaaaaaaaaaaaaaaaaaaaaaaaaaaaaaaaaaaaaaaaa

SEQ ID NO: 3337 - RNA, 5419 nt, synthetic construct
  source 1..5419: mol_type = other RNA
aggaaataagagagaaaagaagagtaagaagaaatataagagccaccatggcccctaagaagaagcgtaaagtgagccgggtgaacggcagcggcagcggcggcggcatgaaccacgaccaggagttcgacccccctaaggtgtaccctcccgtccccgccgagaagagaaagcccatccgggtcctgagcctgttcgatggcatcgccaccggtctgctggtgctgaaggacctgggcatccaggtggataggtacattgcctccgaggtgtgcgaggactccatcaccgtgggaatggtgcgtcatcagggcaagatcatgtacgtgggcgacgtgcggagcgtgacacagaagcatatccaggagtggggccctttcgacctggtgatcggcggcagcccttgcaatgacctgagcatcgtgaacccagcccggaagggcctgtacgagggaaccggcagactgttcttcgagttttacagactgctgcacgacgcccggcctaaggaaggcgacgaccggcccttcttttggctgttcgagaatgtggtggccatgggagtcagcgacaagcgggatattagccggttcctggagagcaaccccgtgatgatcgatgccaaggaagtgagcgccgcccaccgggccagatacttctggggcaatctgcctggcatgaacagacccctggccagcaccgtgaacgacaagctggagctgcaggagtgcctggagcacggccggatcgccaagttcagcaaggtgagaaccatcaccacccgaagcaacagcatcaaacaaggcaaggaccagcactttcctgtgttcatgaacgagaaggaggacatcctgtggtgtaccgagatggagagagtgttcgggttcccagtccactacacagatgtcagcaacatgtctagactggccagacagagactgctgggaagaagctggtccgtccctgtgatcagacacctgttcgcccctctgaaggagtacttcgcctgcgtgagcagcggcaacagcaacgccaacagccggggccccagcttctctagcggcctggtgccactgtccctgagagggagccacatgggccccatggagatctacaaaaccgtgagcgcctggaagcggcagcctgtgcgcgtgctgagcctgtttcggaatatcgataaagtcctgaaaagcctgggattcctggagagcggctctggctccggcggtggcaccctgaagtacgtggaggatgtgacaaacgtggtcagacgggatgtggagaagtggggccccttcgatctggtgtacggcagcacccaacccctgggcagctcttgtgaccggtgccctggctggtacatgtttcagttccaccggatcctgcagtacgccctgccgagacaggagtcccagcggccattcttttggattttcatggacaacttgctgctgaccgaggatgaccaggaaactaccactcggttcctgcagaccgaagccgtgaccctgcaggacgtgagaggccgggactaccagaacgccatgcgggtgtggtccaacatccctggactgaaaagcaagcacgcacctctgacccctaaagaagaggagtacctgcaggcccaggtgcggagcagaagcaagctggacgcccctaaggtggatctgctggtgaagaattgcctcctgcccctgagagagtacttcaagtatttcagccagaatagtctgcccctgggcggcccaagcagcggcgcccctcctcccagcggcggcagcccagccggctccccaacctctaccgaggagggcacctctgagtccgccacccccgagagcggccctggcacctccaccgagcccagcgagggcagcgcacccggcagccctgccggcagccccacctccacagaggagggaaccagcaccgagcccagcgaaggcagcgccccaggcaccagcaccgagcctagtgagggcggctctggcggcggcagcgcccaggagattaaacggatcaacaagatcagaagaagacttgtgaaagacagcaacaccaagaaggccggcaagacaggccccatgaaaaccctgctggttagagtgatgacacccgatctgagagagcggctggaaaacctgagaaagaagcctgaaaatatcccccagcccatcagcaatacatctagagccaacctgaataagctgctgaccgattacaccgaaatgaagaaggcgatcctgcatgtgtactgggaagagttccagaaggaccctgtgggcctgatgagccgggtggcccagcctgccagcaagaagatcgatcagaacaagctgaaacctgagatggacgagaagggcaacctgaccaccgccggctttgcctgctctcagtgtggccagcccctgttcgtgtacaagctggagcaggtgtctgagaagggcaaggcttacaccaactacttcggacggtgcaatgtggccgagcacgaaaagctgatcctgctggcccagctgaagcccgagaaggatagcgacgaagccgtgacatatagcctgggaaagtttgggcagagggccctggatttctacagcattcatgtgaccaaggagtccacccaccccgtgaagcccctggcccagatcgccggaaacagatacgcctccggacctgtgggaaaggccctgagcgacgcatgtatgggcacaatcgcctccttcctgtctaagtaccaggacatcatcatcgaacaccagaaggtggtgaagggcaaccagaagagactggagagcctgcgggagctggccggcaaggaaaacctggaataccctagcgtgaccctgccacctcagcctcacaccaaggagggcgttgatgcctacaacgaagtgatcgcccgggtgcgaatgtgggtgaacctgaacctgtggcagaagctgaagctaagcagagatgatgccaagcctctgctgagactgaagggattcccttcctttcctctggtcgagagacaggccaacgaagtggactggtgggacatggtgtgtaacgtgaagaagctgatcaacgagaaaaaggaggatggcaaggtgttttggcagaatctggctggctacaagagacaggaagccctgagaccatacctgagcagcgaggaagatcggaagaagggaaagaaattcgctcggtaccagctgggcgacctgctgctgcacctggaaaagaagcacggcgaggactggggaaaggtgtacgacgaggcctgggagcggattgacaagaaagtggaaggcctgagcaagcacatcaagctggaagaggaacggagaagcgaggacgcccagagcaaggccgccctgaccgactggctgcgggctaaggccagcttcgtgatcgagggcctgaaggaggccgacaaggacgagttctgcagatgcgagctgaagctgcagaagtggtacggggacctgcggggaaagcccttcgccatcgaagccgagaacagcatcctggacatcagcggcttcagcaagcagtacaactgtgccttcatctggcagaaggacggcgtgaagaagctgaacctgtacctgatcatcaactacttcaagggcggcaagctgcggttcaagaagatcaaacctgaagccttcgaagccaacagattctacaccgtgatcaacaaaaagagcggcgagatcgtgcccatggaggtgaacttcaacttcgacgaccccaacctgatcatcctgcctctggcctttggcaagagacagggcagagaattcatctggaacgacctgctgtccctggaaaccggcagcctgaagctggccaacggaagagtgatcgagaagacactgtacaacagaagaacccggcaggatgagcctgccctgttcgtggccctgaccttcgagcggcgggaggtcctggactcctccaatatcaaaccaatgaacctgatcggcgtggcaagaggcgaaaacatccccgccgtgatcgccctgaccgaccccgagggctgcccactgagccggtttaaggatagcctgggaaacccaacccacatcctgagaatcggcgagagctataaggagaagcagcggaccatccaggccaagaaggaggtggagcagcggagagccggcggctacagccggaagtacgccagcaaagccaagaatctggcagacgatatggtgagaaacaccgctagagatctgctgtactacgccgtgacccaggatgccatgctgatcttcgccaacctgagccggggcttcggccggcagggcaagcggaccttcatggccgagagacagtacacacggatggaggactggctgaccgccaagctggcctacgagggcctgagcaagacctacctgtccaagacactggcccagtacacctccaagacatgcagcaactgtgggtttaccatcaccagcgccgactacgacagggtgctggagaagctgaagaagacagcaacaggctggatgaccacaattaacggcaaggagctgaaggtggagggccagattacctactacaacagatacaagagacagaacgtagtcaaggacctgtccgtcgagctggatagactgagcgaagaatctgtgaacaacgacatctcctcctggacaaagggcagaagcggagaagctctgagcctcctgaagaaaagattctcccatagacccgtgcaggagaagttcgtgtgcctgaactgcggcttcgagacacacgcagccgagcaagccgccctgaacatcgccagatcctggctgttcctgcggagccaggagtacaagaaataccagacaaacaagacaaccggcaacaccgataagagagccttcgtcgagacctggcagtccttttaccggaagaagcttaaggaggtgtggaaacctgccgtgcggtctggcggatctggcggaggctccacaagcatggcccacgacctggtgatgttcagggacgtggccgtggacttcagccaggaggagtgggagtgcctgaacagctaccagaggaacctgtacaaggacgtgatcctggagaactacagcaacctggtgagcctgggctgcagcatcagcaagcccgacgtgatcaccctgctggagcagggcaaggagccctggctggtggtgagggacgagaagaggaggtggagcctggcccccaccttcaccagccccaagaaaaagagaaaagtctaagctgccttctgcggggcttgccttctggccatgcccttcttctctcccttgcacctgtacctcttggtctttgaataaagcctgagtaggaaggctagcaaaaaaaaaaaaaaaaaaaaaaaaaaaaaaaaaaaaaaaaaaaaaaaaaaaaaaaaaaaaaaaaaaaaaaaaaaaaaaaa

SEQ ID NO: 3338 - RNA, 5419 nt, synthetic construct
  source 1..5419: mol_type = other RNA
aggaaataagagagaaaagaagagtaagaagaaatataagagccaccatggcccctaagaagaagcgtaaagtgagccgggtgaacggcagcggcagcggcggcggcatgaaccacgaccaggagttcgacccccctaaggtgtaccctcccgtccccgccgagaagagaaagcccatccgggtcctgagcctgttcgatggcatcgccaccggtctgctggtgctgaaggacctgggcatccaggtggataggtacattgcctccgaggtgtgcgaggactccatcaccgtgggaatggtgcgtcatcagggcaagatcatgtacgtgggcgacgtgcggagcgtgacacagaagcatatccaggagtggggccctttcgacctggtgatcggcggcagcccttgcaatgacctgagcatcgtgaacccagcccggaagggcctgtacgagggaaccggcagactgttcttcgagttttacagactgctgcacgacgcccggcctaaggaaggcgacgaccggcccttcttttggctgttcgagaatgtggtggccatgggagtcagcgacaagcgggatattagccggttcctggagagcaaccccgtgatgatcgatgccaaggaagtgagcgccgcccaccgggccagatacttctggggcaatctgcctggcatgaacagacccctggccagcaccgtgaacgacaagctggagctgcaggagtgcctggagcacggccggatcgccaagttcagcaaggtgagaaccatcaccacccgaagcaacagcatcaaacaaggcaaggaccagcactttcctgtgttcatgaacgagaaggaggacatcctgtggtgtaccgagatggagagagtgttcgggttcccagtccactacacagatgtcagcaacatgtctagactggccagacagagactgctgggaagaagctggtccgtccctgtgatcagacacctgttcgcccctctgaaggagtacttcgcctgcgtgagcagcggcaacagcaacgccaacagccggggccccagcttctctagcggcctggtgccactgtccctgagagggagccacatgggccccatggagatctacaaaaccgtgagcgcctggaagcggcagcctgtgcgcgtgctgagcctgtttcggaatatcgataaagtcctgaaaagcctgggattcctggagagcggctctggctccggcggtggcaccctgaagtacgtggaggatgtgacaaacgtggtcagacgggatgtggagaagtggggccccttcgatctggtgtacggcagcacccaacccctgggcagctcttgtgaccggtgccctggctggtacatgtttcagttccaccggatcctgcagtacgccctgccgagacaggagtcccagcggccattcttttggattttcatggacaacttgctgctgaccgaggatgaccaggaaactaccactcggttcctgcagaccgaagccgtgaccctgcaggacgtgagaggccgggactaccagaacgccatgcgggtgtggtccaacatccctggactgaaaagcaagcacgcacctctgacccctaaagaagaggagtacctgcaggcccaggtgcggagcagaagcaagctggacgcccctaaggtggatctgctggtgaagaattgcctcctgcccctgagagagtacttcaagtatttcagccagaatagtctgcccctgggcggcccaagcagcggcgcccctcctcccagcggcggcagcccagccggctccccaacctctaccgaggagggcacctctgagtccgccacccccgagagcggccctggcacctccaccgagcccagcgagggcagcgcacccggcagccctgccggcagccccacctccacagaggagggaaccagcaccgagcccagcgaaggcagcgccccaggcaccagcaccgagcctagtgagggcggctctggcggcggcagcgcccaggagattaaacggatcaacaagatcagaagaagacttgtgaaagacagcaacaccaagaaggccggcaagacaggccccatgaaaaccctgctggttagagtgatgacacccgatctgagagagcggctggaaaacctgagaaagaagcctgaaaatatcccccagcccatcagcaatacatctagagccaacctgaataagctgctgaccgattacaccgaaatgaagaaggcgatcctgcatgtgtactgggaagagttccagaaggaccctgtgggcctgatgagccgggtggcccagcctgccagcaagaagatcgatcagaacaagctgaaacctgagatggacgagaagggcaacctgaccaccgccggctttgcctgctctcagtgtggccagcccctgttcgtgtacaagctggagcaggtgtctgagaagggcaaggcttacaccaactacttcggacggtgcaatgtggccgagcacgaaaagctgatcctgctggcccagctgaagcccgagaaggatagcgacgaagccgtgacatatagcctgggaaagtttgggcagagggccctggatttctacagcattcatgtgaccaaggagtccacccaccccgtgaagcccctggcccagatcgccggaaacagatacgcctccggacctgtgggaaaggccctgagcgacgcatgtatgggcacaatcgcctccttcctgtctaagtaccaggacatcatcatcgaacaccagaaggtggtgaagggcaaccagaagagactggagagcctgcgggagctggccggcaaggaaaacctggaataccctagcgtgaccctgccacctcagcctcacaccaaggagggcgttgatgcctacaacgaagtgatcgcccgggtgcgaatgtgggtgaacctgaacctgtggcagaagctgaagctaagcagagatgatgccaagcctctgctgagactgaagggattcccttcctttcctctggtcgagagacaggccaacgaagtggactggtgggacatggtgtgtaacgtgaagaagctgatcaacgagaaaaaggaggatggcaaggtgttttggcagaatctggctggctacaagagacaggaagccctgagaccatacctgagcagcgaggaagatcggaagaagggaaagaaattcgctcggtaccagctgggcgacctgctgctgcacctggaaaagaagcacggcgaggactggggaaaggtgtacgacgaggcctgggagcggattgacaagaaagtggaaggcctgagcaagcacatcaagctggaagaggaacggagaagcgaggacgcccagagcaaggccgccctgaccgactggctgcgggctaaggccagcttcgtgatcgagggcctgaaggaggccgacaaggacgagttctgcagatgcgagctgaagctgcagaagtggtacggggacctgcggggaaagcccttcgccatcgaagccgagaacagcatcctggacatcagcggcttcagcaagcagtacaactgtgccttcatctggcagaaggacggcgtgaagaagctgaacctgtacctgatcatcaactacttcaagggcggcaagctgcggttcaagaagatcaaacctgaagccttcgaagccaacagattctacaccgtgatcaacaaaaagagcggcgagatcgtgcccatggaggtgaacttcaacttcgacgaccccaacctgatcatcctgcctctggcctttggcaagagacagggcagagaattcatctggaacgacctgctgtccctggaaaccggcagcctgaagctggccaacggaagagtgatcgagaagacactgtacaacagaagaacccggcaggatgagcctgccctgttcgtggccctgaccttcgagcggcgggaggtcctggactcctccaatatcaaaccaatgaacctgatcggcgtggcaagaggcgaaaacatccccgccgtgatcgccctgaccgaccccgagggctgcccactgagccggtttaaggatagcctgggaaacccaacccacatcctgagaatcggcgagagctataaggagaagcagcggaccatccaggccaagaaggaggtggagcagcggagagccggcggctacagccggaagtacgccagcaaagccaagaatctggcagacgatatggtgagaaacaccgctagagatctgctgtactacgccgtgacccaggatgccatgctgatcttcgccaacctgagccggggcttcggccggcagggcaagcggaccttcatggccgagagacagtacacacggatggaggactggctgaccgccaagctggcctacgagggcctgagcaagacctacctgtccaagacactggcccagtacacctccaagacatgcagcaactgtgggtttaccatcaccagcgccgactacgacagggtgctggagaagctgaagaagacagcaacaggctggatgaccacaattaacggcaaggagctgaaggtggagggccagattacctactacaacagatacaagagacagaacgtagtcaaggacctgtccgtcgagctggatagactgagcgaagaatctgtgaacaacgacatctcctcctggacaaagggcagaagcggagaagctctgagcctcctgaagaaaagattctcccatagacccgtgcaggagaagttcgtgtgcctgaactgcggcttcgagacacacgcagccgagcaagccgccctgaacatcgccagatcctggctgttcctgcggagccaggagtacaagaaataccagacaaacaagacaaccggcaacaccgataagagagccttcgtcgagacctggcagtccttttaccggaagaagcttaaggaggtgtggaaacctgccgtgcggtctggcggatctggcggaggctccacaagcgcccaggagctggtgaccttcaaggacatcgccatcgacttcacccaggaggagtgggccctgctggacaccagccagaggcagctgtacagggacgtgatgctggagaacatcagccacctggtgagcgtgggctaccacctgtgcaagagcgacgtgatcagccagctggagcagggcgtggagctgtggagggacggcagggagttcctgcagggcctgaaccccgacaggaagagcggcaccagccccaagaaaaagagaaaagtctaagctgccttctgcggggcttgccttctggccatgcccttcttctctcccttgcacctgtacctcttggtctttgaataaagcctgagtaggaaggctagcaaaaaaaaaaaaaaaaaaaaaaaaaaaaaaaaaaaaaaaaaaaaaaaaaaaaaaaaaaaaaaaaaaaaaaaaaaaaaaaa

SEQ ID NO: 3339 - RNA, 5419 nt, synthetic construct
  source 1..5419: mol_type = other RNA
aggaaataagagagaaaagaagagtaagaagaaatataagagccaccatggcccctaagaagaagcgtaaagtgagccgggtgaacggcagcggcagcggcggcggcatgaaccacgaccaggagttcgacccccctaaggtgtaccctcccgtccccgccgagaagagaaagcccatccgggtcctgagcctgttcgatggcatcgccaccggtctgctggtgctgaaggacctgggcatccaggtggataggtacattgcctccgaggtgtgcgaggactccatcaccgtgggaatggtgcgtcatcagggcaagatcatgtacgtgggcgacgtgcggagcgtgacacagaagcatatccaggagtggggccctttcgacctggtgatcggcggcagcccttgcaatgacctgagcatcgtgaacccagcccggaagggcctgtacgagggaaccggcagactgttcttcgagttttacagactgctgcacgacgcccggcctaaggaaggcgacgaccggcccttcttttggctgttcgagaatgtggtggccatgggagtcagcgacaagcgggatattagccggttcctggagagcaaccccgtgatgatcgatgccaaggaagtgagcgccgcccaccgggccagatacttctggggcaatctgcctggcatgaacagacccctggccagcaccgtgaacgacaagctggagctgcaggagtgcctggagcacggccggatcgccaagttcagcaaggtgagaaccatcaccacccgaagcaacagcatcaaacaaggcaaggaccagcactttcctgtgttcatgaacgagaaggaggacatcctgtggtgtaccgagatggagagagtgttcgggttcccagtccactacacagatgtcagcaacatgtctagactggccagacagagactgctgggaagaagctggtccgtccctgtgatcagacacctgttcgcccctctgaaggagtacttcgcctgcgtgagcagcggcaacagcaacgccaacagccggggccccagcttctctagcggcctggtgccactgtccctgagagggagccacatgggccccatggagatctacaaaaccgtgagcgcctggaagcggcagcctgtgcgcgtgctgagcctgtttcggaatatcgataaagtcctgaaaagcctgggattcctggagagcggctctggctccggcggtggcaccctgaagtacgtggaggatgtgacaaacgtggtcagacgggatgtggagaagtggggccccttcgatctggtgtacggcagcacccaacccctgggcagctcttgtgaccggtgccctggctggtacatgtttcagttccaccggatcctgcagtacgccctgccgagacaggagtcccagcggccattcttttggattttcatggacaacttgctgctgaccgaggatgaccaggaaactaccactcggttcctgcagaccgaagccgtgaccctgcaggacgtgagaggccgggactaccagaacgccatgcgggtgtggtccaacatccctggactgaaaagcaagcacgcacctctgacccctaaagaagaggagtacctgcaggcccaggtgcggagcagaagcaagctggacgcccctaaggtggatctgctggtgaagaattgcctcctgcccctgagagagtacttcaagtatttcagccagaatagtctgcccctgggcggcccaagcagcggcgcccctcctcccagcggcggcagcccagccggctccccaacctctaccgaggagggcacctctgagtccgccacccccgagagcggccctggcacctccaccgagcccagcgagggcagcgcacccggcagccctgccggcagccccacctccacagaggagggaaccagcaccgagcccagcgaaggcagcgccccaggcaccagcaccgagcctagtgagggcggctctggcggcggcagcgcccaggagattaaacggatcaacaagatcagaagaagacttgtgaaagacagcaacaccaagaaggccggcaagacaggccccatgaaaaccctgctggttagagtgatgacacccgatctgagagagcggctggaaaacctgagaaagaagcctgaaaatatcccccagcccatcagcaatacatctagagccaacctgaataagctgctgaccgattacaccgaaatgaagaaggcgatcctgcatgtgtactgggaagagttccagaaggaccctgtgggcctgatgagccgggtggcccagcctgccagcaagaagatcgatcagaacaagctgaaacctgagatggacgagaagggcaacctgaccaccgccggctttgcctgctctcagtgtggccagcccctgttcgtgtacaagctggagcaggtgtctgagaagggcaaggcttacaccaactacttcggacggtgcaatgtggccgagcacgaaaagctgatcctgctggcccagctgaagcccgagaaggatagcgacgaagccgtgacatatagcctgggaaagtttgggcagagggccctggatttctacagcattcatgtgaccaaggagtccacccaccccgtgaagcccctggcccagatcgccggaaacagatacgcctccggacctgtgggaaaggccctgagcgacgcatgtatgggcacaatcgcctccttcctgtctaagtaccaggacatcatcatcgaacaccagaaggtggtgaagggcaaccagaagagactggagagcctgcgggagctggccggcaaggaaaacctggaataccctagcgtgaccctgccacctcagcctcacaccaaggagggcgttgatgcctacaacgaagtgatcgcccgggtgcgaatgtgggtgaacctgaacctgtggcagaagctgaagctaagcagagatgatgccaagcctctgctgagactgaagggattcccttcctttcctctggtcgagagacaggccaacgaagtggactggtgggacatggtgtgtaacgtgaagaagctgatcaacgagaaaaaggaggatggcaaggtgttttggcagaatctggctggctacaagagacaggaagccctgagaccatacctgagcagcgaggaagatcggaagaagggaaagaaattcgctcggtaccagctgggcgacctgctgctgcacctggaaaagaagcacggcgaggactggggaaaggtgtacgacgaggcctgggagcggattgacaagaaagtggaaggcctgagcaagcacatcaagctggaagaggaacggagaagcgaggacgcccagagcaaggccgccctgaccgactggctgcgggctaaggccagcttcgtgatcgagggcctgaaggaggccgacaaggacgagttctgcagatgcgagctgaagctgcagaagtggtacggggacctgcggggaaagcccttcgccatcgaagccgagaacagcatcctggacatcagcggcttcagcaagcagtacaactgtgccttcatctggcagaaggacggcgtgaagaagctgaacctgtacctgatcatcaactacttcaagggcggcaagctgcggttcaagaagatcaaacctgaagccttcgaagccaacagattctacaccgtgatcaacaaaaagagcggcgagatcgtgcccatggaggtgaacttcaacttcgacgaccccaacctgatcatcctgcctctggcctttggcaagagacagggcagagaattcatctggaacgacctgctgtccctggaaaccggcagcctgaagctggccaacggaagagtgatcgagaagacactgtacaacagaagaacccggcaggatgagcctgccctgttcgtggccctgaccttcgagcggcgggaggtcctggactcctccaatatcaaaccaatgaacctgatcggcgtggcaagaggcgaaaacatccccgccgtgatcgccctgaccgaccccgagggctgcccactgagccggtttaaggatagcctgggaaacccaacccacatcctgagaatcggcgagagctataaggagaagcagcggaccatccaggccaagaaggaggtggagcagcggagagccggcggctacagccggaagtacgccagcaaagccaagaatctggcagacgatatggtgagaaacaccgctagagatctgctgtactacgccgtgacccaggatgccatgctgatcttcgccaacctgagccggggcttcggccggcagggcaagcggaccttcatggccgagagacagtacacacggatggaggactggctgaccgccaagctggcctacgagggcctgagcaagacctacctgtccaagacactggcccagtacacctccaagacatgcagcaactgtgggtttaccatcaccagcgccgactacgacagggtgctggagaagctgaagaagacagcaacaggctggatgaccacaattaacggcaaggagctgaaggtggagggccagattacctactacaacagatacaagagacagaacgtagtcaaggacctgtccgtcgagctggatagactgagcgaagaatctgtgaacaacgacatctcctcctggacaaagggcagaagcggagaagctctgagcctcctgaagaaaagattctcccatagacccgtgcaggagaagttcgtgtgcctgaactgcggcttcgagacacacgcagccgagcaagccgccctgaacatcgccagatcctggctgttcctgcggagccaggagtacaagaaataccagacaaacaagacaaccggcaacaccgataagagagccttcgtcgagacctggcagtccttttaccggaagaagcttaaggaggtgtggaaacctgccgtgcggtctggcggatctggcggaggctccacaagcaggcccgagagcgtgaccttcgaggacgtggccgtgtacttcagcgagaacgagtggatcggcctgggccccgcccagagggccctgtacagggacgtgatgctggagaactacggcgccgtggccagcctggccttccccttccccaagcccgccctgatcagccagctggagaggggcgaggccccctggtgcagcgtgccctggggcgccctggacggcgaggaccccaggagcatcagcaccagccccaagaaaaagagaaaagtctaagctgccttctgcggggcttgccttctggccatgcccttcttctctcccttgcacctgtacctcttggtctttgaataaagcctgagtaggaaggctagcaaaaaaaaaaaaaaaaaaaaaaaaaaaaaaaaaaaaaaaaaaaaaaaaaaaaaaaaaaaaaaaaaaaaaaaaaaaaaaaa

SEQ ID NO: 3340 - RNA, 5419 nt, synthetic construct
  source 1..5419: mol_type = other RNA
aggaaataagagagaaaagaagagtaagaagaaatataagagccaccatggcccctaagaagaagcgtaaagtgagccgggtgaacggcagcggcagcggcggcggcatgaaccacgaccaggagttcgacccccctaaggtgtaccctcccgtccccgccgagaagagaaagcccatccgggtcctgagcctgttcgatggcatcgccaccggtctgctggtgctgaaggacctgggcatccaggtggataggtacattgcctccgaggtgtgcgaggactccatcaccgtgggaatggtgcgtcatcagggcaagatcatgtacgtgggcgacgtgcggagcgtgacacagaagcatatccaggagtggggccctttcgacctggtgatcggcggcagcccttgcaatgacctgagcatcgtgaacccagcccggaagggcctgtacgagggaaccggcagactgttcttcgagttttacagactgctgcacgacgcccggcctaaggaaggcgacgaccggcccttcttttggctgttcgagaatgtggtggccatgggagtcagcgacaagcgggatattagccggttcctggagagcaaccccgtgatgatcgatgccaaggaagtgagcgccgcccaccgggccagatacttctggggcaatctgcctggcatgaacagacccctggccagcaccgtgaacgacaagctggagctgcaggagtgcctggagcacggccggatcgccaagttcagcaaggtgagaaccatcaccacccgaagcaacagcatcaaacaaggcaaggaccagcactttcctgtgttcatgaacgagaaggaggacatcctgtggtgtaccgagatggagagagtgttcgggttcccagtccactacacagatgtcagcaacatgtctagactggccagacagagactgctgggaagaagctggtccgtccctgtgatcagacacctgttcgcccctctgaaggagtacttcgcctgcgtgagcagcggcaacagcaacgccaacagccggggccccagcttctctagcggcctggtgccactgtccctgagagggagccacatgggccccatggagatctacaaaaccgtgagcgcctggaagcggcagcctgtgcgcgtgctgagcctgtttcggaatatcgataaagtcctgaaaagcctgggattcctggagagcggctctggctccggcggtggcaccctgaagtacgtggaggatgtgacaaacgtggtcagacgggatgtggagaagtggggccccttcgatctggtgtacggcagcacccaacccctgggcagctcttgtgaccggtgccctggctggtacatgtttcagttccaccggatcctgcagtacgccctgccgagacaggagtcccagcggccattcttttggattttcatggacaacttgctgctgaccgaggatgaccaggaaactaccactcggttcctgcagaccgaagccgtgaccctgcaggacgtgagaggccgggactaccagaacgccatgcgggtgtggtccaacatccctggactgaaaagcaagcacgcacctctgacccctaaagaagaggagtacctgcaggcccaggtgcggagcagaagcaagctggacgcccctaaggtggatctgctggtgaagaattgcctcctgcccctgagagagtacttcaagtatttcagccagaatagtctgcccctgggcggcccaagcagcggcgcccctcctcccagcggcggcagcccagccggctccccaacctctaccgaggagggcacctctgagtccgccacccccgagagcggccctggcacctccaccgagcccagcgagggcagcgcacccggcagccctgccggcagccccacctccacagaggagggaaccagcaccgagcccagcgaaggcagcgccccaggcaccagcaccgagcctagtgagggcggctctggcggcggcagcgcccaggagattaaacggatcaacaagatcagaagaagacttgtgaaagacagcaacaccaagaaggccggcaagacaggccccatgaaaaccctgctggttagagtgatgacacccgatctgagagagcggctggaaaacctgagaaagaagcctgaaaatatcccccagcccatcagcaatacatctagagccaacctgaataagctgctgaccgattacaccgaaatgaagaaggcgatcctgcatgtgtactgggaagagttccagaaggaccctgtgggcctgatgagccgggtggcccagcctgccagcaagaagatcgatcagaacaagctgaaacctgagatggacgagaagggcaacctgaccaccgccggctttgcctgctctcagtgtggccagcccctgttcgtgtacaagctggagcaggtgtctgagaagggcaaggcttacaccaactacttcggacggtgcaatgtggccgagcacgaaaagctgatcctgctggcccagctgaagcccgagaaggatagcgacgaagccgtgacatatagcctgggaaagtttgggcagagggccctggatttctacagcattcatgtgaccaaggagtccacccaccccgtgaagcccctggcccagatcgccggaaacagatacgcctccggacctgtgggaaaggccctgagcgacgcatgtatgggcacaatcgcctccttcctgtctaagtaccaggacatcatcatcgaacaccagaaggtggtgaagggcaaccagaagagactggagagcctgcgggagctggccggcaaggaaaacctggaataccctagcgtgaccctgccacctcagcctcacaccaaggagggcgttgatgcctacaacgaagtgatcgcccgggtgcgaatgtgggtgaacctgaacctgtggcagaagctgaagctaagcagagatgatgccaagcctctgctgagactgaagggattcccttcctttcctctggtcgagagacaggccaacgaagtggactggtgggacatggtgtgtaacgtgaagaagctgatcaacgagaaaaaggaggatggcaaggtgttttggcagaatctggctggctacaagagacaggaagccctgagaccatacctgagcagcgaggaagatcggaagaagggaaagaaattcgctcggtaccagctgggcgacctgctgctgcacctggaaaagaagcacggcgaggactggggaaaggtgtacgacgaggcctgggagcggattgacaagaaagtggaaggcctgagcaagcacatcaagctggaagaggaacggagaagcgaggacgcccagagcaaggccgccctgaccgactggctgcgggctaaggccagcttcgtgatcgagggcctgaaggaggccgacaaggacgagttctgcagatgcgagctgaagctgcagaagtggtacggggacctgcggggaaagcccttcgccatcgaagccgagaacagcatcctggacatcagcggcttcagcaagcagtacaactgtgccttcatctggcagaaggacggcgtgaagaagctgaacctgtacctgatcatcaactacttcaagggcggcaagctgcggttcaagaagatcaaacctgaagccttcgaagccaacagattctacaccgtgatcaacaaaaagagcggcgagatcgtgcccatggaggtgaacttcaacttcgacgaccccaacctgatcatcctgcctctggcctttggcaagagacagggcagagaattcatctggaacgacctgctgtccctggaaaccggcagcctgaagctggccaacggaagagtgatcgagaagacactgtacaacagaagaacccggcaggatgagcctgccctgttcgtggccctgaccttcgagcggcgggaggtcctggactcctccaatatcaaaccaatgaacctgatcggcgtggcaagaggcgaaaacatccccgccgtgatcgccctgaccgaccccgagggctgcccactgagccggtttaaggatagcctgggaaacccaacccacatcctgagaatcggcgagagctataaggagaagcagcggaccatccaggccaagaaggaggtggagcagcggagagccggcggctacagccggaagtacgccagcaaagccaagaatctggcagacgatatggtgagaaacaccgctagagatctgctgtactacgccgtgacccaggatgccatgctgatcttcgccaacctgagccggggcttcggccggcagggcaagcggaccttcatggccgagagacagtacacacggatggaggactggctgaccgccaagctggcctacgagggcctgagcaagacctacctgtccaagacactggcccagtacacctccaagacatgcagcaactgtgggtttaccatcaccagcgccgactacgacagggtgctggagaagctgaagaagacagcaacaggctggatgaccacaattaacggcaaggagctgaaggtggagggccagattacctactacaacagatacaagagacagaacgtagtcaaggacctgtccgtcgagctggatagactgagcgaagaatctgtgaacaacgacatctcctcctggacaaagggcagaagcggagaagctctgagcctcctgaagaaaagattctcccatagacccgtgcaggagaagttcgtgtgcctgaactgcggcttcgagacacacgcagccgagcaagccgccctgaacatcgccagatcctggctgttcctgcggagccaggagtacaagaaataccagacaaacaagacaaccggcaacaccgataagagagccttcgtcgagacctggcagtccttttaccggaagaagcttaaggaggtgtggaaacctgccgtgcggtctggcggatctggcggaggctccacaagcgcccagggcagcgtgatgttcagcgacgtgagcatcgacttcagccaggaggagtgggagtgcctgaacgacgaccagagggacctgtacagggacgtgatgctggagaactacagcaacctggtgagcatgggccactgcatcagcaagcccgacgtgatcagcttcctggagcagggcaaggagccctggctggtggacagggagcccaccaggtaccagtggcccgtgctggagagcaggaccagccccaagaaaaagagaaaagtctaagctgccttctgcggggcttgccttctggccatgcccttcttctctcccttgcacctgtacctcttggtctttgaataaagcctgagtaggaaggctagcaaaaaaaaaaaaaaaaaaaaaaaaaaaaaaaaaaaaaaaaaaaaaaaaaaaaaaaaaaaaaaaaaaaaaaaaaaaaaaaa

SEQ ID NO: 3341 - RNA, 5419 nt, synthetic construct
  source 1..5419: mol_type = other RNA
aggaaataagagagaaaagaagagtaagaagaaatataagagccaccatggcccctaagaagaagcgtaaagtgagccgggtgaacggcagcggcagcggcggcggcatgaaccacgaccaggagttcgacccccctaaggtgtaccctcccgtccccgccgagaagagaaagcccatccgggtcctgagcctgttcgatggcatcgccaccggtctgctggtgctgaaggacctgggcatccaggtggataggtacattgcctccgaggtgtgcgaggactccatcaccgtgggaatggtgcgtcatcagggcaagatcatgtacgtgggcgacgtgcggagcgtgacacagaagcatatccaggagtggggccctttcgacctggtgatcggcggcagcccttgcaatgacctgagcatcgtgaacccagcccggaagggcctgtacgagggaaccggcagactgttcttcgagttttacagactgctgcacgacgcccggcctaaggaaggcgacgaccggcccttcttttggctgttcgagaatgtggtggccatgggagtcagcgacaagcgggatattagccggttcctggagagcaaccccgtgatgatcgatgccaaggaagtgagcgccgcccaccgggccagatacttctggggcaatctgcctggcatgaacagacccctggccagcaccgtgaacgacaagctggagctgcaggagtgcctggagcacggccggatcgccaagttcagcaaggtgagaaccatcaccacccgaagcaacagcatcaaacaaggcaaggaccagcactttcctgtgttcatgaacgagaaggaggacatcctgtggtgtaccgagatggagagagtgttcgggttcccagtccactacacagatgtcagcaacatgtctagactggccagacagagactgctgggaagaagctggtccgtccctgtgatcagacacctgttcgcccctctgaaggagtacttcgcctgcgtgagcagcggcaacagcaacgccaacagccggggccccagcttctctagcggcctggtgccactgtccctgagagggagccacatgggccccatggagatctacaaaaccgtgagcgcctggaagcggcagcctgtgcgcgtgctgagcctgtttcggaatatcgataaagtcctgaaaagcctgggattcctggagagcggctctggctccggcggtggcaccctgaagtacgtggaggatgtgacaaacgtggtcagacgggatgtggagaagtggggccccttcgatctggtgtacggcagcacccaacccctgggcagctcttgtgaccggtgccctggctggtacatgtttcagttccaccggatcctgcagtacgccctgccgagacaggagtcccagcggccattcttttggattttcatggacaacttgctgctgaccgaggatgaccaggaaactaccactcggttcctgcagaccgaagccgtgaccctgcaggacgtgagaggccgggactaccagaacgccatgcgggtgtggtccaacatccctggactgaaaagcaagcacgcacctctgacccctaaagaagaggagtacctgcaggcccaggtgcggagcagaagcaagctggacgcccctaaggtggatctgctggtgaagaattgcctcctgcccctgagagagtacttcaagtatttcagccagaatagtctgcccctgggcggcccaagcagcggcgcccctcctcccagcggcggcagcccagccggctccccaacctctaccgaggagggcacctctgagtccgccacccccgagagcggccctggcacctccaccgagcccagcgagggcagcgcacccggcagccctgccggcagccccacctccacagaggagggaaccagcaccgagcccagcgaaggcagcgccccaggcaccagcaccgagcctagtgagggcggctctggcggcggcagcgcccaggagattaaacggatcaacaagatcagaagaagacttgtgaaagacagcaacaccaagaaggccggcaagacaggccccatgaaaaccctgctggttagagtgatgacacccgatctgagagagcggctggaaaacctgagaaagaagcctgaaaatatcccccagcccatcagcaatacatctagagccaacctgaataagctgctgaccgattacaccgaaatgaagaaggcgatcctgcatgtgtactgggaagagttccagaaggaccctgtgggcctgatgagccgggtggcccagcctgccagcaagaagatcgatcagaacaagctgaaacctgagatggacgagaagggcaacctgaccaccgccggctttgcctgctctcagtgtggccagcccctgttcgtgtacaagctggagcaggtgtctgagaagggcaaggcttacaccaactacttcggacggtgcaatgtggccgagcacgaaaagctgatcctgctggcccagctgaagcccgagaaggatagcgacgaagccgtgacatatagcctgggaaagtttgggcagagggccctggatttctacagcattcatgtgaccaaggagtccacccaccccgtgaagcccctggcccagatcgccggaaacagatacgcctccggacctgtgggaaaggccctgagcgacgcatgtatgggcacaatcgcctccttcctgtctaagtaccaggacatcatcatcgaacaccagaaggtggtgaagggcaaccagaagagactggagagcctgcgggagctggccggcaaggaaaacctggaataccctagcgtgaccctgccacctcagcctcacaccaaggagggcgttgatgcctacaacgaagtgatcgcccgggtgcgaatgtgggtgaacctgaacctgtggcagaagctgaagctaagcagagatgatgccaagcctctgctgagactgaagggattcccttcctttcctctggtcgagagacaggccaacgaagtggactggtgggacatggtgtgtaacgtgaagaagctgatcaacgagaaaaaggaggatggcaaggtgttttggcagaatctggctggctacaagagacaggaagccctgagaccatacctgagcagcgaggaagatcggaagaagggaaagaaattcgctcggtaccagctgggcgacctgctgctgcacctggaaaagaagcacggcgaggactggggaaaggtgtacgacgaggcctgggagcggattgacaagaaagtggaaggcctgagcaagcacatcaagctggaagaggaacggagaagcgaggacgcccagagcaaggccgccctgaccgactggctgcgggctaaggccagcttcgtgatcgagggcctgaaggaggccgacaaggacgagttctgcagatgcgagctgaagctgcagaagtggtacggggacctgcggggaaagcccttcgccatcgaagccgagaacagcatcctggacatcagcggcttcagcaagcagtacaactgtgccttcatctggcagaaggacggcgtgaagaagctgaacctgtacctgatcatcaactacttcaagggcggcaagctgcggttcaagaagatcaaacctgaagccttcgaagccaacagattctacaccgtgatcaacaaaaagagcggcgagatcgtgcccatggaggtgaacttcaacttcgacgaccccaacctgatcatcctgcctctggcctttggcaagagacagggcagagaattcatctggaacgacctgctgtccctggaaaccggcagcctgaagctggccaacggaagagtgatcgagaagacactgtacaacagaagaacccggcaggatgagcctgccctgttcgtggccctgaccttcgagcggcgggaggtcctggactcctccaatatcaaaccaatgaacctgatcggcgtggcaagaggcgaaaacatccccgccgtgatcgccctgaccgaccccgagggctgcccactgagccggtttaaggatagcctgggaaacccaacccacatcctgagaatcggcgagagctataaggagaagcagcggaccatccaggccaagaaggaggtggagcagcggagagccggcggctacagccggaagtacgccagcaaagccaagaatctggcagacgatatggtgagaaacaccgctagagatctgctgtactacgccgtgacccaggatgccatgctgatcttcgccaacctgagccggggcttcggccggcagggcaagcggaccttcatggccgagagacagtacacacggatggaggactggctgaccgccaagctggcctacgagggcctgagcaagacctacctgtccaagacactggcccagtacacctccaagacatgcagcaactgtgggtttaccatcaccagcgccgactacgacagggtgctggagaagctgaagaagacagcaacaggctggatgaccacaattaacggcaaggagctgaaggtggagggccagattacctactacaacagatacaagagacagaacgtagtcaaggacctgtccgtcgagctggatagactgagcgaagaatctgtgaacaacgacatctcctcctggacaaagggcagaagcggagaagctctgagcctcctgaagaaaagattctcccatagacccgtgcaggagaagttcgtgtgcctgaactgcggcttcgagacacacgcagccgagcaagccgccctgaacatcgccagatcctggctgttcctgcggagccaggagtacaagaaataccagacaaacaagacaaccggcaacaccgataagagagccttcgtcgagacctggcagtccttttaccggaagaagcttaaggaggtgtggaaacctgccgtgcggtctggcggatctggcggaggctccacaagcccccaggagcccgtgaccttcgaggacgtggccgtgtacttcacccagaaccagtgggccagcctggaccccacccagagggccctgtacagggaggtgatgctggagaactacgccagcgtggccagcctggtggccttccccttccccaagcccgacctggtgagccagctggagaggggcgaggccccctggagccccgacccctgggaggccgaggtgctgaagggcacctgccccggcaccagccccaagaaaaagagaaaagtctaagctgccttctgcggggcttgccttctggccatgcccttcttctctcccttgcacctgtacctcttggtctttgaataaagcctgagtaggaaggctagcaaaaaaaaaaaaaaaaaaaaaaaaaaaaaaaaaaaaaaaaaaaaaaaaaaaaaaaaaaaaaaaaaaaaaaaaaaaaaaaa

SEQ ID NO: 3342 - RNA, 5419 nt, synthetic construct
  source 1..5419: mol_type = other RNA
aggaaataagagagaaaagaagagtaagaagaaatataagagccaccatggcccctaagaagaagcgtaaagtgagccgggtgaacggcagcggcagcggcggcggcatgaaccacgaccaggagttcgacccccctaaggtgtaccctcccgtccccgccgagaagagaaagcccatccgggtcctgagcctgttcgatggcatcgccaccggtctgctggtgctgaaggacctgggcatccaggtggataggtacattgcctccgaggtgtgcgaggactccatcaccgtgggaatggtgcgtcatcagggcaagatcatgtacgtgggcgacgtgcggagcgtgacacagaagcatatccaggagtggggccctttcgacctggtgatcggcggcagcccttgcaatgacctgagcatcgtgaacccagcccggaagggcctgtacgagggaaccggcagactgttcttcgagttttacagactgctgcacgacgcccggcctaaggaaggcgacgaccggcccttcttttggctgttcgagaatgtggtggccatgggagtcagcgacaagcgggatattagccggttcctggagagcaaccccgtgatgatcgatgccaaggaagtgagcgccgcccaccgggccagatacttctggggcaatctgcctggcatgaacagacccctggccagcaccgtgaacgacaagctggagctgcaggagtgcctggagcacggccggatcgccaagttcagcaaggtgagaaccatcaccacccgaagcaacagcatcaaacaaggcaaggaccagcactttcctgtgttcatgaacgagaaggaggacatcctgtggtgtaccgagatggagagagtgttcgggttcccagtccactacacagatgtcagcaacatgtctagactggccagacagagactgctgggaagaagctggtccgtccctgtgatcagacacctgttcgcccctctgaaggagtacttcgcctgcgtgagcagcggcaacagcaacgccaacagccggggccccagcttctctagcggcctggtgccactgtccctgagagggagccacatgggccccatggagatctacaaaaccgtgagcgcctggaagcggcagcctgtgcgcgtgctgagcctgtttcggaatatcgataaagtcctgaaaagcctgggattcctggagagcggctctggctccggcggtggcaccctgaagtacgtggaggatgtgacaaacgtggtcagacgggatgtggagaagtggggccccttcgatctggtgtacggcagcacccaacccctgggcagctcttgtgaccggtgccctggctggtacatgtttcagttccaccggatcctgcagtacgccctgccgagacaggagtcccagcggccattcttttggattttcatggacaacttgctgctgaccgaggatgaccaggaaactaccactcggttcctgcagaccgaagccgtgaccctgcaggacgtgagaggccgggactaccagaacgccatgcgggtgtggtccaacatccctggactgaaaagcaagcacgcacctctgacccctaaagaagaggagtacctgcaggcccaggtgcggagcagaagcaagctggacgcccctaaggtggatctgctggtgaagaattgcctcctgcccctgagagagtacttcaagtatttcagccagaatagtctgcccctgggcggcccaagcagcggcgcccctcctcccagcggcggcagcccagccggctccccaacctctaccgaggagggcacctctgagtccgccacccccgagagcggccctggcacctccaccgagcccagcgagggcagcgcacccggcagccctgccggcagccccacctccacagaggagggaaccagcaccgagcccagcgaaggcagcgccccaggcaccagcaccgagcctagtgagggcggctctggcggcggcagcgcccaggagattaaacggatcaacaagatcagaagaagacttgtgaaagacagcaacaccaagaaggccggcaagacaggccccatgaaaaccctgctggttagagtgatgacacccgatctgagagagcggctggaaaacctgagaaagaagcctgaaaatatcccccagcccatcagcaatacatctagagccaacctgaataagctgctgaccgattacaccgaaatgaagaaggcgatcctgcatgtgtactgggaagagttccagaaggaccctgtgggcctgatgagccgggtggcccagcctgccagcaagaagatcgatcagaacaagctgaaacctgagatggacgagaagggcaacctgaccaccgccggctttgcctgctctcagtgtggccagcccctgttcgtgtacaagctggagcaggtgtctgagaagggcaaggcttacaccaactacttcggacggtgcaatgtggccgagcacgaaaagctgatcctgctggcccagctgaagcccgagaaggatagcgacgaagccgtgacatatagcctgggaaagtttgggcagagggccctggatttctacagcattcatgtgaccaaggagtccacccaccccgtgaagcccctggcccagatcgccggaaacagatacgcctccggacctgtgggaaaggccctgagcgacgcatgtatgggcacaatcgcctccttcctgtctaagtaccaggacatcatcatcgaacaccagaaggtggtgaagggcaaccagaagagactggagagcctgcgggagctggccggcaaggaaaacctggaataccctagcgtgaccctgccacctcagcctcacaccaaggagggcgttgatgcctacaacgaagtgatcgcccgggtgcgaatgtgggtgaacctgaacctgtggcagaagctgaagctaagcagagatgatgccaagcctctgctgagactgaagggattcccttcctttcctctggtcgagagacaggccaacgaagtggactggtgggacatggtgtgtaacgtgaagaagctgatcaacgagaaaaaggaggatggcaaggtgttttggcagaatctggctggctacaagagacaggaagccctgagaccatacctgagcagcgaggaagatcggaagaagggaaagaaattcgctcggtaccagctgggcgacctgctgctgcacctggaaaagaagcacggcgaggactggggaaaggtgtacgacgaggcctgggagcggattgacaagaaagtggaaggcctgagcaagcacatcaagctggaagaggaacggagaagcgaggacgcccagagcaaggccgccctgaccgactggctgcgggctaaggccagcttcgtgatcgagggcctgaaggaggccgacaaggacgagttctgcagatgcgagctgaagctgcagaagtggtacggggacctgcggggaaagcccttcgccatcgaagccgagaacagcatcctggacatcagcggcttcagcaagcagtacaactgtgccttcatctggcagaaggacggcgtgaagaagctgaacctgtacctgatcatcaactacttcaagggcggcaagctgcggttcaagaagatcaaacctgaagccttcgaagccaacagattctacaccgtgatcaacaaaaagagcggcgagatcgtgcccatggaggtgaacttcaacttcgacgaccccaacctgatcatcctgcctctggcctttggcaagagacagggcagagaattcatctggaacgacctgctgtccctggaaaccggcagcctgaagctggccaacggaagagtgatcgagaagacactgtacaacagaagaacccggcaggatgagcctgccctgttcgtggccctgaccttcgagcggcgggaggtcctggactcctccaatatcaaaccaatgaacctgatcggcgtggcaagaggcgaaaacatccccgccgtgatcgccctgaccgaccccgagggctgcccactgagccggtttaaggatagcctgggaaacccaacccacatcctgagaatcggcgagagctataaggagaagcagcggaccatccaggccaagaaggaggtggagcagcggagagccggcggctacagccggaagtacgccagcaaagccaagaatctggcagacgatatggtgagaaacaccgctagagatctgctgtactacgccgtgacccaggatgccatgctgatcttcgccaacctgagccggggcttcggccggcagggcaagcggaccttcatggccgagagacagtacacacggatggaggactggctgaccgccaagctggcctacgagggcctgagcaagacctacctgtccaagacactggcccagtacacctccaagacatgcagcaactgtgggtttaccatcaccagcgccgactacgacagggtgctggagaagctgaagaagacagcaacaggctggatgaccacaattaacggcaaggagctgaaggtggagggccagattacctactacaacagatacaagagacagaacgtagtcaaggacctgtccgtcgagctggatagactgagcgaagaatctgtgaacaacgacatctcctcctggacaaagggcagaagcggagaagctctgagcctcctgaagaaaagattctcccatagacccgtgcaggagaagttcgtgtgcctgaactgcggcttcgagacacacgcagccgagcaagccgccctgaacatcgccagatcctggctgttcctgcggagccaggagtacaagaaataccagacaaacaagacaaccggcaacaccgataagagagccttcgtcgagacctggcagtccttttaccggaagaagcttaaggaggtgtggaaacctgccgtgcggtctggcggatctggcggaggctccacaagcatgggcctggtgagcttcgaggacatcgccgtgtacttcaacctggaggagtggcaggacctggacaccgcccagaggaccctgtacagggacgtgatgctggagacctacagcagcctggtgttcctggacccctgcatcgccaagcccaagctgatcttcaacctggagaggggcttcggcccctggagcctggccgaggccagcagcaggagcctgcccggcgtgcacaacgtgagcaccaccagccccaagaaaaagagaaaagtctaagctgccttctgcggggcttgccttctggccatgcccttcttctctcccttgcacctgtacctcttggtctttgaataaagcctgagtaggaaggctagcaaaaaaaaaaaaaaaaaaaaaaaaaaaaaaaaaaaaaaaaaaaaaaaaaaaaaaaaaaaaaaaaaaaaaaaaaaaaaaaa

SEQ ID NO: 3343 - RNA, 5419 nt, synthetic construct
  source 1..5419: mol_type = other RNA
aggaaataagagagaaaagaagagtaagaagaaatataagagccaccatggcccctaagaagaagcgtaaagtgagccgggtgaacggcagcggcagcggcggcggcatgaaccacgaccaggagttcgacccccctaaggtgtaccctcccgtccccgccgagaagagaaagcccatccgggtcctgagcctgttcgatggcatcgccaccggtctgctggtgctgaaggacctgggcatccaggtggataggtacattgcctccgaggtgtgcgaggactccatcaccgtgggaatggtgcgtcatcagggcaagatcatgtacgtgggcgacgtgcggagcgtgacacagaagcatatccaggagtggggccctttcgacctggtgatcggcggcagcccttgcaatgacctgagcatcgtgaacccagcccggaagggcctgtacgagggaaccggcagactgttcttcgagttttacagactgctgcacgacgcccggcctaaggaaggcgacgaccggcccttcttttggctgttcgagaatgtggtggccatgggagtcagcgacaagcgggatattagccggttcctggagagcaaccccgtgatgatcgatgccaaggaagtgagcgccgcccaccgggccagatacttctggggcaatctgcctggcatgaacagacccctggccagcaccgtgaacgacaagctggagctgcaggagtgcctggagcacggccggatcgccaagttcagcaaggtgagaaccatcaccacccgaagcaacagcatcaaacaaggcaaggaccagcactttcctgtgttcatgaacgagaaggaggacatcctgtggtgtaccgagatggagagagtgttcgggttcccagtccactacacagatgtcagcaacatgtctagactggccagacagagactgctgggaagaagctggtccgtccctgtgatcagacacctgttcgcccctctgaaggagtacttcgcctgcgtgagcagcggcaacagcaacgccaacagccggggccccagcttctctagcggcctggtgccactgtccctgagagggagccacatgggccccatggagatctacaaaaccgtgagcgcctggaagcggcagcctgtgcgcgtgctgagcctgtttcggaatatcgataaagtcctgaaaagcctgggattcctggagagcggctctggctccggcggtggcaccctgaagtacgtggaggatgtgacaaacgtggtcagacgggatgtggagaagtggggccccttcgatctggtgtacggcagcacccaacccctgggcagctcttgtgaccggtgccctggctggtacatgtttcagttccaccggatcctgcagtacgccctgccgagacaggagtcccagcggccattcttttggattttcatggacaacttgctgctgaccgaggatgaccaggaaactaccactcggttcctgcagaccgaagccgtgaccctgcaggacgtgagaggccgggactaccagaacgccatgcgggtgtggtccaacatccctggactgaaaagcaagcacgcacctctgacccctaaagaagaggagtacctgcaggcccaggtgcggagcagaagcaagctggacgcccctaaggtggatctgctggtgaagaattgcctcctgcccctgagagagtacttcaagtatttcagccagaatagtctgcccctgggcggcccaagcagcggcgcccctcctcccagcggcggcagcccagccggctccccaacctctaccgaggagggcacctctgagtccgccacccccgagagcggccctggcacctccaccgagcccagcgagggcagcgcacccggcagccctgccggcagccccacctccacagaggagggaaccagcaccgagcccagcgaaggcagcgccccaggcaccagcaccgagcctagtgagggcggctctggcggcggcagcgcccaggagattaaacggatcaacaagatcagaagaagacttgtgaaagacagcaacaccaagaaggccggcaagacaggccccatgaaaaccctgctggttagagtgatgacacccgatctgagagagcggctggaaaacctgagaaagaagcctgaaaatatcccccagcccatcagcaatacatctagagccaacctgaataagctgctgaccgattacaccgaaatgaagaaggcgatcctgcatgtgtactgggaagagttccagaaggaccctgtgggcctgatgagccgggtggcccagcctgccagcaagaagatcgatcagaacaagctgaaacctgagatggacgagaagggcaacctgaccaccgccggctttgcctgctctcagtgtggccagcccctgttcgtgtacaagctggagcaggtgtctgagaagggcaaggcttacaccaactacttcggacggtgcaatgtggccgagcacgaaaagctgatcctgctggcccagctgaagcccgagaaggatagcgacgaagccgtgacatatagcctgggaaagtttgggcagagggccctggatttctacagcattcatgtgaccaaggagtccacccaccccgtgaagcccctggcccagatcgccggaaacagatacgcctccggacctgtgggaaaggccctgagcgacgcatgtatgggcacaatcgcctccttcctgtctaagtaccaggacatcatcatcgaacaccagaaggtggtgaagggcaaccagaagagactggagagcctgcgggagctggccggcaaggaaaacctggaataccctagcgtgaccctgccacctcagcctcacaccaaggagggcgttgatgcctacaacgaagtgatcgcccgggtgcgaatgtgggtgaacctgaacctgtggcagaagctgaagctaagcagagatgatgccaagcctctgctgagactgaagggattcccttcctttcctctggtcgagagacaggccaacgaagtggactggtgggacatggtgtgtaacgtgaagaagctgatcaacgagaaaaaggaggatggcaaggtgttttggcagaatctggctggctacaagagacaggaagccctgagaccatacctgagcagcgaggaagatcggaagaagggaaagaaattcgctcggtaccagctgggcgacctgctgctgcacctggaaaagaagcacggcgaggactggggaaaggtgtacgacgaggcctgggagcggattgacaagaaagtggaaggcctgagcaagcacatcaagctggaagaggaacggagaagcgaggacgcccagagcaaggccgccctgaccgactggctgcgggctaaggccagcttcgtgatcgagggcctgaaggaggccgacaaggacgagttctgcagatgcgagctgaagctgcagaagtggtacggggacctgcggggaaagcccttcgccatcgaagccgagaacagcatcctggacatcagcggcttcagcaagcagtacaactgtgccttcatctggcagaaggacggcgtgaagaagctgaacctgtacctgatcatcaactacttcaagggcggcaagctgcggttcaagaagatcaaacctgaagccttcgaagccaacagattctacaccgtgatcaacaaaaagagcggcgagatcgtgcccatggaggtgaacttcaacttcgacgaccccaacctgatcatcctgcctctggcctttggcaagagacagggcagagaattcatctggaacgacctgctgtccctggaaaccggcagcctgaagctggccaacggaagagtgatcgagaagacactgtacaacagaagaacccggcaggatgagcctgccctgttcgtggccctgaccttcgagcggcgggaggtcctggactcctccaatatcaaaccaatgaacctgatcggcgtggcaagaggcgaaaacatccccgccgtgatcgccctgaccgaccccgagggctgcccactgagccggtttaaggatagcctgggaaacccaacccacatcctgagaatcggcgagagctataaggagaagcagcggaccatccaggccaagaaggaggtggagcagcggagagccggcggctacagccggaagtacgccagcaaagccaagaatctggcagacgatatggtgagaaacaccgctagagatctgctgtactacgccgtgacccaggatgccatgctgatcttcgccaacctgagccggggcttcggccggcagggcaagcggaccttcatggccgagagacagtacacacggatggaggactggctgaccgccaagctggcctacgagggcctgagcaagacctacctgtccaagacactggcccagtacacctccaagacatgcagcaactgtgggtttaccatcaccagcgccgactacgacagggtgctggagaagctgaagaagacagcaacaggctggatgaccacaattaacggcaaggagctgaaggtggagggccagattacctactacaacagatacaagagacagaacgtagtcaaggacctgtccgtcgagctggatagactgagcgaagaatctgtgaacaacgacatctcctcctggacaaagggcagaagcggagaagctctgagcctcctgaagaaaagattctcccatagacccgtgcaggagaagttcgtgtgcctgaactgcggcttcgagacacacgcagccgagcaagccgccctgaacatcgccagatcctggctgttcctgcggagccaggagtacaagaaataccagacaaacaagacaaccggcaacaccgataagagagccttcgtcgagacctggcagtccttttaccggaagaagcttaaggaggtgtggaaacctgccgtgcggtctggcggatctggcggaggctccacaagcatggagagcctgaccctggaggacgtggccgtggacttcacctgggaggagtggcagttcctgagccccgcccagaaggacctgtacagggacgtgatgctggagaactacagcaacctggtggccgtgggctaccaggccaggaagcccgacgccctgagcaagctggagaggggcgaggagccctgcaccaccgaggacgagatctacgccaggatctgcagcgacagcggcggcgccagcaccagccccaagaaaaagagaaaagtctaagctgccttctgcggggcttgccttctggccatgcccttcttctctcccttgcacctgtacctcttggtctttgaataaagcctgagtaggaaggctagcaaaaaaaaaaaaaaaaaaaaaaaaaaaaaaaaaaaaaaaaaaaaaaaaaaaaaaaaaaaaaaaaaaaaaaaaaaaaaaaa

SEQ ID NO: 3344 - RNA, 5419 nt, synthetic construct
  source 1..5419: mol_type = other RNA
aggaaataagagagaaaagaagagtaagaagaaatataagagccaccatggcccctaagaagaagcgtaaagtgagccgggtgaacggcagcggcagcggcggcggcatgaaccacgaccaggagttcgacccccctaaggtgtaccctcccgtccccgccgagaagagaaagcccatccgggtcctgagcctgttcgatggcatcgccaccggtctgctggtgctgaaggacctgggcatccaggtggataggtacattgcctccgaggtgtgcgaggactccatcaccgtgggaatggtgcgtcatcagggcaagatcatgtacgtgggcgacgtgcggagcgtgacacagaagcatatccaggagtggggccctttcgacctggtgatcggcggcagcccttgcaatgacctgagcatcgtgaacccagcccggaagggcctgtacgagggaaccggcagactgttcttcgagttttacagactgctgcacgacgcccggcctaaggaaggcgacgaccggcccttcttttggctgttcgagaatgtggtggccatgggagtcagcgacaagcgggatattagccggttcctggagagcaaccccgtgatgatcgatgccaaggaagtgagcgccgcccaccgggccagatacttctggggcaatctgcctggcatgaacagacccctggccagcaccgtgaacgacaagctggagctgcaggagtgcctggagcacggccggatcgccaagttcagcaaggtgagaaccatcaccacccgaagcaacagcatcaaacaaggcaaggaccagcactttcctgtgttcatgaacgagaaggaggacatcctgtggtgtaccgagatggagagagtgttcgggttcccagtccactacacagatgtcagcaacatgtctagactggccagacagagactgctgggaagaagctggtccgtccctgtgatcagacacctgttcgcccctctgaaggagtacttcgcctgcgtgagcagcggcaacagcaacgccaacagccggggccccagcttctctagcggcctggtgccactgtccctgagagggagccacatgggccccatggagatctacaaaaccgtgagcgcctggaagcggcagcctgtgcgcgtgctgagcctgtttcggaatatcgataaagtcctgaaaagcctgggattcctggagagcggctctggctccggcggtggcaccctgaagtacgtggaggatgtgacaaacgtggtcagacgggatgtggagaagtggggccccttcgatctggtgtacggcagcacccaacccctgggcagctcttgtgaccggtgccctggctggtacatgtttcagttccaccggatcctgcagtacgccctgccgagacaggagtcccagcggccattcttttggattttcatggacaacttgctgctgaccgaggatgaccaggaaactaccactcggttcctgcagaccgaagccgtgaccctgcaggacgtgagaggccgggactaccagaacgccatgcgggtgtggtccaacatccctggactgaaaagcaagcacgcacctctgacccctaaagaagaggagtacctgcaggcccaggtgcggagcagaagcaagctggacgcccctaaggtggatctgctggtgaagaattgcctcctgcccctgagagagtacttcaagtatttcagccagaatagtctgcccctgggcggcccaagcagcggcgcccctcctcccagcggcggcagcccagccggctccccaacctctaccgaggagggcacctctgagtccgccacccccgagagcggccctggcacctccaccgagcccagcgagggcagcgcacccggcagccctgccggcagccccacctccacagaggagggaaccagcaccgagcccagcgaaggcagcgccccaggcaccagcaccgagcctagtgagggcggctctggcggcggcagcgcccaggagattaaacggatcaacaagatcagaagaagacttgtgaaagacagcaacaccaagaaggccggcaagacaggccccatgaaaaccctgctggttagagtgatgacacccgatctgagagagcggctggaaaacctgagaaagaagcctgaaaatatcccccagcccatcagcaatacatctagagccaacctgaataagctgctgaccgattacaccgaaatgaagaaggcgatcctgcatgtgtactgggaagagttccagaaggaccctgtgggcctgatgagccgggtggcccagcctgccagcaagaagatcgatcagaacaagctgaaacctgagatggacgagaagggcaacctgaccaccgccggctttgcctgctctcagtgtggccagcccctgttcgtgtacaagctggagcaggtgtctgagaagggcaaggcttacaccaactacttcggacggtgcaatgtggccgagcacgaaaagctgatcctgctggcccagctgaagcccgagaaggatagcgacgaagccgtgacatatagcctgggaaagtttgggcagagggccctggatttctacagcattcatgtgaccaaggagtccacccaccccgtgaagcccctggcccagatcgccggaaacagatacgcctccggacctgtgggaaaggccctgagcgacgcatgtatgggcacaatcgcctccttcctgtctaagtaccaggacatcatcatcgaacaccagaaggtggtgaagggcaaccagaagagactggagagcctgcgggagctggccggcaaggaaaacctggaataccctagcgtgaccctgccacctcagcctcacaccaaggagggcgttgatgcctacaacgaagtgatcgcccgggtgcgaatgtgggtgaacctgaacctgtggcagaagctgaagctaagcagagatgatgccaagcctctgctgagactgaagggattcccttcctttcctctggtcgagagacaggccaacgaagtggactggtgggacatggtgtgtaacgtgaagaagctgatcaacgagaaaaaggaggatggcaaggtgttttggcagaatctggctggctacaagagacaggaagccctgagaccatacctgagcagcgaggaagatcggaagaagggaaagaaattcgctcggtaccagctgggcgacctgctgctgcacctggaaaagaagcacggcgaggactggggaaaggtgtacgacgaggcctgggagcggattgacaagaaagtggaaggcctgagcaagcacatcaagctggaagaggaacggagaagcgaggacgcccagagcaaggccgccctgaccgactggctgcgggctaaggccagcttcgtgatcgagggcctgaaggaggccgacaaggacgagttctgcagatgcgagctgaagctgcagaagtggtacggggacctgcggggaaagcccttcgccatcgaagccgagaacagcatcctggacatcagcggcttcagcaagcagtacaactgtgccttcatctggcagaaggacggcgtgaagaagctgaacctgtacctgatcatcaactacttcaagggcggcaagctgcggttcaagaagatcaaacctgaagccttcgaagccaacagattctacaccgtgatcaacaaaaagagcggcgagatcgtgcccatggaggtgaacttcaacttcgacgaccccaacctgatcatcctgcctctggcctttggcaagagacagggcagagaattcatctggaacgacctgctgtccctggaaaccggcagcctgaagctggccaacggaagagtgatcgagaagacactgtacaacagaagaacccggcaggatgagcctgccctgttcgtggccctgaccttcgagcggcgggaggtcctggactcctccaatatcaaaccaatgaacctgatcggcgtggcaagaggcgaaaacatccccgccgtgatcgccctgaccgaccccgagggctgcccactgagccggtttaaggatagcctgggaaacccaacccacatcctgagaatcggcgagagctataaggagaagcagcggaccatccaggccaagaaggaggtggagcagcggagagccggcggctacagccggaagtacgccagcaaagccaagaatctggcagacgatatggtgagaaacaccgctagagatctgctgtactacgccgtgacccaggatgccatgctgatcttcgccaacctgagccggggcttcggccggcagggcaagcggaccttcatggccgagagacagtacacacggatggaggactggctgaccgccaagctggcctacgagggcctgagcaagacctacctgtccaagacactggcccagtacacctccaagacatgcagcaactgtgggtttaccatcaccagcgccgactacgacagggtgctggagaagctgaagaagacagcaacaggctggatgaccacaattaacggcaaggagctgaaggtggagggccagattacctactacaacagatacaagagacagaacgtagtcaaggacctgtccgtcgagctggatagactgagcgaagaatctgtgaacaacgacatctcctcctggacaaagggcagaagcggagaagctctgagcctcctgaagaaaagattctcccatagacccgtgcaggagaagttcgtgtgcctgaactgcggcttcgagacacacgcagccgagcaagccgccctgaacatcgccagatcctggctgttcctgcggagccaggagtacaagaaataccagacaaacaagacaaccggcaacaccgataagagagccttcgtcgagacctggcagtccttttaccggaagaagcttaaggaggtgtggaaacctgccgtgcggtctggcggatctggcggaggctccacaagccaggccggcagcgacctgttcagggacgtggccatcgtgttcagccaggaggagtgggagcagctggcccccacccagagggacctgtacagggacgtgatgctggagacctacagcaacctggtgagcctgggcctggccgtgagcaagcccgacgtgatcgccttcctggagcagggcagggagccctggaccgtggagggcgtggccaccggcggcctgtgccccgtgctgaagagcaggaccagccccaagaaaaagagaaaagtctaagctgccttctgcggggcttgccttctggccatgcccttcttctctcccttgcacctgtacctcttggtctttgaataaagcctgagtaggaaggctagcaaaaaaaaaaaaaaaaaaaaaaaaaaaaaaaaaaaaaaaaaaaaaaaaaaaaaaaaaaaaaaaaaaaaaaaaaaaaaaaa

SEQ ID NO: 3345 - RNA, 5419 nt, synthetic construct
  source 1..5419: mol_type = other RNA
aggaaataagagagaaaagaagagtaagaagaaatataagagccaccatggcccctaagaagaagcgtaaagtgagccgggtgaacggcagcggcagcggcggcggcatgaaccacgaccaggagttcgacccccctaaggtgtaccctcccgtccccgccgagaagagaaagcccatccgggtcctgagcctgttcgatggcatcgccaccggtctgctggtgctgaaggacctgggcatccaggtggataggtacattgcctccgaggtgtgcgaggactccatcaccgtgggaatggtgcgtcatcagggcaagatcatgtacgtgggcgacgtgcggagcgtgacacagaagcatatccaggagtggggccctttcgacctggtgatcggcggcagcccttgcaatgacctgagcatcgtgaacccagcccggaagggcctgtacgagggaaccggcagactgttcttcgagttttacagactgctgcacgacgcccggcctaaggaaggcgacgaccggcccttcttttggctgttcgagaatgtggtggccatgggagtcagcgacaagcgggatattagccggttcctggagagcaaccccgtgatgatcgatgccaaggaagtgagcgccgcccaccgggccagatacttctggggcaatctgcctggcatgaacagacccctggccagcaccgtgaacgacaagctggagctgcaggagtgcctggagcacggccggatcgccaagttcagcaaggtgagaaccatcaccacccgaagcaacagcatcaaacaaggcaaggaccagcactttcctgtgttcatgaacgagaaggaggacatcctgtggtgtaccgagatggagagagtgttcgggttcccagtccactacacagatgtcagcaacatgtctagactggccagacagagactgctgggaagaagctggtccgtccctgtgatcagacacctgttcgcccctctgaaggagtacttcgcctgcgtgagcagcggcaacagcaacgccaacagccggggccccagcttctctagcggcctggtgccactgtccctgagagggagccacatgggccccatggagatctacaaaaccgtgagcgcctggaagcggcagcctgtgcgcgtgctgagcctgtttcggaatatcgataaagtcctgaaaagcctgggattcctggagagcggctctggctccggcggtggcaccctgaagtacgtggaggatgtgacaaacgtggtcagacgggatgtggagaagtggggccccttcgatctggtgtacggcagcacccaacccctgggcagctcttgtgaccggtgccctggctggtacatgtttcagttccaccggatcctgcagtacgccctgccgagacaggagtcccagcggccattcttttggattttcatggacaacttgctgctgaccgaggatgaccaggaaactaccactcggttcctgcagaccgaagccgtgaccctgcaggacgtgagaggccgggactaccagaacgccatgcgggtgtggtccaacatccctggactgaaaagcaagcacgcacctctgacccctaaagaagaggagtacctgcaggcccaggtgcggagcagaagcaagctggacgcccctaaggtggatctgctggtgaagaattgcctcctgcccctgagagagtacttcaagtatttcagccagaatagtctgcccctgggcggcccaagcagcggcgcccctcctcccagcggcggcagcccagccggctccccaacctctaccgaggagggcacctctgagtccgccacccccgagagcggccctggcacctccaccgagcccagcgagggcagcgcacccggcagccctgccggcagccccacctccacagaggagggaaccagcaccgagcccagcgaaggcagcgccccaggcaccagcaccgagcctagtgagggcggctctggcggcggcagcgcccaggagattaaacggatcaacaagatcagaagaagacttgtgaaagacagcaacaccaagaaggccggcaagacaggccccatgaaaaccctgctggttagagtgatgacacccgatctgagagagcggctggaaaacctgagaaagaagcctgaaaatatcccccagcccatcagcaatacatctagagccaacctgaataagctgctgaccgattacaccgaaatgaagaaggcgatcctgcatgtgtactgggaagagttccagaaggaccctgtgggcctgatgagccgggtggcccagcctgccagcaagaagatcgatcagaacaagctgaaacctgagatggacgagaagggcaacctgaccaccgccggctttgcctgctctcagtgtggccagcccctgttcgtgtacaagctggagcaggtgtctgagaagggcaaggcttacaccaactacttcggacggtgcaatgtggccgagcacgaaaagctgatcctgctggcccagctgaagcccgagaaggatagcgacgaagccgtgacatatagcctgggaaagtttgggcagagggccctggatttctacagcattcatgtgaccaaggagtccacccaccccgtgaagcccctggcccagatcgccggaaacagatacgcctccggacctgtgggaaaggccctgagcgacgcatgtatgggcacaatcgcctccttcctgtctaagtaccaggacatcatcatcgaacaccagaaggtggtgaagggcaaccagaagagactggagagcctgcgggagctggccggcaaggaaaacctggaataccctagcgtgaccctgccacctcagcctcacaccaaggagggcgttgatgcctacaacgaagtgatcgcccgggtgcgaatgtgggtgaacctgaacctgtggcagaagctgaagctaagcagagatgatgccaagcctctgctgagactgaagggattcccttcctttcctctggtcgagagacaggccaacgaagtggactggtgggacatggtgtgtaacgtgaagaagctgatcaacgagaaaaaggaggatggcaaggtgttttggcagaatctggctggctacaagagacaggaagccctgagaccatacctgagcagcgaggaagatcggaagaagggaaagaaattcgctcggtaccagctgggcgacctgctgctgcacctggaaaagaagcacggcgaggactggggaaaggtgtacgacgaggcctgggagcggattgacaagaaagtggaaggcctgagcaagcacatcaagctggaagaggaacggagaagcgaggacgcccagagcaaggccgccctgaccgactggctgcgggctaaggccagcttcgtgatcgagggcctgaaggaggccgacaaggacgagttctgcagatgcgagctgaagctgcagaagtggtacggggacctgcggggaaagcccttcgccatcgaagccgagaacagcatcctggacatcagcggcttcagcaagcagtacaactgtgccttcatctggcagaaggacggcgtgaagaagctgaacctgtacctgatcatcaactacttcaagggcggcaagctgcggttcaagaagatcaaacctgaagccttcgaagccaacagattctacaccgtgatcaacaaaaagagcggcgagatcgtgcccatggaggtgaacttcaacttcgacgaccccaacctgatcatcctgcctctggcctttggcaagagacagggcagagaattcatctggaacgacctgctgtccctggaaaccggcagcctgaagctggccaacggaagagtgatcgagaagacactgtacaacagaagaacccggcaggatgagcctgccctgttcgtggccctgaccttcgagcggcgggaggtcctggactcctccaatatcaaaccaatgaacctgatcggcgtggcaagaggcgaaaacatccccgccgtgatcgccctgaccgaccccgagggctgcccactgagccggtttaaggatagcctgggaaacccaacccacatcctgagaatcggcgagagctataaggagaagcagcggaccatccaggccaagaaggaggtggagcagcggagagccggcggctacagccggaagtacgccagcaaagccaagaatctggcagacgatatggtgagaaacaccgctagagatctgctgtactacgccgtgacccaggatgccatgctgatcttcgccaacctgagccggggcttcggccggcagggcaagcggaccttcatggccgagagacagtacacacggatggaggactggctgaccgccaagctggcctacgagggcctgagcaagacctacctgtccaagacactggcccagtacacctccaagacatgcagcaactgtgggtttaccatcaccagcgccgactacgacagggtgctggagaagctgaagaagacagcaacaggctggatgaccacaattaacggcaaggagctgaaggtggagggccagattacctactacaacagatacaagagacagaacgtagtcaaggacctgtccgtcgagctggatagactgagcgaagaatctgtgaacaacgacatctcctcctggacaaagggcagaagcggagaagctctgagcctcctgaagaaaagattctcccatagacccgtgcaggagaagttcgtgtgcctgaactgcggcttcgagacacacgcagccgagcaagccgccctgaacatcgccagatcctggctgttcctgcggagccaggagtacaagaaataccagacaaacaagacaaccggcaacaccgataagagagccttcgtcgagacctggcagtccttttaccggaagaagcttaaggaggtgtggaaacctgccgtgcggtctggcggatctggcggaggctccacaagcatggacagcgtggccttcgaggacgtggccgtgaacttcacccacgaggagtgggccctgctgagccccagccagaagaacctgtacagggacgtgatgagggagaccatcaggaacctgaactgcatcggcatgaagtgggagaaccagaacatcgacgaccagtaccagaacctgaggaggaaccccaggtgcgacgtggtggagaggttcggcaagagcaaggacggcagccagtgcggcaccagccccaagaaaaagagaaaagtctaagctgccttctgcggggcttgccttctggccatgcccttcttctctcccttgcacctgtacctcttggtctttgaataaagcctgagtaggaaggctagcaaaaaaaaaaaaaaaaaaaaaaaaaaaaaaaaaaaaaaaaaaaaaaaaaaaaaaaaaaaaaaaaaaaaaaaaaaaaaaaa

SEQ ID NO: 3346 - RNA, 5419 nt, synthetic construct
  source 1..5419: mol_type = other RNA
aggaaataagagagaaaagaagagtaagaagaaatataagagccaccatggcccctaagaagaagcgtaaagtgagccgggtgaacggcagcggcagcggcggcggcatgaaccacgaccaggagttcgacccccctaaggtgtaccctcccgtccccgccgagaagagaaagcccatccgggtcctgagcctgttcgatggcatcgccaccggtctgctggtgctgaaggacctgggcatccaggtggataggtacattgcctccgaggtgtgcgaggactccatcaccgtgggaatggtgcgtcatcagggcaagatcatgtacgtgggcgacgtgcggagcgtgacacagaagcatatccaggagtggggccctttcgacctggtgatcggcggcagcccttgcaatgacctgagcatcgtgaacccagcccggaagggcctgtacgagggaaccggcagactgttcttcgagttttacagactgctgcacgacgcccggcctaaggaaggcgacgaccggcccttcttttggctgttcgagaatgtggtggccatgggagtcagcgacaagcgggatattagccggttcctggagagcaaccccgtgatgatcgatgccaaggaagtgagcgccgcccaccgggccagatacttctggggcaatctgcctggcatgaacagacccctggccagcaccgtgaacgacaagctggagctgcaggagtgcctggagcacggccggatcgccaagttcagcaaggtgagaaccatcaccacccgaagcaacagcatcaaacaaggcaaggaccagcactttcctgtgttcatgaacgagaaggaggacatcctgtggtgtaccgagatggagagagtgttcgggttcccagtccactacacagatgtcagcaacatgtctagactggccagacagagactgctgggaagaagctggtccgtccctgtgatcagacacctgttcgcccctctgaaggagtacttcgcctgcgtgagcagcggcaacagcaacgccaacagccggggccccagcttctctagcggcctggtgccactgtccctgagagggagccacatgggccccatggagatctacaaaaccgtgagcgcctggaagcggcagcctgtgcgcgtgctgagcctgtttcggaatatcgataaagtcctgaaaagcctgggattcctggagagcggctctggctccggcggtggcaccctgaagtacgtggaggatgtgacaaacgtggtcagacgggatgtggagaagtggggccccttcgatctggtgtacggcagcacccaacccctgggcagctcttgtgaccggtgccctggctggtacatgtttcagttccaccggatcctgcagtacgccctgccgagacaggagtcccagcggccattcttttggattttcatggacaacttgctgctgaccgaggatgaccaggaaactaccactcggttcctgcagaccgaagccgtgaccctgcaggacgtgagaggccgggactaccagaacgccatgcgggtgtggtccaacatccctggactgaaaagcaagcacgcacctctgacccctaaagaagaggagtacctgcaggcccaggtgcggagcagaagcaagctggacgcccctaaggtggatctgctggtgaagaattgcctcctgcccctgagagagtacttcaagtatttcagccagaatagtctgcccctgggcggcccaagcagcggcgcccctcctcccagcggcggcagcccagccggctccccaacctctaccgaggagggcacctctgagtccgccacccccgagagcggccctggcacctccaccgagcccagcgagggcagcgcacccggcagccctgccggcagccccacctccacagaggagggaaccagcaccgagcccagcgaaggcagcgccccaggcaccagcaccgagcctagtgagggcggctctggcggcggcagcgcccaggagattaaacggatcaacaagatcagaagaagacttgtgaaagacagcaacaccaagaaggccggcaagacaggccccatgaaaaccctgctggttagagtgatgacacccgatctgagagagcggctggaaaacctgagaaagaagcctgaaaatatcccccagcccatcagcaatacatctagagccaacctgaataagctgctgaccgattacaccgaaatgaagaaggcgatcctgcatgtgtactgggaagagttccagaaggaccctgtgggcctgatgagccgggtggcccagcctgccagcaagaagatcgatcagaacaagctgaaacctgagatggacgagaagggcaacctgaccaccgccggctttgcctgctctcagtgtggccagcccctgttcgtgtacaagctggagcaggtgtctgagaagggcaaggcttacaccaactacttcggacggtgcaatgtggccgagcacgaaaagctgatcctgctggcccagctgaagcccgagaaggatagcgacgaagccgtgacatatagcctgggaaagtttgggcagagggccctggatttctacagcattcatgtgaccaaggagtccacccaccccgtgaagcccctggcccagatcgccggaaacagatacgcctccggacctgtgggaaaggccctgagcgacgcatgtatgggcacaatcgcctccttcctgtctaagtaccaggacatcatcatcgaacaccagaaggtggtgaagggcaaccagaagagactggagagcctgcgggagctggccggcaaggaaaacctggaataccctagcgtgaccctgccacctcagcctcacaccaaggagggcgttgatgcctacaacgaagtgatcgcccgggtgcgaatgtgggtgaacctgaacctgtggcagaagctgaagctaagcagagatgatgccaagcctctgctgagactgaagggattcccttcctttcctctggtcgagagacaggccaacgaagtggactggtgggacatggtgtgtaacgtgaagaagctgatcaacgagaaaaaggaggatggcaaggtgttttggcagaatctggctggctacaagagacaggaagccctgagaccatacctgagcagcgaggaagatcggaagaagggaaagaaattcgctcggtaccagctgggcgacctgctgctgcacctggaaaagaagcacggcgaggactggggaaaggtgtacgacgaggcctgggagcggattgacaagaaagtggaaggcctgagcaagcacatcaagctggaagaggaacggagaagcgaggacgcccagagcaaggccgccctgaccgactggctgcgggctaaggccagcttcgtgatcgagggcctgaaggaggccgacaaggacgagttctgcagatgcgagctgaagctgcagaagtggtacggggacctgcggggaaagcccttcgccatcgaagccgagaacagcatcctggacatcagcggcttcagcaagcagtacaactgtgccttcatctggcagaaggacggcgtgaagaagctgaacctgtacctgatcatcaactacttcaagggcggcaagctgcggttcaagaagatcaaacctgaagccttcgaagccaacagattctacaccgtgatcaacaaaaagagcggcgagatcgtgcccatggaggtgaacttcaacttcgacgaccccaacctgatcatcctgcctctggcctttggcaagagacagggcagagaattcatctggaacgacctgctgtccctggaaaccggcagcctgaagctggccaacggaagagtgatcgagaagacactgtacaacagaagaacccggcaggatgagcctgccctgttcgtggccctgaccttcgagcggcgggaggtcctggactcctccaatatcaaaccaatgaacctgatcggcgtggcaagaggcgaaaacatccccgccgtgatcgccctgaccgaccccgagggctgcccactgagccggtttaaggatagcctgggaaacccaacccacatcctgagaatcggcgagagctataaggagaagcagcggaccatccaggccaagaaggaggtggagcagcggagagccggcggctacagccggaagtacgccagcaaagccaagaatctggcagacgatatggtgagaaacaccgctagagatctgctgtactacgccgtgacccaggatgccatgctgatcttcgccaacctgagccggggcttcggccggcagggcaagcggaccttcatggccgagagacagtacacacggatggaggactggctgaccgccaagctggcctacgagggcctgagcaagacctacctgtccaagacactggcccagtacacctccaagacatgcagcaactgtgggtttaccatcaccagcgccgactacgacagggtgctggagaagctgaagaagacagcaacaggctggatgaccacaattaacggcaaggagctgaaggtggagggccagattacctactacaacagatacaagagacagaacgtagtcaaggacctgtccgtcgagctggatagactgagcgaagaatctgtgaacaacgacatctcctcctggacaaagggcagaagcggagaagctctgagcctcctgaagaaaagattctcccatagacccgtgcaggagaagttcgtgtgcctgaactgcggcttcgagacacacgcagccgagcaagccgccctgaacatcgccagatcctggctgttcctgcggagccaggagtacaagaaataccagacaaacaagacaaccggcaacaccgataagagagccttcgtcgagacctggcagtccttttaccggaagaagcttaaggaggtgtggaaacctgccgtgcggtctggcggatctggcggaggctccacaagcttccagggcagcgtgaccttcgaggacgtggccatcgccttcagccagcaggagtgggagagcctggacagcagccagaggggcctgtacagggacgtgatgctggagaactacaggaacctggtgagcatgggccacagcctgagcaagccccacgtgatcgccctgctggagaggtggaaggagcccaaggtgaccgacaggaaggacggcaggaggtggtgcaccgacctgcagctggagaccagccccaagaaaaagagaaaagtctaagctgccttctgcggggcttgccttctggccatgcccttcttctctcccttgcacctgtacctcttggtctttgaataaagcctgagtaggaaggctagcaaaaaaaaaaaaaaaaaaaaaaaaaaaaaaaaaaaaaaaaaaaaaaaaaaaaaaaaaaaaaaaaaaaaaaaaaaaaaaaa

SEQ ID NO: 3347 - RNA, 5419 nt, synthetic construct
  source 1..5419: mol_type = other RNA
aggaaataagagagaaaagaagagtaagaagaaatataagagccaccatggcccctaagaagaagcgtaaagtgagccgggtgaacggcagcggcagcggcggcggcatgaaccacgaccaggagttcgacccccctaaggtgtaccctcccgtccccgccgagaagagaaagcccatccgggtcctgagcctgttcgatggcatcgccaccggtctgctggtgctgaaggacctgggcatccaggtggataggtacattgcctccgaggtgtgcgaggactccatcaccgtgggaatggtgcgtcatcagggcaagatcatgtacgtgggcgacgtgcggagcgtgacacagaagcatatccaggagtggggccctttcgacctggtgatcggcggcagcccttgcaatgacctgagcatcgtgaacccagcccggaagggcctgtacgagggaaccggcagactgttcttcgagttttacagactgctgcacgacgcccggcctaaggaaggcgacgaccggcccttcttttggctgttcgagaatgtggtggccatgggagtcagcgacaagcgggatattagccggttcctggagagcaaccccgtgatgatcgatgccaaggaagtgagcgccgcccaccgggccagatacttctggggcaatctgcctggcatgaacagacccctggccagcaccgtgaacgacaagctggagctgcaggagtgcctggagcacggccggatcgccaagttcagcaaggtgagaaccatcaccacccgaagcaacagcatcaaacaaggcaaggaccagcactttcctgtgttcatgaacgagaaggaggacatcctgtggtgtaccgagatggagagagtgttcgggttcccagtccactacacagatgtcagcaacatgtctagactggccagacagagactgctgggaagaagctggtccgtccctgtgatcagacacctgttcgcccctctgaaggagtacttcgcctgcgtgagcagcggcaacagcaacgccaacagccggggccccagcttctctagcggcctggtgccactgtccctgagagggagccacatgggccccatggagatctacaaaaccgtgagcgcctggaagcggcagcctgtgcgcgtgctgagcctgtttcggaatatcgataaagtcctgaaaagcctgggattcctggagagcggctctggctccggcggtggcaccctgaagtacgtggaggatgtgacaaacgtggtcagacgggatgtggagaagtggggccccttcgatctggtgtacggcagcacccaacccctgggcagctcttgtgaccggtgccctggctggtacatgtttcagttccaccggatcctgcagtacgccctgccgagacaggagtcccagcggccattcttttggattttcatggacaacttgctgctgaccgaggatgaccaggaaactaccactcggttcctgcagaccgaagccgtgaccctgcaggacgtgagaggccgggactaccagaacgccatgcgggtgtggtccaacatccctggactgaaaagcaagcacgcacctctgacccctaaagaagaggagtacctgcaggcccaggtgcggagcagaagcaagctggacgcccctaaggtggatctgctggtgaagaattgcctcctgcccctgagagagtacttcaagtatttcagccagaatagtctgcccctgggcggcccaagcagcggcgcccctcctcccagcggcggcagcccagccggctccccaacctctaccgaggagggcacctctgagtccgccacccccgagagcggccctggcacctccaccgagcccagcgagggcagcgcacccggcagccctgccggcagccccacctccacagaggagggaaccagcaccgagcccagcgaaggcagcgccccaggcaccagcaccgagcctagtgagggcggctctggcggcggcagcgcccaggagattaaacggatcaacaagatcagaagaagacttgtgaaagacagcaacaccaagaaggccggcaagacaggccccatgaaaaccctgctggttagagtgatgacacccgatctgagagagcggctggaaaacctgagaaagaagcctgaaaatatcccccagcccatcagcaatacatctagagccaacctgaataagctgctgaccgattacaccgaaatgaagaaggcgatcctgcatgtgtactgggaagagttccagaaggaccctgtgggcctgatgagccgggtggcccagcctgccagcaagaagatcgatcagaacaagctgaaacctgagatggacgagaagggcaacctgaccaccgccggctttgcctgctctcagtgtggccagcccctgttcgtgtacaagctggagcaggtgtctgagaagggcaaggcttacaccaactacttcggacggtgcaatgtggccgagcacgaaaagctgatcctgctggcccagctgaagcccgagaaggatagcgacgaagccgtgacatatagcctgggaaagtttgggcagagggccctggatttctacagcattcatgtgaccaaggagtccacccaccccgtgaagcccctggcccagatcgccggaaacagatacgcctccggacctgtgggaaaggccctgagcgacgcatgtatgggcacaatcgcctccttcctgtctaagtaccaggacatcatcatcgaacaccagaaggtggtgaagggcaaccagaagagactggagagcctgcgggagctggccggcaaggaaaacctggaataccctagcgtgaccctgccacctcagcctcacaccaaggagggcgttgatgcctacaacgaagtgatcgcccgggtgcgaatgtgggtgaacctgaacctgtggcagaagctgaagctaagcagagatgatgccaagcctctgctgagactgaagggattcccttcctttcctctggtcgagagacaggccaacgaagtggactggtgggacatggtgtgtaacgtgaagaagctgatcaacgagaaaaaggaggatggcaaggtgttttggcagaatctggctggctacaagagacaggaagccctgagaccatacctgagcagcgaggaagatcggaagaagggaaagaaattcgctcggtaccagctgggcgacctgctgctgcacctggaaaagaagcacggcgaggactggggaaaggtgtacgacgaggcctgggagcggattgacaagaaagtggaaggcctgagcaagcacatcaagctggaagaggaacggagaagcgaggacgcccagagcaaggccgccctgaccgactggctgcgggctaaggccagcttcgtgatcgagggcctgaaggaggccgacaaggacgagttctgcagatgcgagctgaagctgcagaagtggtacggggacctgcggggaaagcccttcgccatcgaagccgagaacagcatcctggacatcagcggcttcagcaagcagtacaactgtgccttcatctggcagaaggacggcgtgaagaagctgaacctgtacctgatcatcaactacttcaagggcggcaagctgcggttcaagaagatcaaacctgaagccttcgaagccaacagattctacaccgtgatcaacaaaaagagcggcgagatcgtgcccatggaggtgaacttcaacttcgacgaccccaacctgatcatcctgcctctggcctttggcaagagacagggcagagaattcatctggaacgacctgctgtccctggaaaccggcagcctgaagctggccaacggaagagtgatcgagaagacactgtacaacagaagaacccggcaggatgagcctgccctgttcgtggccctgaccttcgagcggcgggaggtcctggactcctccaatatcaaaccaatgaacctgatcggcgtggcaagaggcgaaaacatccccgccgtgatcgccctgaccgaccccgagggctgcccactgagccggtttaaggatagcctgggaaacccaacccacatcctgagaatcggcgagagctataaggagaagcagcggaccatccaggccaagaaggaggtggagcagcggagagccggcggctacagccggaagtacgccagcaaagccaagaatctggcagacgatatggtgagaaacaccgctagagatctgctgtactacgccgtgacccaggatgccatgctgatcttcgccaacctgagccggggcttcggccggcagggcaagcggaccttcatggccgagagacagtacacacggatggaggactggctgaccgccaagctggcctacgagggcctgagcaagacctacctgtccaagacactggcccagtacacctccaagacatgcagcaactgtgggtttaccatcaccagcgccgactacgacagggtgctggagaagctgaagaagacagcaacaggctggatgaccacaattaacggcaaggagctgaaggtggagggccagattacctactacaacagatacaagagacagaacgtagtcaaggacctgtccgtcgagctggatagactgagcgaagaatctgtgaacaacgacatctcctcctggacaaagggcagaagcggagaagctctgagcctcctgaagaaaagattctcccatagacccgtgcaggagaagttcgtgtgcctgaactgcggcttcgagacacacgcagccgagcaagccgccctgaacatcgccagatcctggctgttcctgcggagccaggagtacaagaaataccagacaaacaagacaaccggcaacaccgataagagagccttcgtcgagacctggcagtccttttaccggaagaagcttaaggaggtgtggaaacctgccgtgcggtctggcggatctggcggaggctccacaagcatgaacgtggaggtgctgaaggtgatcagccaggacctggtgaccttcaaggacgtggccatcgacttcagccaggaggagtggcagtggatgaaccccgcccagaagaggctgtacaggagcatgatgctggagaactaccagagcctggtgagcctgggcctgtgcgtgagcaagccctacgtgatcagcctgctggagcagggcagggagccctgggagatgaccagcgagatgaccaggaccagccccaagaaaaagagaaaagtctaagctgccttctgcggggcttgccttctggccatgcccttcttctctcccttgcacctgtacctcttggtctttgaataaagcctgagtaggaaggctagcaaaaaaaaaaaaaaaaaaaaaaaaaaaaaaaaaaaaaaaaaaaaaaaaaaaaaaaaaaaaaaaaaaaaaaaaaaaaaaaa

SEQ ID NO: 3348 - RNA, 5419 nt, synthetic construct
  source 1..5419: mol_type = other RNA
aggaaataagagagaaaagaagagtaagaagaaatataagagccaccatggcccctaagaagaagcgtaaagtgagccgggtgaacggcagcggcagcggcggcggcatgaaccacgaccaggagttcgacccccctaaggtgtaccctcccgtccccgccgagaagagaaagcccatccgggtcctgagcctgttcgatggcatcgccaccggtctgctggtgctgaaggacctgggcatccaggtggataggtacattgcctccgaggtgtgcgaggactccatcaccgtgggaatggtgcgtcatcagggcaagatcatgtacgtgggcgacgtgcggagcgtgacacagaagcatatccaggagtggggccctttcgacctggtgatcggcggcagcccttgcaatgacctgagcatcgtgaacccagcccggaagggcctgtacgagggaaccggcagactgttcttcgagttttacagactgctgcacgacgcccggcctaaggaaggcgacgaccggcccttcttttggctgttcgagaatgtggtggccatgggagtcagcgacaagcgggatattagccggttcctggagagcaaccccgtgatgatcgatgccaaggaagtgagcgccgcccaccgggccagatacttctggggcaatctgcctggcatgaacagacccctggccagcaccgtgaacgacaagctggagctgcaggagtgcctggagcacggccggatcgccaagttcagcaaggtgagaaccatcaccacccgaagcaacagcatcaaacaaggcaaggaccagcactttcctgtgttcatgaacgagaaggaggacatcctgtggtgtaccgagatggagagagtgttcgggttcccagtccactacacagatgtcagcaacatgtctagactggccagacagagactgctgggaagaagctggtccgtccctgtgatcagacacctgttcgcccctctgaaggagtacttcgcctgcgtgagcagcggcaacagcaacgccaacagccggggccccagcttctctagcggcctggtgccactgtccctgagagggagccacatgggccccatggagatctacaaaaccgtgagcgcctggaagcggcagcctgtgcgcgtgctgagcctgtttcggaatatcgataaagtcctgaaaagcctgggattcctggagagcggctctggctccggcggtggcaccctgaagtacgtggaggatgtgacaaacgtggtcagacgggatgtggagaagtggggccccttcgatctggtgtacggcagcacccaacccctgggcagctcttgtgaccggtgccctggctggtacatgtttcagttccaccggatcctgcagtacgccctgccgagacaggagtcccagcggccattcttttggattttcatggacaacttgctgctgaccgaggatgaccaggaaactaccactcggttcctgcagaccgaagccgtgaccctgcaggacgtgagaggccgggactaccagaacgccatgcgggtgtggtccaacatccctggactgaaaagcaagcacgcacctctgacccctaaagaagaggagtacctgcaggcccaggtgcggagcagaagcaagctggacgcccctaaggtggatctgctggtgaagaattgcctcctgcccctgagagagtacttcaagtatttcagccagaatagtctgcccctgggcggcccaagcagcggcgcccctcctcccagcggcggcagcccagccggctccccaacctctaccgaggagggcacctctgagtccgccacccccgagagcggccctggcacctccaccgagcccagcgagggcagcgcacccggcagccctgccggcagccccacctccacagaggagggaaccagcaccgagcccagcgaaggcagcgccccaggcaccagcaccgagcctagtgagggcggctctggcggcggcagcgcccaggagattaaacggatcaacaagatcagaagaagacttgtgaaagacagcaacaccaagaaggccggcaagacaggccccatgaaaaccctgctggttagagtgatgacacccgatctgagagagcggctggaaaacctgagaaagaagcctgaaaatatcccccagcccatcagcaatacatctagagccaacctgaataagctgctgaccgattacaccgaaatgaagaaggcgatcctgcatgtgtactgggaagagttccagaaggaccctgtgggcctgatgagccgggtggcccagcctgccagcaagaagatcgatcagaacaagctgaaacctgagatggacgagaagggcaacctgaccaccgccggctttgcctgctctcagtgtggccagcccctgttcgtgtacaagctggagcaggtgtctgagaagggcaaggcttacaccaactacttcggacggtgcaatgtggccgagcacgaaaagctgatcctgctggcccagctgaagcccgagaaggatagcgacgaagccgtgacatatagcctgggaaagtttgggcagagggccctggatttctacagcattcatgtgaccaaggagtccacccaccccgtgaagcccctggcccagatcgccggaaacagatacgcctccggacctgtgggaaaggccctgagcgacgcatgtatgggcacaatcgcctccttcctgtctaagtaccaggacatcatcatcgaacaccagaaggtggtgaagggcaaccagaagagactggagagcctgcgggagctggccggcaaggaaaacctggaataccctagcgtgaccctgccacctcagcctcacaccaaggagggcgttgatgcctacaacgaagtgatcgcccgggtgcgaatgtgggtgaacctgaacctgtggcagaagctgaagctaagcagagatgatgccaagcctctgctgagactgaagggattcccttcctttcctctggtcgagagacaggccaacgaagtggactggtgggacatggtgtgtaacgtgaagaagctgatcaacgagaaaaaggaggatggcaaggtgttttggcagaatctggctggctacaagagacaggaagccctgagaccatacctgagcagcgaggaagatcggaagaagggaaagaaattcgctcggtaccagctgggcgacctgctgctgcacctggaaaagaagcacggcgaggactggggaaaggtgtacgacgaggcctgggagcggattgacaagaaagtggaaggcctgagcaagcacatcaagctggaagaggaacggagaagcgaggacgcccagagcaaggccgccctgaccgactggctgcgggctaaggccagcttcgtgatcgagggcctgaaggaggccgacaaggacgagttctgcagatgcgagctgaagctgcagaagtggtacggggacctgcggggaaagcccttcgccatcgaagccgagaacagcatcctggacatcagcggcttcagcaagcagtacaactgtgccttcatctggcagaaggacggcgtgaagaagctgaacctgtacctgatcatcaactacttcaagggcggcaagctgcggttcaagaagatcaaacctgaagccttcgaagccaacagattctacaccgtgatcaacaaaaagagcggcgagatcgtgcccatggaggtgaacttcaacttcgacgaccccaacctgatcatcctgcctctggcctttggcaagagacagggcagagaattcatctggaacgacctgctgtccctggaaaccggcagcctgaagctggccaacggaagagtgatcgagaagacactgtacaacagaagaacccggcaggatgagcctgccctgttcgtggccctgaccttcgagcggcgggaggtcctggactcctccaatatcaaaccaatgaacctgatcggcgtggcaagaggcgaaaacatccccgccgtgatcgccctgaccgaccccgagggctgcccactgagccggtttaaggatagcctgggaaacccaacccacatcctgagaatcggcgagagctataaggagaagcagcggaccatccaggccaagaaggaggtggagcagcggagagccggcggctacagccggaagtacgccagcaaagccaagaatctggcagacgatatggtgagaaacaccgctagagatctgctgtactacgccgtgacccaggatgccatgctgatcttcgccaacctgagccggggcttcggccggcagggcaagcggaccttcatggccgagagacagtacacacggatggaggactggctgaccgccaagctggcctacgagggcctgagcaagacctacctgtccaagacactggcccagtacacctccaagacatgcagcaactgtgggtttaccatcaccagcgccgactacgacagggtgctggagaagctgaagaagacagcaacaggctggatgaccacaattaacggcaaggagctgaaggtggagggccagattacctactacaacagatacaagagacagaacgtagtcaaggacctgtccgtcgagctggatagactgagcgaagaatctgtgaacaacgacatctcctcctggacaaagggcagaagcggagaagctctgagcctcctgaagaaaagattctcccatagacccgtgcaggagaagttcgtgtgcctgaactgcggcttcgagacacacgcagccgagcaagccgccctgaacatcgccagatcctggctgttcctgcggagccaggagtacaagaaataccagacaaacaagacaaccggcaacaccgataagagagccttcgtcgagacctggcagtccttttaccggaagaagcttaaggaggtgtggaaacctgccgtgcggtctggcggatctggcggaggctccacaagcgcccaggagagcctgaccctggaggacgtggccgtggacttcagcagggaggagtggaggctgctggcccccgcccagaaggacctgtacagggacgtgatgctggagaacttcaggaacctggtgagcgtgggccaccaggccagcaagcccgacgtgctggccaagctggagaggggcgaggagccctgggccatcgaggaggaggtgaggagcggcaccagccccgagaccggcaaggtgaccagccccaagaaaaagagaaaagtctaagctgccttctgcggggcttgccttctggccatgcccttcttctctcccttgcacctgtacctcttggtctttgaataaagcctgagtaggaaggctagcaaaaaaaaaaaaaaaaaaaaaaaaaaaaaaaaaaaaaaaaaaaaaaaaaaaaaaaaaaaaaaaaaaaaaaaaaaaaaaaa

SEQ ID NO: 3349 - RNA, 5425 nt, synthetic construct
  source 1..5425: mol_type = other RNA
aggaaataagagagaaaagaagagtaagaagaaatataagagccaccatggcccctaagaagaagcgtaaagtgagccgggtgaacggcagcggcagcggcggcggcatgaaccacgaccaggagttcgacccccctaaggtgtaccctcccgtccccgccgagaagagaaagcccatccgggtcctgagcctgttcgatggcatcgccaccggtctgctggtgctgaaggacctgggcatccaggtggataggtacattgcctccgaggtgtgcgaggactccatcaccgtgggaatggtgcgtcatcagggcaagatcatgtacgtgggcgacgtgcggagcgtgacacagaagcatatccaggagtggggccctttcgacctggtgatcggcggcagcccttgcaatgacctgagcatcgtgaacccagcccggaagggcctgtacgagggaaccggcagactgttcttcgagttttacagactgctgcacgacgcccggcctaaggaaggcgacgaccggcccttcttttggctgttcgagaatgtggtggccatgggagtcagcgacaagcgggatattagccggttcctggagagcaaccccgtgatgatcgatgccaaggaagtgagcgccgcccaccgggccagatacttctggggcaatctgcctggcatgaacagacccctggccagcaccgtgaacgacaagctggagctgcaggagtgcctggagcacggccggatcgccaagttcagcaaggtgagaaccatcaccacccgaagcaacagcatcaaacaaggcaaggaccagcactttcctgtgttcatgaacgagaaggaggacatcctgtggtgtaccgagatggagagagtgttcgggttcccagtccactacacagatgtcagcaacatgtctagactggccagacagagactgctgggaagaagctggtccgtccctgtgatcagacacctgttcgcccctctgaaggagtacttcgcctgcgtgagcagcggcaacagcaacgccaacagccggggccccagcttctctagcggcctggtgccactgtccctgagagggagccacatgggccccatggagatctacaaaaccgtgagcgcctggaagcggcagcctgtgcgcgtgctgagcctgtttcggaatatcgataaagtcctgaaaagcctgggattcctggagagcggctctggctccggcggtggcaccctgaagtacgtggaggatgtgacaaacgtggtcagacgggatgtggagaagtggggccccttcgatctggtgtacggcagcacccaacccctgggcagctcttgtgaccggtgccctggctggtacatgtttcagttccaccggatcctgcagtacgccctgccgagacaggagtcccagcggccattcttttggattttcatggacaacttgctgctgaccgaggatgaccaggaaactaccactcggttcctgcagaccgaagccgtgaccctgcaggacgtgagaggccgggactaccagaacgccatgcgggtgtggtccaacatccctggactgaaaagcaagcacgcacctctgacccctaaagaagaggagtacctgcaggcccaggtgcggagcagaagcaagctggacgcccctaaggtggatctgctggtgaagaattgcctcctgcccctgagagagtacttcaagtatttcagccagaatagtctgcccctgggcggcccaagcagcggcgcccctcctcccagcggcggcagcccagccggctccccaacctctaccgaggagggcacctctgagtccgccacccccgagagcggccctggcacctccaccgagcccagcgagggcagcgcacccggcagccctgccggcagccccacctccacagaggagggaaccagcaccgagcccagcgaaggcagcgccccaggcaccagcaccgagcctagtgagggcggctctggcggcggcagcgcccaggagattaaacggatcaacaagatcagaagaagacttgtgaaagacagcaacaccaagaaggccggcaagacaggccccatgaaaaccctgctggttagagtgatgacacccgatctgagagagcggctggaaaacctgagaaagaagcctgaaaatatcccccagcccatcagcaatacatctagagccaacctgaataagctgctgaccgattacaccgaaatgaagaaggcgatcctgcatgtgtactgggaagagttccagaaggaccctgtgggcctgatgagccgggtggcccagcctgccagcaagaagatcgatcagaacaagctgaaacctgagatggacgagaagggcaacctgaccaccgccggctttgcctgctctcagtgtggccagcccctgttcgtgtacaagctggagcaggtgtctgagaagggcaaggcttacaccaactacttcggacggtgcaatgtggccgagcacgaaaagctgatcctgctggcccagctgaagcccgagaaggatagcgacgaagccgtgacatatagcctgggaaagtttgggcagagggccctggatttctacagcattcatgtgaccaaggagtccacccaccccgtgaagcccctggcccagatcgccggaaacagatacgcctccggacctgtgggaaaggccctgagcgacgcatgtatgggcacaatcgcctccttcctgtctaagtaccaggacatcatcatcgaacaccagaaggtggtgaagggcaaccagaagagactggagagcctgcgggagctggccggcaaggaaaacctggaataccctagcgtgaccctgccacctcagcctcacaccaaggagggcgttgatgcctacaacgaagtgatcgcccgggtgcgaatgtgggtgaacctgaacctgtggcagaagctgaagctaagcagagatgatgccaagcctctgctgagactgaagggattcccttcctttcctctggtcgagagacaggccaacgaagtggactggtgggacatggtgtgtaacgtgaagaagctgatcaacgagaaaaaggaggatggcaaggtgttttggcagaatctggctggctacaagagacaggaagccctgagaccatacctgagcagcgaggaagatcggaagaagggaaagaaattcgctcggtaccagctgggcgacctgctgctgcacctggaaaagaagcacggcgaggactggggaaaggtgtacgacgaggcctgggagcggattgacaagaaagtggaaggcctgagcaagcacatcaagctggaagaggaacggagaagcgaggacgcccagagcaaggccgccctgaccgactggctgcgggctaaggccagcttcgtgatcgagggcctgaaggaggccgacaaggacgagttctgcagatgcgagctgaagctgcagaagtggtacggggacctgcggggaaagcccttcgccatcgaagccgagaacagcatcctggacatcagcggcttcagcaagcagtacaactgtgccttcatctggcagaaggacggcgtgaagaagctgaacctgtacctgatcatcaactacttcaagggcggcaagctgcggttcaagaagatcaaacctgaagccttcgaagccaacagattctacaccgtgatcaacaaaaagagcggcgagatcgtgcccatggaggtgaacttcaacttcgacgaccccaacctgatcatcctgcctctggcctttggcaagagacagggcagagaattcatctggaacgacctgctgtccctggaaaccggcagcctgaagctggccaacggaagagtgatcgagaagacactgtacaacagaagaacccggcaggatgagcctgccctgttcgtggccctgaccttcgagcggcgggaggtcctggactcctccaatatcaaaccaatgaacctgatcggcgtggcaagaggcgaaaacatccccgccgtgatcgccctgaccgaccccgagggctgcccactgagccggtttaaggatagcctgggaaacccaacccacatcctgagaatcggcgagagctataaggagaagcagcggaccatccaggccaagaaggaggtggagcagcggagagccggcggctacagccggaagtacgccagcaaagccaagaatctggcagacgatatggtgagaaacaccgctagagatctgctgtactacgccgtgacccaggatgccatgctgatcttcgccaacctgagccggggcttcggccggcagggcaagcggaccttcatggccgagagacagtacacacggatggaggactggctgaccgccaagctggcctacgagggcctgagcaagacctacctgtccaagacactggcccagtacacctccaagacatgcagcaactgtgggtttaccatcaccagcgccgactacgacagggtgctggagaagctgaagaagacagcaacaggctggatgaccacaattaacggcaaggagctgaaggtggagggccagattacctactacaacagatacaagagacagaacgtagtcaaggacctgtccgtcgagctggatagactgagcgaagaatctgtgaacaacgacatctcctcctggacaaagggcagaagcggagaagctctgagcctcctgaagaaaagattctcccatagacccgtgcaggagaagttcgtgtgcctgaactgcggcttcgagacacacgcagccgagcaagccgccctgaacatcgccagatcctggctgttcctgcggagccaggagtacaagaaataccagacaaacaagacaaccggcaacaccgataagagagccttcgtcgagacctggcagtccttttaccggaagaagcttaaggaggtgtggaaacctgccgtgcggtctggcggatctggcggaggctccacaagcgtgaccttcaaggacgtggccgtgatcttcaccgaggaggagctgggcctgctggaccccgcccagaggaagctgtacagggacgtgatgctggagaacttcaggaacctgctgagcgtgggccaccagcccttccacggcgacaccttccacttcctgagggaggagaagttctgggtgatgggcaccaccagccagagggagggcaacctgggcggcaagatccagaccgagatggagaccgtgcccaccagccccaagaaaaagagaaaagtctaagctgccttctgcggggcttgccttctggccatgcccttcttctctcccttgcacctgtacctcttggtctttgaataaagcctgagtaggaaggctagcaaaaaaaaaaaaaaaaaaaaaaaaaaaaaaaaaaaaaaaaaaaaaaaaaaaaaaaaaaaaaaaaaaaaaaaaaaaaaaaa

SEQ ID NO: 3350 - RNA, 5419 nt, synthetic construct
  source 1..5419: mol_type = other RNA
aggaaataagagagaaaagaagagtaagaagaaatataagagccaccatggcccctaagaagaagcgtaaagtgagccgggtgaacggcagcggcagcggcggcggcatgaaccacgaccaggagttcgacccccctaaggtgtaccctcccgtccccgccgagaagagaaagcccatccgggtcctgagcctgttcgatggcatcgccaccggtctgctggtgctgaaggacctgggcatccaggtggataggtacattgcctccgaggtgtgcgaggactccatcaccgtgggaatggtgcgtcatcagggcaagatcatgtacgtgggcgacgtgcggagcgtgacacagaagcatatccaggagtggggccctttcgacctggtgatcggcggcagcccttgcaatgacctgagcatcgtgaacccagcccggaagggcctgtacgagggaaccggcagactgttcttcgagttttacagactgctgcacgacgcccggcctaaggaaggcgacgaccggcccttcttttggctgttcgagaatgtggtggccatgggagtcagcgacaagcgggatattagccggttcctggagagcaaccccgtgatgatcgatgccaaggaagtgagcgccgcccaccgggccagatacttctggggcaatctgcctggcatgaacagacccctggccagcaccgtgaacgacaagctggagctgcaggagtgcctggagcacggccggatcgccaagttcagcaaggtgagaaccatcaccacccgaagcaacagcatcaaacaaggcaaggaccagcactttcctgtgttcatgaacgagaaggaggacatcctgtggtgtaccgagatggagagagtgttcgggttcccagtccactacacagatgtcagcaacatgtctagactggccagacagagactgctgggaagaagctggtccgtccctgtgatcagacacctgttcgcccctctgaaggagtacttcgcctgcgtgagcagcggcaacagcaacgccaacagccggggccccagcttctctagcggcctggtgccactgtccctgagagggagccacatgggccccatggagatctacaaaaccgtgagcgcctggaagcggcagcctgtgcgcgtgctgagcctgtttcggaatatcgataaagtcctgaaaagcctgggattcctggagagcggctctggctccggcggtggcaccctgaagtacgtggaggatgtgacaaacgtggtcagacgggatgtggagaagtggggccccttcgatctggtgtacggcagcacccaacccctgggcagctcttgtgaccggtgccctggctggtacatgtttcagttccaccggatcctgcagtacgccctgccgagacaggagtcccagcggccattcttttggattttcatggacaacttgctgctgaccgaggatgaccaggaaactaccactcggttcctgcagaccgaagccgtgaccctgcaggacgtgagaggccgggactaccagaacgccatgcgggtgtggtccaacatccctggactgaaaagcaagcacgcacctctgacccctaaagaagaggagtacctgcaggcccaggtgcggagcagaagcaagctggacgcccctaaggtggatctgctggtgaagaattgcctcctgcccctgagagagtacttcaagtatttcagccagaatagtctgcccctgggcggcccaagcagcggcgcccctcctcccagcggcggcagcccagccggctccccaacctctaccgaggagggcacctctgagtccgccacccccgagagcggccctggcacctccaccgagcccagcgagggcagcgcacccggcagccctgccggcagccccacctccacagaggagggaaccagcaccgagcccagcgaaggcagcgccccaggcaccagcaccgagcctagtgagggcggctctggcggcggcagcgcccaggagattaaacggatcaacaagatcagaagaagacttgtgaaagacagcaacaccaagaaggccggcaagacaggccccatgaaaaccctgctggttagagtgatgacacccgatctgagagagcggctggaaaacctgagaaagaagcctgaaaatatcccccagcccatcagcaatacatctagagccaacctgaataagctgctgaccgattacaccgaaatgaagaaggcgatcctgcatgtgtactgggaagagttccagaaggaccctgtgggcctgatgagccgggtggcccagcctgccagcaagaagatcgatcagaacaagctgaaacctgagatggacgagaagggcaacctgaccaccgccggctttgcctgctctcagtgtggccagcccctgttcgtgtacaagctggagcaggtgtctgagaagggcaaggcttacaccaactacttcggacggtgcaatgtggccgagcacgaaaagctgatcctgctggcccagctgaagcccgagaaggatagcgacgaagccgtgacatatagcctgggaaagtttgggcagagggccctggatttctacagcattcatgtgaccaaggagtccacccaccccgtgaagcccctggcccagatcgccggaaacagatacgcctccggacctgtgggaaaggccctgagcgacgcatgtatgggcacaatcgcctccttcctgtctaagtaccaggacatcatcatcgaacaccagaaggtggtgaagggcaaccagaagagactggagagcctgcgggagctggccggcaaggaaaacctggaataccctagcgtgaccctgccacctcagcctcacaccaaggagggcgttgatgcctacaacgaagtgatcgcccgggtgcgaatgtgggtgaacctgaacctgtggcagaagctgaagctaagcagagatgatgccaagcctctgctgagactgaagggattcccttcctttcctctggtcgagagacaggccaacgaagtggactggtgggacatggtgtgtaacgtgaagaagctgatcaacgagaaaaaggaggatggcaaggtgttttggcagaatctggctggctacaagagacaggaagccctgagaccatacctgagcagcgaggaagatcggaagaagggaaagaaattcgctcggtaccagctgggcgacctgctgctgcacctggaaaagaagcacggcgaggactggggaaaggtgtacgacgaggcctgggagcggattgacaagaaagtggaaggcctgagcaagcacatcaagctggaagaggaacggagaagcgaggacgcccagagcaaggccgccctgaccgactggctgcgggctaaggccagcttcgtgatcgagggcctgaaggaggccgacaaggacgagttctgcagatgcgagctgaagctgcagaagtggtacggggacctgcggggaaagcccttcgccatcgaagccgagaacagcatcctggacatcagcggcttcagcaagcagtacaactgtgccttcatctggcagaaggacggcgtgaagaagctgaacctgtacctgatcatcaactacttcaagggcggcaagctgcggttcaagaagatcaaacctgaagccttcgaagccaacagattctacaccgtgatcaacaaaaagagcggcgagatcgtgcccatggaggtgaacttcaacttcgacgaccccaacctgatcatcctgcctctggcctttggcaagagacagggcagagaattcatctggaacgacctgctgtccctggaaaccggcagcctgaagctggccaacggaagagtgatcgagaagacactgtacaacagaagaacccggcaggatgagcctgccctgttcgtggccctgaccttcgagcggcgggaggtcctggactcctccaatatcaaaccaatgaacctgatcggcgtggcaagaggcgaaaacatccccgccgtgatcgccctgaccgaccccgagggctgcccactgagccggtttaaggatagcctgggaaacccaacccacatcctgagaatcggcgagagctataaggagaagcagcggaccatccaggccaagaaggaggtggagcagcggagagccggcggctacagccggaagtacgccagcaaagccaagaatctggcagacgatatggtgagaaacaccgctagagatctgctgtactacgccgtgacccaggatgccatgctgatcttcgccaacctgagccggggcttcggccggcagggcaagcggaccttcatggccgagagacagtacacacggatggaggactggctgaccgccaagctggcctacgagggcctgagcaagacctacctgtccaagacactggcccagtacacctccaagacatgcagcaactgtgggtttaccatcaccagcgccgactacgacagggtgctggagaagctgaagaagacagcaacaggctggatgaccacaattaacggcaaggagctgaaggtggagggccagattacctactacaacagatacaagagacagaacgtagtcaaggacctgtccgtcgagctggatagactgagcgaagaatctgtgaacaacgacatctcctcctggacaaagggcagaagcggagaagctctgagcctcctgaagaaaagattctcccatagacccgtgcaggagaagttcgtgtgcctgaactgcggcttcgagacacacgcagccgagcaagccgccctgaacatcgccagatcctggctgttcctgcggagccaggagtacaagaaataccagacaaacaagacaaccggcaacaccgataagagagccttcgtcgagacctggcagtccttttaccggaagaagcttaaggaggtgtggaaacctgccgtgcggtctggcggatctggcggaggctccacaagcagccagggcctggtgaccttcggcgacgtggccatcgacttcagccaggaggagtgggagtggctgagccccatccagaggaacctgtacaggaaggtgatgctggagaactacaggaacctggccagcctgggcctgtgcgtgagcaagcccgacgtgatcagcctgctggagcagggcaaggagccctggaccgtgaagaggaggatgaccagggccggctgccccgacctgaaggccgtgaccagccccaagaaaaagagaaaagtctaagctgccttctgcggggcttgccttctggccatgcccttcttctctcccttgcacctgtacctcttggtctttgaataaagcctgagtaggaaggctagcaaaaaaaaaaaaaaaaaaaaaaaaaaaaaaaaaaaaaaaaaaaaaaaaaaaaaaaaaaaaaaaaaaaaaaaaaaaaaaaa

SEQ ID NO: 3351 - RNA, 5419 nt, synthetic construct
  source 1..5419: mol_type = other RNA
aggaaataagagagaaaagaagagtaagaagaaatataagagccaccatggcccctaagaagaagcgtaaagtgagccgggtgaacggcagcggcagcggcggcggcatgaaccacgaccaggagttcgacccccctaaggtgtaccctcccgtccccgccgagaagagaaagcccatccgggtcctgagcctgttcgatggcatcgccaccggtctgctggtgctgaaggacctgggcatccaggtggataggtacattgcctccgaggtgtgcgaggactccatcaccgtgggaatggtgcgtcatcagggcaagatcatgtacgtgggcgacgtgcggagcgtgacacagaagcatatccaggagtggggccctttcgacctggtgatcggcggcagcccttgcaatgacctgagcatcgtgaacccagcccggaagggcctgtacgagggaaccggcagactgttcttcgagttttacagactgctgcacgacgcccggcctaaggaaggcgacgaccggcccttcttttggctgttcgagaatgtggtggccatgggagtcagcgacaagcgggatattagccggttcctggagagcaaccccgtgatgatcgatgccaaggaagtgagcgccgcccaccgggccagatacttctggggcaatctgcctggcatgaacagacccctggccagcaccgtgaacgacaagctggagctgcaggagtgcctggagcacggccggatcgccaagttcagcaaggtgagaaccatcaccacccgaagcaacagcatcaaacaaggcaaggaccagcactttcctgtgttcatgaacgagaaggaggacatcctgtggtgtaccgagatggagagagtgttcgggttcccagtccactacacagatgtcagcaacatgtctagactggccagacagagactgctgggaagaagctggtccgtccctgtgatcagacacctgttcgcccctctgaaggagtacttcgcctgcgtgagcagcggcaacagcaacgccaacagccggggccccagcttctctagcggcctggtgccactgtccctgagagggagccacatgggccccatggagatctacaaaaccgtgagcgcctggaagcggcagcctgtgcgcgtgctgagcctgtttcggaatatcgataaagtcctgaaaagcctgggattcctggagagcggctctggctccggcggtggcaccctgaagtacgtggaggatgtgacaaacgtggtcagacgggatgtggagaagtggggccccttcgatctggtgtacggcagcacccaacccctgggcagctcttgtgaccggtgccctggctggtacatgtttcagttccaccggatcctgcagtacgccctgccgagacaggagtcccagcggccattcttttggattttcatggacaacttgctgctgaccgaggatgaccaggaaactaccactcggttcctgcagaccgaagccgtgaccctgcaggacgtgagaggccgggactaccagaacgccatgcgggtgtggtccaacatccctggactgaaaagcaagcacgcacctctgacccctaaagaagaggagtacctgcaggcccaggtgcggagcagaagcaagctggacgcccctaaggtggatctgctggtgaagaattgcctcctgcccctgagagagtacttcaagtatttcagccagaatagtctgcccctgggcggcccaagcagcggcgcccctcctcccagcggcggcagcccagccggctccccaacctctaccgaggagggcacctctgagtccgccacccccgagagcggccctggcacctccaccgagcccagcgagggcagcgcacccggcagccctgccggcagccccacctccacagaggagggaaccagcaccgagcccagcgaaggcagcgccccaggcaccagcaccgagcctagtgagggcggctctggcggcggcagcgcccaggagattaaacggatcaacaagatcagaagaagacttgtgaaagacagcaacaccaagaaggccggcaagacaggccccatgaaaaccctgctggttagagtgatgacacccgatctgagagagcggctggaaaacctgagaaagaagcctgaaaatatcccccagcccatcagcaatacatctagagccaacctgaataagctgctgaccgattacaccgaaatgaagaaggcgatcctgcatgtgtactgggaagagttccagaaggaccctgtgggcctgatgagccgggtggcccagcctgccagcaagaagatcgatcagaacaagctgaaacctgagatggacgagaagggcaacctgaccaccgccggctttgcctgctctcagtgtggccagcccctgttcgtgtacaagctggagcaggtgtctgagaagggcaaggcttacaccaactacttcggacggtgcaatgtggccgagcacgaaaagctgatcctgctggcccagctgaagcccgagaaggatagcgacgaagccgtgacatatagcctgggaaagtttgggcagagggccctggatttctacagcattcatgtgaccaaggagtccacccaccccgtgaagcccctggcccagatcgccggaaacagatacgcctccggacctgtgggaaaggccctgagcgacgcatgtatgggcacaatcgcctccttcctgtctaagtaccaggacatcatcatcgaacaccagaaggtggtgaagggcaaccagaagagactggagagcctgcgggagctggccggcaaggaaaacctggaataccctagcgtgaccctgccacctcagcctcacaccaaggagggcgttgatgcctacaacgaagtgatcgcccgggtgcgaatgtgggtgaacctgaacctgtggcagaagctgaagctaagcagagatgatgccaagcctctgctgagactgaagggattcccttcctttcctctggtcgagagacaggccaacgaagtggactggtgggacatggtgtgtaacgtgaagaagctgatcaacgagaaaaaggaggatggcaaggtgttttggcagaatctggctggctacaagagacaggaagccctgagaccatacctgagcagcgaggaagatcggaagaagggaaagaaattcgctcggtaccagctgggcgacctgctgctgcacctggaaaagaagcacggcgaggactggggaaaggtgtacgacgaggcctgggagcggattgacaagaaagtggaaggcctgagcaagcacatcaagctggaagaggaacggagaagcgaggacgcccagagcaaggccgccctgaccgactggctgcgggctaaggccagcttcgtgatcgagggcctgaaggaggccgacaaggacgagttctgcagatgcgagctgaagctgcagaagtggtacggggacctgcggggaaagcccttcgccatcgaagccgagaacagcatcctggacatcagcggcttcagcaagcagtacaactgtgccttcatctggcagaaggacggcgtgaagaagctgaacctgtacctgatcatcaactacttcaagggcggcaagctgcggttcaagaagatcaaacctgaagccttcgaagccaacagattctacaccgtgatcaacaaaaagagcggcgagatcgtgcccatggaggtgaacttcaacttcgacgaccccaacctgatcatcctgcctctggcctttggcaagagacagggcagagaattcatctggaacgacctgctgtccctggaaaccggcagcctgaagctggccaacggaagagtgatcgagaagacactgtacaacagaagaacccggcaggatgagcctgccctgttcgtggccctgaccttcgagcggcgggaggtcctggactcctccaatatcaaaccaatgaacctgatcggcgtggcaagaggcgaaaacatccccgccgtgatcgccctgaccgaccccgagggctgcccactgagccggtttaaggatagcctgggaaacccaacccacatcctgagaatcggcgagagctataaggagaagcagcggaccatccaggccaagaaggaggtggagcagcggagagccggcggctacagccggaagtacgccagcaaagccaagaatctggcagacgatatggtgagaaacaccgctagagatctgctgtactacgccgtgacccaggatgccatgctgatcttcgccaacctgagccggggcttcggccggcagggcaagcggaccttcatggccgagagacagtacacacggatggaggactggctgaccgccaagctggcctacgagggcctgagcaagacctacctgtccaagacactggcccagtacacctccaagacatgcagcaactgtgggtttaccatcaccagcgccgactacgacagggtgctggagaagctgaagaagacagcaacaggctggatgaccacaattaacggcaaggagctgaaggtggagggccagattacctactacaacagatacaagagacagaacgtagtcaaggacctgtccgtcgagctggatagactgagcgaagaatctgtgaacaacgacatctcctcctggacaaagggcagaagcggagaagctctgagcctcctgaagaaaagattctcccatagacccgtgcaggagaagttcgtgtgcctgaactgcggcttcgagacacacgcagccgagcaagccgccctgaacatcgccagatcctggctgttcctgcggagccaggagtacaagaaataccagacaaacaagacaaccggcaacaccgataagagagccttcgtcgagacctggcagtccttttaccggaagaagcttaaggaggtgtggaaacctgccgtgcggtctggcggatctggcggaggctccacaagcgcccaggaggtggtgagcttcaaggacgtggccgtggacttcaccagggaggagtggaggctgctgagccccccccagaaggagctgtacaaggaggtgatgctggagaacgccaggaacctgctgagcgtgggcctgagcgccccccccgaggacatgttcagcagcctggagcagagggaggccccctggatgctggagaaggacgacctgaggagctgctgccccgagggcaagatgaggaccagccccaagaaaaagagaaaagtctaagctgccttctgcggggcttgccttctggccatgcccttcttctctcccttgcacctgtacctcttggtctttgaataaagcctgagtaggaaggctagcaaaaaaaaaaaaaaaaaaaaaaaaaaaaaaaaaaaaaaaaaaaaaaaaaaaaaaaaaaaaaaaaaaaaaaaaaaaaaaaa

SEQ ID NO: 3352 - RNA, 5419 nt, synthetic construct
  source 1..5419: mol_type = other RNA
aggaaataagagagaaaagaagagtaagaagaaatataagagccaccatggcccctaagaagaagcgtaaagtgagccgggtgaacggcagcggcagcggcggcggcatgaaccacgaccaggagttcgacccccctaaggtgtaccctcccgtccccgccgagaagagaaagcccatccgggtcctgagcctgttcgatggcatcgccaccggtctgctggtgctgaaggacctgggcatccaggtggataggtacattgcctccgaggtgtgcgaggactccatcaccgtgggaatggtgcgtcatcagggcaagatcatgtacgtgggcgacgtgcggagcgtgacacagaagcatatccaggagtggggccctttcgacctggtgatcggcggcagcccttgcaatgacctgagcatcgtgaacccagcccggaagggcctgtacgagggaaccggcagactgttcttcgagttttacagactgctgcacgacgcccggcctaaggaaggcgacgaccggcccttcttttggctgttcgagaatgtggtggccatgggagtcagcgacaagcgggatattagccggttcctggagagcaaccccgtgatgatcgatgccaaggaagtgagcgccgcccaccgggccagatacttctggggcaatctgcctggcatgaacagacccctggccagcaccgtgaacgacaagctggagctgcaggagtgcctggagcacggccggatcgccaagttcagcaaggtgagaaccatcaccacccgaagcaacagcatcaaacaaggcaaggaccagcactttcctgtgttcatgaacgagaaggaggacatcctgtggtgtaccgagatggagagagtgttcgggttcccagtccactacacagatgtcagcaacatgtctagactggccagacagagactgctgggaagaagctggtccgtccctgtgatcagacacctgttcgcccctctgaaggagtacttcgcctgcgtgagcagcggcaacagcaacgccaacagccggggccccagcttctctagcggcctggtgccactgtccctgagagggagccacatgggccccatggagatctacaaaaccgtgagcgcctggaagcggcagcctgtgcgcgtgctgagcctgtttcggaatatcgataaagtcctgaaaagcctgggattcctggagagcggctctggctccggcggtggcaccctgaagtacgtggaggatgtgacaaacgtggtcagacgggatgtggagaagtggggccccttcgatctggtgtacggcagcacccaacccctgggcagctcttgtgaccggtgccctggctggtacatgtttcagttccaccggatcctgcagtacgccctgccgagacaggagtcccagcggccattcttttggattttcatggacaacttgctgctgaccgaggatgaccaggaaactaccactcggttcctgcagaccgaagccgtgaccctgcaggacgtgagaggccgggactaccagaacgccatgcgggtgtggtccaacatccctggactgaaaagcaagcacgcacctctgacccctaaagaagaggagtacctgcaggcccaggtgcggagcagaagcaagctggacgcccctaaggtggatctgctggtgaagaattgcctcctgcccctgagagagtacttcaagtatttcagccagaatagtctgcccctgggcggcccaagcagcggcgcccctcctcccagcggcggcagcccagccggctccccaacctctaccgaggagggcacctctgagtccgccacccccgagagcggccctggcacctccaccgagcccagcgagggcagcgcacccggcagccctgccggcagccccacctccacagaggagggaaccagcaccgagcccagcgaaggcagcgccccaggcaccagcaccgagcctagtgagggcggctctggcggcggcagcgcccaggagattaaacggatcaacaagatcagaagaagacttgtgaaagacagcaacaccaagaaggccggcaagacaggccccatgaaaaccctgctggttagagtgatgacacccgatctgagagagcggctggaaaacctgagaaagaagcctgaaaatatcccccagcccatcagcaatacatctagagccaacctgaataagctgctgaccgattacaccgaaatgaagaaggcgatcctgcatgtgtactgggaagagttccagaaggaccctgtgggcctgatgagccgggtggcccagcctgccagcaagaagatcgatcagaacaagctgaaacctgagatggacgagaagggcaacctgaccaccgccggctttgcctgctctcagtgtggccagcccctgttcgtgtacaagctggagcaggtgtctgagaagggcaaggcttacaccaactacttcggacggtgcaatgtggccgagcacgaaaagctgatcctgctggcccagctgaagcccgagaaggatagcgacgaagccgtgacatatagcctgggaaagtttgggcagagggccctggatttctacagcattcatgtgaccaaggagtccacccaccccgtgaagcccctggcccagatcgccggaaacagatacgcctccggacctgtgggaaaggccctgagcgacgcatgtatgggcacaatcgcctccttcctgtctaagtaccaggacatcatcatcgaacaccagaaggtggtgaagggcaaccagaagagactggagagcctgcgggagctggccggcaaggaaaacctggaataccctagcgtgaccctgccacctcagcctcacaccaaggagggcgttgatgcctacaacgaagtgatcgcccgggtgcgaatgtgggtgaacctgaacctgtggcagaagctgaagctaagcagagatgatgccaagcctctgctgagactgaagggattcccttcctttcctctggtcgagagacaggccaacgaagtggactggtgggacatggtgtgtaacgtgaagaagctgatcaacgagaaaaaggaggatggcaaggtgttttggcagaatctggctggctacaagagacaggaagccctgagaccatacctgagcagcgaggaagatcggaagaagggaaagaaattcgctcggtaccagctgggcgacctgctgctgcacctggaaaagaagcacggcgaggactggggaaaggtgtacgacgaggcctgggagcggattgacaagaaagtggaaggcctgagcaagcacatcaagctggaagaggaacggagaagcgaggacgcccagagcaaggccgccctgaccgactggctgcgggctaaggccagcttcgtgatcgagggcctgaaggaggccgacaaggacgagttctgcagatgcgagctgaagctgcagaagtggtacggggacctgcggggaaagcccttcgccatcgaagccgagaacagcatcctggacatcagcggcttcagcaagcagtacaactgtgccttcatctggcagaaggacggcgtgaagaagctgaacctgtacctgatcatcaactacttcaagggcggcaagctgcggttcaagaagatcaaacctgaagccttcgaagccaacagattctacaccgtgatcaacaaaaagagcggcgagatcgtgcccatggaggtgaacttcaacttcgacgaccccaacctgatcatcctgcctctggcctttggcaagagacagggcagagaattcatctggaacgacctgctgtccctggaaaccggcagcctgaagctggccaacggaagagtgatcgagaagacactgtacaacagaagaacccggcaggatgagcctgccctgttcgtggccctgaccttcgagcggcgggaggtcctggactcctccaatatcaaaccaatgaacctgatcggcgtggcaagaggcgaaaacatccccgccgtgatcgccctgaccgaccccgagggctgcccactgagccggtttaaggatagcctgggaaacccaacccacatcctgagaatcggcgagagctataaggagaagcagcggaccatccaggccaagaaggaggtggagcagcggagagccggcggctacagccggaagtacgccagcaaagccaagaatctggcagacgatatggtgagaaacaccgctagagatctgctgtactacgccgtgacccaggatgccatgctgatcttcgccaacctgagccggggcttcggccggcagggcaagcggaccttcatggccgagagacagtacacacggatggaggactggctgaccgccaagctggcctacgagggcctgagcaagacctacctgtccaagacactggcccagtacacctccaagacatgcagcaactgtgggtttaccatcaccagcgccgactacgacagggtgctggagaagctgaagaagacagcaacaggctggatgaccacaattaacggcaaggagctgaaggtggagggccagattacctactacaacagatacaagagacagaacgtagtcaaggacctgtccgtcgagctggatagactgagcgaagaatctgtgaacaacgacatctcctcctggacaaagggcagaagcggagaagctctgagcctcctgaagaaaagattctcccatagacccgtgcaggagaagttcgtgtgcctgaactgcggcttcgagacacacgcagccgagcaagccgccctgaacatcgccagatcctggctgttcctgcggagccaggagtacaagaaataccagacaaacaagacaaccggcaacaccgataagagagccttcgtcgagacctggcagtccttttaccggaagaagcttaaggaggtgtggaaacctgccgtgcggtctggcggatctggcggaggctccacaagcagccagagcctggtgaccttcggcgacgtggccgtggacttcagccaggaggagtgggagaggctgagcagcgaccagagggacctgtacaggagggtgatgctggagaactacaggaacctggtgagcctgggcctgtgcttcagcaagcccgacatcatcagcagcctggagcagaggaaggagctgtggatggccaagagggaggtgaccaggggccagtgccccgactggaaggccgtgaccagccccaagaaaaagagaaaagtctaagctgccttctgcggggcttgccttctggccatgcccttcttctctcccttgcacctgtacctcttggtctttgaataaagcctgagtaggaaggctagcaaaaaaaaaaaaaaaaaaaaaaaaaaaaaaaaaaaaaaaaaaaaaaaaaaaaaaaaaaaaaaaaaaaaaaaaaaaaaaaa

SEQ ID NO: 3353 - RNA, 5419 nt, synthetic construct
  source 1..5419: mol_type = other RNA
aggaaataagagagaaaagaagagtaagaagaaatataagagccaccatggcccctaagaagaagcgtaaagtgagccgggtgaacggcagcggcagcggcggcggcatgaaccacgaccaggagttcgacccccctaaggtgtaccctcccgtccccgccgagaagagaaagcccatccgggtcctgagcctgttcgatggcatcgccaccggtctgctggtgctgaaggacctgggcatccaggtggataggtacattgcctccgaggtgtgcgaggactccatcaccgtgggaatggtgcgtcatcagggcaagatcatgtacgtgggcgacgtgcggagcgtgacacagaagcatatccaggagtggggccctttcgacctggtgatcggcggcagcccttgcaatgacctgagcatcgtgaacccagcccggaagggcctgtacgagggaaccggcagactgttcttcgagttttacagactgctgcacgacgcccggcctaaggaaggcgacgaccggcccttcttttggctgttcgagaatgtggtggccatgggagtcagcgacaagcgggatattagccggttcctggagagcaaccccgtgatgatcgatgccaaggaagtgagcgccgcccaccgggccagatacttctggggcaatctgcctggcatgaacagacccctggccagcaccgtgaacgacaagctggagctgcaggagtgcctggagcacggccggatcgccaagttcagcaaggtgagaaccatcaccacccgaagcaacagcatcaaacaaggcaaggaccagcactttcctgtgttcatgaacgagaaggaggacatcctgtggtgtaccgagatggagagagtgttcgggttcccagtccactacacagatgtcagcaacatgtctagactggccagacagagactgctgggaagaagctggtccgtccctgtgatcagacacctgttcgcccctctgaaggagtacttcgcctgcgtgagcagcggcaacagcaacgccaacagccggggccccagcttctctagcggcctggtgccactgtccctgagagggagccacatgggccccatggagatctacaaaaccgtgagcgcctggaagcggcagcctgtgcgcgtgctgagcctgtttcggaatatcgataaagtcctgaaaagcctgggattcctggagagcggctctggctccggcggtggcaccctgaagtacgtggaggatgtgacaaacgtggtcagacgggatgtggagaagtggggccccttcgatctggtgtacggcagcacccaacccctgggcagctcttgtgaccggtgccctggctggtacatgtttcagttccaccggatcctgcagtacgccctgccgagacaggagtcccagcggccattcttttggattttcatggacaacttgctgctgaccgaggatgaccaggaaactaccactcggttcctgcagaccgaagccgtgaccctgcaggacgtgagaggccgggactaccagaacgccatgcgggtgtggtccaacatccctggactgaaaagcaagcacgcacctctgacccctaaagaagaggagtacctgcaggcccaggtgcggagcagaagcaagctggacgcccctaaggtggatctgctggtgaagaattgcctcctgcccctgagagagtacttcaagtatttcagccagaatagtctgcccctgggcggcccaagcagcggcgcccctcctcccagcggcggcagcccagccggctccccaacctctaccgaggagggcacctctgagtccgccacccccgagagcggccctggcacctccaccgagcccagcgagggcagcgcacccggcagccctgccggcagccccacctccacagaggagggaaccagcaccgagcccagcgaaggcagcgccccaggcaccagcaccgagcctagtgagggcggctctggcggcggcagcgcccaggagattaaacggatcaacaagatcagaagaagacttgtgaaagacagcaacaccaagaaggccggcaagacaggccccatgaaaaccctgctggttagagtgatgacacccgatctgagagagcggctggaaaacctgagaaagaagcctgaaaatatcccccagcccatcagcaatacatctagagccaacctgaataagctgctgaccgattacaccgaaatgaagaaggcgatcctgcatgtgtactgggaagagttccagaaggaccctgtgggcctgatgagccgggtggcccagcctgccagcaagaagatcgatcagaacaagctgaaacctgagatggacgagaagggcaacctgaccaccgccggctttgcctgctctcagtgtggccagcccctgttcgtgtacaagctggagcaggtgtctgagaagggcaaggcttacaccaactacttcggacggtgcaatgtggccgagcacgaaaagctgatcctgctggcccagctgaagcccgagaaggatagcgacgaagccgtgacatatagcctgggaaagtttgggcagagggccctggatttctacagcattcatgtgaccaaggagtccacccaccccgtgaagcccctggcccagatcgccggaaacagatacgcctccggacctgtgggaaaggccctgagcgacgcatgtatgggcacaatcgcctccttcctgtctaagtaccaggacatcatcatcgaacaccagaaggtggtgaagggcaaccagaagagactggagagcctgcgggagctggccggcaaggaaaacctggaataccctagcgtgaccctgccacctcagcctcacaccaaggagggcgttgatgcctacaacgaagtgatcgcccgggtgcgaatgtgggtgaacctgaacctgtggcagaagctgaagctaagcagagatgatgccaagcctctgctgagactgaagggattcccttcctttcctctggtcgagagacaggccaacgaagtggactggtgggacatggtgtgtaacgtgaagaagctgatcaacgagaaaaaggaggatggcaaggtgttttggcagaatctggctggctacaagagacaggaagccctgagaccatacctgagcagcgaggaagatcggaagaagggaaagaaattcgctcggtaccagctgggcgacctgctgctgcacctggaaaagaagcacggcgaggactggggaaaggtgtacgacgaggcctgggagcggattgacaagaaagtggaaggcctgagcaagcacatcaagctggaagaggaacggagaagcgaggacgcccagagcaaggccgccctgaccgactggctgcgggctaaggccagcttcgtgatcgagggcctgaaggaggccgacaaggacgagttctgcagatgcgagctgaagctgcagaagtggtacggggacctgcggggaaagcccttcgccatcgaagccgagaacagcatcctggacatcagcggcttcagcaagcagtacaactgtgccttcatctggcagaaggacggcgtgaagaagctgaacctgtacctgatcatcaactacttcaagggcggcaagctgcggttcaagaagatcaaacctgaagccttcgaagccaacagattctacaccgtgatcaacaaaaagagcggcgagatcgtgcccatggaggtgaacttcaacttcgacgaccccaacctgatcatcctgcctctggcctttggcaagagacagggcagagaattcatctggaacgacctgctgtccctggaaaccggcagcctgaagctggccaacggaagagtgatcgagaagacactgtacaacagaagaacccggcaggatgagcctgccctgttcgtggccctgaccttcgagcggcgggaggtcctggactcctccaatatcaaaccaatgaacctgatcggcgtggcaagaggcgaaaacatccccgccgtgatcgccctgaccgaccccgagggctgcccactgagccggtttaaggatagcctgggaaacccaacccacatcctgagaatcggcgagagctataaggagaagcagcggaccatccaggccaagaaggaggtggagcagcggagagccggcggctacagccggaagtacgccagcaaagccaagaatctggcagacgatatggtgagaaacaccgctagagatctgctgtactacgccgtgacccaggatgccatgctgatcttcgccaacctgagccggggcttcggccggcagggcaagcggaccttcatggccgagagacagtacacacggatggaggactggctgaccgccaagctggcctacgagggcctgagcaagacctacctgtccaagacactggcccagtacacctccaagacatgcagcaactgtgggtttaccatcaccagcgccgactacgacagggtgctggagaagctgaagaagacagcaacaggctggatgaccacaattaacggcaaggagctgaaggtggagggccagattacctactacaacagatacaagagacagaacgtagtcaaggacctgtccgtcgagctggatagactgagcgaagaatctgtgaacaacgacatctcctcctggacaaagggcagaagcggagaagctctgagcctcctgaagaaaagattctcccatagacccgtgcaggagaagttcgtgtgcctgaactgcggcttcgagacacacgcagccgagcaagccgccctgaacatcgccagatcctggctgttcctgcggagccaggagtacaagaaataccagacaaacaagacaaccggcaacaccgataagagagccttcgtcgagacctggcagtccttttaccggaagaagcttaaggaggtgtggaaacctgccgtgcggtctggcggatctggcggaggctccacaagcaagcccggcgccctgagcttcgccgacgtggccgtgtacttcagcagcgaggagtggggctgcctgaggcccgcccagagggccctgtacagggacgtgatgagggagacctacggccacctgggcgccctgggcttcgccggccccaagcccgccctgatcagctggatggagaggaagaaggaggcctggagccccgaggccgaggaccccgaggacagggccaggcaccccggctacggcaccagccccaagaaaaagagaaaagtctaagctgccttctgcggggcttgccttctggccatgcccttcttctctcccttgcacctgtacctcttggtctttgaataaagcctgagtaggaaggctagcaaaaaaaaaaaaaaaaaaaaaaaaaaaaaaaaaaaaaaaaaaaaaaaaaaaaaaaaaaaaaaaaaaaaaaaaaaaaaaaa

SEQ ID NO: 3354 - RNA, 5419 nt, synthetic construct
  source 1..5419: mol_type = other RNA
aggaaataagagagaaaagaagagtaagaagaaatataagagccaccatggcccctaagaagaagcgtaaagtgagccgggtgaacggcagcggcagcggcggcggcatgaaccacgaccaggagttcgacccccctaaggtgtaccctcccgtccccgccgagaagagaaagcccatccgggtcctgagcctgttcgatggcatcgccaccggtctgctggtgctgaaggacctgggcatccaggtggataggtacattgcctccgaggtgtgcgaggactccatcaccgtgggaatggtgcgtcatcagggcaagatcatgtacgtgggcgacgtgcggagcgtgacacagaagcatatccaggagtggggccctttcgacctggtgatcggcggcagcccttgcaatgacctgagcatcgtgaacccagcccggaagggcctgtacgagggaaccggcagactgttcttcgagttttacagactgctgcacgacgcccggcctaaggaaggcgacgaccggcccttcttttggctgttcgagaatgtggtggccatgggagtcagcgacaagcgggatattagccggttcctggagagcaaccccgtgatgatcgatgccaaggaagtgagcgccgcccaccgggccagatacttctggggcaatctgcctggcatgaacagacccctggccagcaccgtgaacgacaagctggagctgcaggagtgcctggagcacggccggatcgccaagttcagcaaggtgagaaccatcaccacccgaagcaacagcatcaaacaaggcaaggaccagcactttcctgtgttcatgaacgagaaggaggacatcctgtggtgtaccgagatggagagagtgttcgggttcccagtccactacacagatgtcagcaacatgtctagactggccagacagagactgctgggaagaagctggtccgtccctgtgatcagacacctgttcgcccctctgaaggagtacttcgcctgcgtgagcagcggcaacagcaacgccaacagccggggccccagcttctctagcggcctggtgccactgtccctgagagggagccacatgggccccatggagatctacaaaaccgtgagcgcctggaagcggcagcctgtgcgcgtgctgagcctgtttcggaatatcgataaagtcctgaaaagcctgggattcctggagagcggctctggctccggcggtggcaccctgaagtacgtggaggatgtgacaaacgtggtcagacgggatgtggagaagtggggccccttcgatctggtgtacggcagcacccaacccctgggcagctcttgtgaccggtgccctggctggtacatgtttcagttccaccggatcctgcagtacgccctgccgagacaggagtcccagcggccattcttttggattttcatggacaacttgctgctgaccgaggatgaccaggaaactaccactcggttcctgcagaccgaagccgtgaccctgcaggacgtgagaggccgggactaccagaacgccatgcgggtgtggtccaacatccctggactgaaaagcaagcacgcacctctgacccctaaagaagaggagtacctgcaggcccaggtgcggagcagaagcaagctggacgcccctaaggtggatctgctggtgaagaattgcctcctgcccctgagagagtacttcaagtatttcagccagaatagtctgcccctgggcggcccaagcagcggcgcccctcctcccagcggcggcagcccagccggctccccaacctctaccgaggagggcacctctgagtccgccacccccgagagcggccctggcacctccaccgagcccagcgagggcagcgcacccggcagccctgccggcagccccacctccacagaggagggaaccagcaccgagcccagcgaaggcagcgccccaggcaccagcaccgagcctagtgagggcggctctggcggcggcagcgcccaggagattaaacggatcaacaagatcagaagaagacttgtgaaagacagcaacaccaagaaggccggcaagacaggccccatgaaaaccctgctggttagagtgatgacacccgatctgagagagcggctggaaaacctgagaaagaagcctgaaaatatcccccagcccatcagcaatacatctagagccaacctgaataagctgctgaccgattacaccgaaatgaagaaggcgatcctgcatgtgtactgggaagagttccagaaggaccctgtgggcctgatgagccgggtggcccagcctgccagcaagaagatcgatcagaacaagctgaaacctgagatggacgagaagggcaacctgaccaccgccggctttgcctgctctcagtgtggccagcccctgttcgtgtacaagctggagcaggtgtctgagaagggcaaggcttacaccaactacttcggacggtgcaatgtggccgagcacgaaaagctgatcctgctggcccagctgaagcccgagaaggatagcgacgaagccgtgacatatagcctgggaaagtttgggcagagggccctggatttctacagcattcatgtgaccaaggagtccacccaccccgtgaagcccctggcccagatcgccggaaacagatacgcctccggacctgtgggaaaggccctgagcgacgcatgtatgggcacaatcgcctccttcctgtctaagtaccaggacatcatcatcgaacaccagaaggtggtgaagggcaaccagaagagactggagagcctgcgggagctggccggcaaggaaaacctggaataccctagcgtgaccctgccacctcagcctcacaccaaggagggcgttgatgcctacaacgaagtgatcgcccgggtgcgaatgtgggtgaacctgaacctgtggcagaagctgaagctaagcagagatgatgccaagcctctgctgagactgaagggattcccttcctttcctctggtcgagagacaggccaacgaagtggactggtgggacatggtgtgtaacgtgaagaagctgatcaacgagaaaaaggaggatggcaaggtgttttggcagaatctggctggctacaagagacaggaagccctgagaccatacctgagcagcgaggaagatcggaagaagggaaagaaattcgctcggtaccagctgggcgacctgctgctgcacctggaaaagaagcacggcgaggactggggaaaggtgtacgacgaggcctgggagcggattgacaagaaagtggaaggcctgagcaagcacatcaagctggaagaggaacggagaagcgaggacgcccagagcaaggccgccctgaccgactggctgcgggctaaggccagcttcgtgatcgagggcctgaaggaggccgacaaggacgagttctgcagatgcgagctgaagctgcagaagtggtacggggacctgcggggaaagcccttcgccatcgaagccgagaacagcatcctggacatcagcggcttcagcaagcagtacaactgtgccttcatctggcagaaggacggcgtgaagaagctgaacctgtacctgatcatcaactacttcaagggcggcaagctgcggttcaagaagatcaaacctgaagccttcgaagccaacagattctacaccgtgatcaacaaaaagagcggcgagatcgtgcccatggaggtgaacttcaacttcgacgaccccaacctgatcatcctgcctctggcctttggcaagagacagggcagagaattcatctggaacgacctgctgtccctggaaaccggcagcctgaagctggccaacggaagagtgatcgagaagacactgtacaacagaagaacccggcaggatgagcctgccctgttcgtggccctgaccttcgagcggcgggaggtcctggactcctccaatatcaaaccaatgaacctgatcggcgtggcaagaggcgaaaacatccccgccgtgatcgccctgaccgaccccgagggctgcccactgagccggtttaaggatagcctgggaaacccaacccacatcctgagaatcggcgagagctataaggagaagcagcggaccatccaggccaagaaggaggtggagcagcggagagccggcggctacagccggaagtacgccagcaaagccaagaatctggcagacgatatggtgagaaacaccgctagagatctgctgtactacgccgtgacccaggatgccatgctgatcttcgccaacctgagccggggcttcggccggcagggcaagcggaccttcatggccgagagacagtacacacggatggaggactggctgaccgccaagctggcctacgagggcctgagcaagacctacctgtccaagacactggcccagtacacctccaagacatgcagcaactgtgggtttaccatcaccagcgccgactacgacagggtgctggagaagctgaagaagacagcaacaggctggatgaccacaattaacggcaaggagctgaaggtggagggccagattacctactacaacagatacaagagacagaacgtagtcaaggacctgtccgtcgagctggatagactgagcgaagaatctgtgaacaacgacatctcctcctggacaaagggcagaagcggagaagctctgagcctcctgaagaaaagattctcccatagacccgtgcaggagaagttcgtgtgcctgaactgcggcttcgagacacacgcagccgagcaagccgccctgaacatcgccagatcctggctgttcctgcggagccaggagtacaagaaataccagacaaacaagacaaccggcaacaccgataagagagccttcgtcgagacctggcagtccttttaccggaagaagcttaaggaggtgtggaaacctgccgtgcggtctggcggatctggcggaggctccacaagcatggagcccctgaagttcagggacgtggccgtggagttcagcctggaggagtggcagtgcctggacaccatccagcagaacctgtacaggaacgtgatgctggagaactacaggaacctggtgttcctgggcatcgccgtgagcaagcccgacctgatcacctgcctggagcaggagaaggagccctggaccaggaagaggcacaggatggtggccaagcccgtgacctgcagccacttcgccaccagccccaagaaaaagagaaaagtctaagctgccttctgcggggcttgccttctggccatgcccttcttctctcccttgcacctgtacctcttggtctttgaataaagcctgagtaggaaggctagcaaaaaaaaaaaaaaaaaaaaaaaaaaaaaaaaaaaaaaaaaaaaaaaaaaaaaaaaaaaaaaaaaaaaaaaaaaaaaaaa

SEQ ID NO: 3355 - RNA, 5419 nt, synthetic construct
  source 1..5419: mol_type = other RNA
aggaaataagagagaaaagaagagtaagaagaaatataagagccaccatggcccctaagaagaagcgtaaagtgagccgggtgaacggcagcggcagcggcggcggcatgaaccacgaccaggagttcgacccccctaaggtgtaccctcccgtccccgccgagaagagaaagcccatccgggtcctgagcctgttcgatggcatcgccaccggtctgctggtgctgaaggacctgggcatccaggtggataggtacattgcctccgaggtgtgcgaggactccatcaccgtgggaatggtgcgtcatcagggcaagatcatgtacgtgggcgacgtgcggagcgtgacacagaagcatatccaggagtggggccctttcgacctggtgatcggcggcagcccttgcaatgacctgagcatcgtgaacccagcccggaagggcctgtacgagggaaccggcagactgttcttcgagttttacagactgctgcacgacgcccggcctaaggaaggcgacgaccggcccttcttttggctgttcgagaatgtggtggccatgggagtcagcgacaagcgggatattagccggttcctggagagcaaccccgtgatgatcgatgccaaggaagtgagcgccgcccaccgggccagatacttctggggcaatctgcctggcatgaacagacccctggccagcaccgtgaacgacaagctggagctgcaggagtgcctggagcacggccggatcgccaagttcagcaaggtgagaaccatcaccacccgaagcaacagcatcaaacaaggcaaggaccagcactttcctgtgttcatgaacgagaaggaggacatcctgtggtgtaccgagatggagagagtgttcgggttcccagtccactacacagatgtcagcaacatgtctagactggccagacagagactgctgggaagaagctggtccgtccctgtgatcagacacctgttcgcccctctgaaggagtacttcgcctgcgtgagcagcggcaacagcaacgccaacagccggggccccagcttctctagcggcctggtgccactgtccctgagagggagccacatgggccccatggagatctacaaaaccgtgagcgcctggaagcggcagcctgtgcgcgtgctgagcctgtttcggaatatcgataaagtcctgaaaagcctgggattcctggagagcggctctggctccggcggtggcaccctgaagtacgtggaggatgtgacaaacgtggtcagacgggatgtggagaagtggggccccttcgatctggtgtacggcagcacccaacccctgggcagctcttgtgaccggtgccctggctggtacatgtttcagttccaccggatcctgcagtacgccctgccgagacaggagtcccagcggccattcttttggattttcatggacaacttgctgctgaccgaggatgaccaggaaactaccactcggttcctgcagaccgaagccgtgaccctgcaggacgtgagaggccgggactaccagaacgccatgcgggtgtggtccaacatccctggactgaaaagcaagcacgcacctctgacccctaaagaagaggagtacctgcaggcccaggtgcggagcagaagcaagctggacgcccctaaggtggatctgctggtgaagaattgcctcctgcccctgagagagtacttcaagtatttcagccagaatagtctgcccctgggcggcccaagcagcggcgcccctcctcccagcggcggcagcccagccggctccccaacctctaccgaggagggcacctctgagtccgccacccccgagagcggccctggcacctccaccgagcccagcgagggcagcgcacccggcagccctgccggcagccccacctccacagaggagggaaccagcaccgagcccagcgaaggcagcgccccaggcaccagcaccgagcctagtgagggcggctctggcggcggcagcgcccaggagattaaacggatcaacaagatcagaagaagacttgtgaaagacagcaacaccaagaaggccggcaagacaggccccatgaaaaccctgctggttagagtgatgacacccgatctgagagagcggctggaaaacctgagaaagaagcctgaaaatatcccccagcccatcagcaatacatctagagccaacctgaataagctgctgaccgattacaccgaaatgaagaaggcgatcctgcatgtgtactgggaagagttccagaaggaccctgtgggcctgatgagccgggtggcccagcctgccagcaagaagatcgatcagaacaagctgaaacctgagatggacgagaagggcaacctgaccaccgccggctttgcctgctctcagtgtggccagcccctgttcgtgtacaagctggagcaggtgtctgagaagggcaaggcttacaccaactacttcggacggtgcaatgtggccgagcacgaaaagctgatcctgctggcccagctgaagcccgagaaggatagcgacgaagccgtgacatatagcctgggaaagtttgggcagagggccctggatttctacagcattcatgtgaccaaggagtccacccaccccgtgaagcccctggcccagatcgccggaaacagatacgcctccggacctgtgggaaaggccctgagcgacgcatgtatgggcacaatcgcctccttcctgtctaagtaccaggacatcatcatcgaacaccagaaggtggtgaagggcaaccagaagagactggagagcctgcgggagctggccggcaaggaaaacctggaataccctagcgtgaccctgccacctcagcctcacaccaaggagggcgttgatgcctacaacgaagtgatcgcccgggtgcgaatgtgggtgaacctgaacctgtggcagaagctgaagctaagcagagatgatgccaagcctctgctgagactgaagggattcccttcctttcctctggtcgagagacaggccaacgaagtggactggtgggacatggtgtgtaacgtgaagaagctgatcaacgagaaaaaggaggatggcaaggtgttttggcagaatctggctggctacaagagacaggaagccctgagaccatacctgagcagcgaggaagatcggaagaagggaaagaaattcgctcggtaccagctgggcgacctgctgctgcacctggaaaagaagcacggcgaggactggggaaaggtgtacgacgaggcctgggagcggattgacaagaaagtggaaggcctgagcaagcacatcaagctggaagaggaacggagaagcgaggacgcccagagcaaggccgccctgaccgactggctgcgggctaaggccagcttcgtgatcgagggcctgaaggaggccgacaaggacgagttctgcagatgcgagctgaagctgcagaagtggtacggggacctgcggggaaagcccttcgccatcgaagccgagaacagcatcctggacatcagcggcttcagcaagcagtacaactgtgccttcatctggcagaaggacggcgtgaagaagctgaacctgtacctgatcatcaactacttcaagggcggcaagctgcggttcaagaagatcaaacctgaagccttcgaagccaacagattctacaccgtgatcaacaaaaagagcggcgagatcgtgcccatggaggtgaacttcaacttcgacgaccccaacctgatcatcctgcctctggcctttggcaagagacagggcagagaattcatctggaacgacctgctgtccctggaaaccggcagcctgaagctggccaacggaagagtgatcgagaagacactgtacaacagaagaacccggcaggatgagcctgccctgttcgtggccctgaccttcgagcggcgggaggtcctggactcctccaatatcaaaccaatgaacctgatcggcgtggcaagaggcgaaaacatccccgccgtgatcgccctgaccgaccccgagggctgcccactgagccggtttaaggatagcctgggaaacccaacccacatcctgagaatcggcgagagctataaggagaagcagcggaccatccaggccaagaaggaggtggagcagcggagagccggcggctacagccggaagtacgccagcaaagccaagaatctggcagacgatatggtgagaaacaccgctagagatctgctgtactacgccgtgacccaggatgccatgctgatcttcgccaacctgagccggggcttcggccggcagggcaagcggaccttcatggccgagagacagtacacacggatggaggactggctgaccgccaagctggcctacgagggcctgagcaagacctacctgtccaagacactggcccagtacacctccaagacatgcagcaactgtgggtttaccatcaccagcgccgactacgacagggtgctggagaagctgaagaagacagcaacaggctggatgaccacaattaacggcaaggagctgaaggtggagggccagattacctactacaacagatacaagagacagaacgtagtcaaggacctgtccgtcgagctggatagactgagcgaagaatctgtgaacaacgacatctcctcctggacaaagggcagaagcggagaagctctgagcctcctgaagaaaagattctcccatagacccgtgcaggagaagttcgtgtgcctgaactgcggcttcgagacacacgcagccgagcaagccgccctgaacatcgccagatcctggctgttcctgcggagccaggagtacaagaaataccagacaaacaagacaaccggcaacaccgataagagagccttcgtcgagacctggcagtccttttaccggaagaagcttaaggaggtgtggaaacctgccgtgcggtctggcggatctggcggaggctccacaagcctgctgcaggagagcctgaccctggaggacgtggccgtggacttcacccaggaggagtggaggctgctggcccccgcccagaaggacctgtacagggacgtgatgctggagaacttcaggaacctggtgagcgtgggctacgtggccagcatgcccgccgccctgagcaggctggagaggggcggcaggtggatgaccgaggacgagaccaggaggggcatctgccccgagatcaagaaggacaccagccccaagaaaaagagaaaagtctaagctgccttctgcggggcttgccttctggccatgcccttcttctctcccttgcacctgtacctcttggtctttgaataaagcctgagtaggaaggctagcaaaaaaaaaaaaaaaaaaaaaaaaaaaaaaaaaaaaaaaaaaaaaaaaaaaaaaaaaaaaaaaaaaaaaaaaaaaaaaaa

SEQ ID NO: 3356 - RNA, 5419 nt, synthetic construct
  source 1..5419: mol_type = other RNA
aggaaataagagagaaaagaagagtaagaagaaatataagagccaccatggcccctaagaagaagcgtaaagtgagccgggtgaacggcagcggcagcggcggcggcatgaaccacgaccaggagttcgacccccctaaggtgtaccctcccgtccccgccgagaagagaaagcccatccgggtcctgagcctgttcgatggcatcgccaccggtctgctggtgctgaaggacctgggcatccaggtggataggtacattgcctccgaggtgtgcgaggactccatcaccgtgggaatggtgcgtcatcagggcaagatcatgtacgtgggcgacgtgcggagcgtgacacagaagcatatccaggagtggggccctttcgacctggtgatcggcggcagcccttgcaatgacctgagcatcgtgaacccagcccggaagggcctgtacgagggaaccggcagactgttcttcgagttttacagactgctgcacgacgcccggcctaaggaaggcgacgaccggcccttcttttggctgttcgagaatgtggtggccatgggagtcagcgacaagcgggatattagccggttcctggagagcaaccccgtgatgatcgatgccaaggaagtgagcgccgcccaccgggccagatacttctggggcaatctgcctggcatgaacagacccctggccagcaccgtgaacgacaagctggagctgcaggagtgcctggagcacggccggatcgccaagttcagcaaggtgagaaccatcaccacccgaagcaacagcatcaaacaaggcaaggaccagcactttcctgtgttcatgaacgagaaggaggacatcctgtggtgtaccgagatggagagagtgttcgggttcccagtccactacacagatgtcagcaacatgtctagactggccagacagagactgctgggaagaagctggtccgtccctgtgatcagacacctgttcgcccctctgaaggagtacttcgcctgcgtgagcagcggcaacagcaacgccaacagccggggccccagcttctctagcggcctggtgccactgtccctgagagggagccacatgggccccatggagatctacaaaaccgtgagcgcctggaagcggcagcctgtgcgcgtgctgagcctgtttcggaatatcgataaagtcctgaaaagcctgggattcctggagagcggctctggctccggcggtggcaccctgaagtacgtggaggatgtgacaaacgtggtcagacgggatgtggagaagtggggccccttcgatctggtgtacggcagcacccaacccctgggcagctcttgtgaccggtgccctggctggtacatgtttcagttccaccggatcctgcagtacgccctgccgagacaggagtcccagcggccattcttttggattttcatggacaacttgctgctgaccgaggatgaccaggaaactaccactcggttcctgcagaccgaagccgtgaccctgcaggacgtgagaggccgggactaccagaacgccatgcgggtgtggtccaacatccctggactgaaaagcaagcacgcacctctgacccctaaagaagaggagtacctgcaggcccaggtgcggagcagaagcaagctggacgcccctaaggtggatctgctggtgaagaattgcctcctgcccctgagagagtacttcaagtatttcagccagaatagtctgcccctgggcggcccaagcagcggcgcccctcctcccagcggcggcagcccagccggctccccaacctctaccgaggagggcacctctgagtccgccacccccgagagcggccctggcacctccaccgagcccagcgagggcagcgcacccggcagccctgccggcagccccacctccacagaggagggaaccagcaccgagcccagcgaaggcagcgccccaggcaccagcaccgagcctagtgagggcggctctggcggcggcagcgcccaggagattaaacggatcaacaagatcagaagaagacttgtgaaagacagcaacaccaagaaggccggcaagacaggccccatgaaaaccctgctggttagagtgatgacacccgatctgagagagcggctggaaaacctgagaaagaagcctgaaaatatcccccagcccatcagcaatacatctagagccaacctgaataagctgctgaccgattacaccgaaatgaagaaggcgatcctgcatgtgtactgggaagagttccagaaggaccctgtgggcctgatgagccgggtggcccagcctgccagcaagaagatcgatcagaacaagctgaaacctgagatggacgagaagggcaacctgaccaccgccggctttgcctgctctcagtgtggccagcccctgttcgtgtacaagctggagcaggtgtctgagaagggcaaggcttacaccaactacttcggacggtgcaatgtggccgagcacgaaaagctgatcctgctggcccagctgaagcccgagaaggatagcgacgaagccgtgacatatagcctgggaaagtttgggcagagggccctggatttctacagcattcatgtgaccaaggagtccacccaccccgtgaagcccctggcccagatcgccggaaacagatacgcctccggacctgtgggaaaggccctgagcgacgcatgtatgggcacaatcgcctccttcctgtctaagtaccaggacatcatcatcgaacaccagaaggtggtgaagggcaaccagaagagactggagagcctgcgggagctggccggcaaggaaaacctggaataccctagcgtgaccctgccacctcagcctcacaccaaggagggcgttgatgcctacaacgaagtgatcgcccgggtgcgaatgtgggtgaacctgaacctgtggcagaagctgaagctaagcagagatgatgccaagcctctgctgagactgaagggattcccttcctttcctctggtcgagagacaggccaacgaagtggactggtgggacatggtgtgtaacgtgaagaagctgatcaacgagaaaaaggaggatggcaaggtgttttggcagaatctggctggctacaagagacaggaagccctgagaccatacctgagcagcgaggaagatcggaagaagggaaagaaattcgctcggtaccagctgggcgacctgctgctgcacctggaaaagaagcacggcgaggactggggaaaggtgtacgacgaggcctgggagcggattgacaagaaagtggaaggcctgagcaagcacatcaagctggaagaggaacggagaagcgaggacgcccagagcaaggccgccctgaccgactggctgcgggctaaggccagcttcgtgatcgagggcctgaaggaggccgacaaggacgagttctgcagatgcgagctgaagctgcagaagtggtacggggacctgcggggaaagcccttcgccatcgaagccgagaacagcatcctggacatcagcggcttcagcaagcagtacaactgtgccttcatctggcagaaggacggcgtgaagaagctgaacctgtacctgatcatcaactacttcaagggcggcaagctgcggttcaagaagatcaaacctgaagccttcgaagccaacagattctacaccgtgatcaacaaaaagagcggcgagatcgtgcccatggaggtgaacttcaacttcgacgaccccaacctgatcatcctgcctctggcctttggcaagagacagggcagagaattcatctggaacgacctgctgtccctggaaaccggcagcctgaagctggccaacggaagagtgatcgagaagacactgtacaacagaagaacccggcaggatgagcctgccctgttcgtggccctgaccttcgagcggcgggaggtcctggactcctccaatatcaaaccaatgaacctgatcggcgtggcaagaggcgaaaacatccccgccgtgatcgccctgaccgaccccgagggctgcccactgagccggtttaaggatagcctgggaaacccaacccacatcctgagaatcggcgagagctataaggagaagcagcggaccatccaggccaagaaggaggtggagcagcggagagccggcggctacagccggaagtacgccagcaaagccaagaatctggcagacgatatggtgagaaacaccgctagagatctgctgtactacgccgtgacccaggatgccatgctgatcttcgccaacctgagccggggcttcggccggcagggcaagcggaccttcatggccgagagacagtacacacggatggaggactggctgaccgccaagctggcctacgagggcctgagcaagacctacctgtccaagacactggcccagtacacctccaagacatgcagcaactgtgggtttaccatcaccagcgccgactacgacagggtgctggagaagctgaagaagacagcaacaggctggatgaccacaattaacggcaaggagctgaaggtggagggccagattacctactacaacagatacaagagacagaacgtagtcaaggacctgtccgtcgagctggatagactgagcgaagaatctgtgaacaacgacatctcctcctggacaaagggcagaagcggagaagctctgagcctcctgaagaaaagattctcccatagacccgtgcaggagaagttcgtgtgcctgaactgcggcttcgagacacacgcagccgagcaagccgccctgaacatcgccagatcctggctgttcctgcggagccaggagtacaagaaataccagacaaacaagacaaccggcaacaccgataagagagccttcgtcgagacctggcagtccttttaccggaagaagcttaaggaggtgtggaaacctgccgtgcggtctggcggatctggcggaggctccacaagcatgaacaccgtgacctacgacgacgtgcacgtgaacttcacctgggaggagtggaccctgctggaccccagccagaagaacctgtacaaggacgtgatgctggagacctacaggaacctgaccgccgtgggctacagctgggaggaccacaacgtggaggagcactgccagagctacaggaggcacagcaggctggagaggagccacaccggcgagaagagcagcgtgcacacccagtgcgtgaccagccccaagaaaaagagaaaagtctaagctgccttctgcggggcttgccttctggccatgcccttcttctctcccttgcacctgtacctcttggtctttgaataaagcctgagtaggaaggctagcaaaaaaaaaaaaaaaaaaaaaaaaaaaaaaaaaaaaaaaaaaaaaaaaaaaaaaaaaaaaaaaaaaaaaaaaaaaaaaaa

SEQ ID NO: 3357 - RNA, 5419 nt, synthetic construct
  source 1..5419: mol_type = other RNA
aggaaataagagagaaaagaagagtaagaagaaatataagagccaccatggcccctaagaagaagcgtaaagtgagccgggtgaacggcagcggcagcggcggcggcatgaaccacgaccaggagttcgacccccctaaggtgtaccctcccgtccccgccgagaagagaaagcccatccgggtcctgagcctgttcgatggcatcgccaccggtctgctggtgctgaaggacctgggcatccaggtggataggtacattgcctccgaggtgtgcgaggactccatcaccgtgggaatggtgcgtcatcagggcaagatcatgtacgtgggcgacgtgcggagcgtgacacagaagcatatccaggagtggggccctttcgacctggtgatcggcggcagcccttgcaatgacctgagcatcgtgaacccagcccggaagggcctgtacgagggaaccggcagactgttcttcgagttttacagactgctgcacgacgcccggcctaaggaaggcgacgaccggcccttcttttggctgttcgagaatgtggtggccatgggagtcagcgacaagcgggatattagccggttcctggagagcaaccccgtgatgatcgatgccaaggaagtgagcgccgcccaccgggccagatacttctggggcaatctgcctggcatgaacagacccctggccagcaccgtgaacgacaagctggagctgcaggagtgcctggagcacggccggatcgccaagttcagcaaggtgagaaccatcaccacccgaagcaacagcatcaaacaaggcaaggaccagcactttcctgtgttcatgaacgagaaggaggacatcctgtggtgtaccgagatggagagagtgttcgggttcccagtccactacacagatgtcagcaacatgtctagactggccagacagagactgctgggaagaagctggtccgtccctgtgatcagacacctgttcgcccctctgaaggagtacttcgcctgcgtgagcagcggcaacagcaacgccaacagccggggccccagcttctctagcggcctggtgccactgtccctgagagggagccacatgggccccatggagatctacaaaaccgtgagcgcctggaagcggcagcctgtgcgcgtgctgagcctgtttcggaatatcgataaagtcctgaaaagcctgggattcctggagagcggctctggctccggcggtggcaccctgaagtacgtggaggatgtgacaaacgtggtcagacgggatgtggagaagtggggccccttcgatctggtgtacggcagcacccaacccctgggcagctcttgtgaccggtgccctggctggtacatgtttcagttccaccggatcctgcagtacgccctgccgagacaggagtcccagcggccattcttttggattttcatggacaacttgctgctgaccgaggatgaccaggaaactaccactcggttcctgcagaccgaagccgtgaccctgcaggacgtgagaggccgggactaccagaacgccatgcgggtgtggtccaacatccctggactgaaaagcaagcacgcacctctgacccctaaagaagaggagtacctgcaggcccaggtgcggagcagaagcaagctggacgcccctaaggtggatctgctggtgaagaattgcctcctgcccctgagagagtacttcaagtatttcagccagaatagtctgcccctgggcggcccaagcagcggcgcccctcctcccagcggcggcagcccagccggctccccaacctctaccgaggagggcacctctgagtccgccacccccgagagcggccctggcacctccaccgagcccagcgagggcagcgcacccggcagccctgccggcagccccacctccacagaggagggaaccagcaccgagcccagcgaaggcagcgccccaggcaccagcaccgagcctagtgagggcggctctggcggcggcagcgcccaggagattaaacggatcaacaagatcagaagaagacttgtgaaagacagcaacaccaagaaggccggcaagacaggccccatgaaaaccctgctggttagagtgatgacacccgatctgagagagcggctggaaaacctgagaaagaagcctgaaaatatcccccagcccatcagcaatacatctagagccaacctgaataagctgctgaccgattacaccgaaatgaagaaggcgatcctgcatgtgtactgggaagagttccagaaggaccctgtgggcctgatgagccgggtggcccagcctgccagcaagaagatcgatcagaacaagctgaaacctgagatggacgagaagggcaacctgaccaccgccggctttgcctgctctcagtgtggccagcccctgttcgtgtacaagctggagcaggtgtctgagaagggcaaggcttacaccaactacttcggacggtgcaatgtggccgagcacgaaaagctgatcctgctggcccagctgaagcccgagaaggatagcgacgaagccgtgacatatagcctgggaaagtttgggcagagggccctggatttctacagcattcatgtgaccaaggagtccacccaccccgtgaagcccctggcccagatcgccggaaacagatacgcctccggacctgtgggaaaggccctgagcgacgcatgtatgggcacaatcgcctccttcctgtctaagtaccaggacatcatcatcgaacaccagaaggtggtgaagggcaaccagaagagactggagagcctgcgggagctggccggcaaggaaaacctggaataccctagcgtgaccctgccacctcagcctcacaccaaggagggcgttgatgcctacaacgaagtgatcgcccgggtgcgaatgtgggtgaacctgaacctgtggcagaagctgaagctaagcagagatgatgccaagcctctgctgagactgaagggattcccttcctttcctctggtcgagagacaggccaacgaagtggactggtgggacatggtgtgtaacgtgaagaagctgatcaacgagaaaaaggaggatggcaaggtgttttggcagaatctggctggctacaagagacaggaagccctgagaccatacctgagcagcgaggaagatcggaagaagggaaagaaattcgctcggtaccagctgggcgacctgctgctgcacctggaaaagaagcacggcgaggactggggaaaggtgtacgacgaggcctgggagcggattgacaagaaagtggaaggcctgagcaagcacatcaagctggaagaggaacggagaagcgaggacgcccagagcaaggccgccctgaccgactggctgcgggctaaggccagcttcgtgatcgagggcctgaaggaggccgacaaggacgagttctgcagatgcgagctgaagctgcagaagtggtacggggacctgcggggaaagcccttcgccatcgaagccgagaacagcatcctggacatcagcggcttcagcaagcagtacaactgtgccttcatctggcagaaggacggcgtgaagaagctgaacctgtacctgatcatcaactacttcaagggcggcaagctgcggttcaagaagatcaaacctgaagccttcgaagccaacagattctacaccgtgatcaacaaaaagagcggcgagatcgtgcccatggaggtgaacttcaacttcgacgaccccaacctgatcatcctgcctctggcctttggcaagagacagggcagagaattcatctggaacgacctgctgtccctggaaaccggcagcctgaagctggccaacggaagagtgatcgagaagacactgtacaacagaagaacccggcaggatgagcctgccctgttcgtggccctgaccttcgagcggcgggaggtcctggactcctccaatatcaaaccaatgaacctgatcggcgtggcaagaggcgaaaacatccccgccgtgatcgccctgaccgaccccgagggctgcccactgagccggtttaaggatagcctgggaaacccaacccacatcctgagaatcggcgagagctataaggagaagcagcggaccatccaggccaagaaggaggtggagcagcggagagccggcggctacagccggaagtacgccagcaaagccaagaatctggcagacgatatggtgagaaacaccgctagagatctgctgtactacgccgtgacccaggatgccatgctgatcttcgccaacctgagccggggcttcggccggcagggcaagcggaccttcatggccgagagacagtacacacggatggaggactggctgaccgccaagctggcctacgagggcctgagcaagacctacctgtccaagacactggcccagtacacctccaagacatgcagcaactgtgggtttaccatcaccagcgccgactacgacagggtgctggagaagctgaagaagacagcaacaggctggatgaccacaattaacggcaaggagctgaaggtggagggccagattacctactacaacagatacaagagacagaacgtagtcaaggacctgtccgtcgagctggatagactgagcgaagaatctgtgaacaacgacatctcctcctggacaaagggcagaagcggagaagctctgagcctcctgaagaaaagattctcccatagacccgtgcaggagaagttcgtgtgcctgaactgcggcttcgagacacacgcagccgagcaagccgccctgaacatcgccagatcctggctgttcctgcggagccaggagtacaagaaataccagacaaacaagacaaccggcaacaccgataagagagccttcgtcgagacctggcagtccttttaccggaagaagcttaaggaggtgtggaaacctgccgtgcggtctggcggatctggcggaggctccacaagcgccagggcccccgtgagcttcgaggaggtggccgtgtacttcagccccgaggagtggcagaccctgcagggctggcagaaggagatgtacaggggcgtgatgagggagaactacgagatcatgctgagcctgggctaccagttcagcaagcccgagatcctgctgatgatggagaggggcgaggagccctgcgtggaggactgccagaggaggatccccgtgaccttcagggagaagcacctgaccagccccaagaaaaagagaaaagtctaagctgccttctgcggggcttgccttctggccatgcccttcttctctcccttgcacctgtacctcttggtctttgaataaagcctgagtaggaaggctagcaaaaaaaaaaaaaaaaaaaaaaaaaaaaaaaaaaaaaaaaaaaaaaaaaaaaaaaaaaaaaaaaaaaaaaaaaaaaaaaa

SEQ ID NO: 3358 - RNA, 5419 nt, synthetic construct
  source 1..5419: mol_type = other RNA
aggaaataagagagaaaagaagagtaagaagaaatataagagccaccatggcccctaagaagaagcgtaaagtgagccgggtgaacggcagcggcagcggcggcggcatgaaccacgaccaggagttcgacccccctaaggtgtaccctcccgtccccgccgagaagagaaagcccatccgggtcctgagcctgttcgatggcatcgccaccggtctgctggtgctgaaggacctgggcatccaggtggataggtacattgcctccgaggtgtgcgaggactccatcaccgtgggaatggtgcgtcatcagggcaagatcatgtacgtgggcgacgtgcggagcgtgacacagaagcatatccaggagtggggccctttcgacctggtgatcggcggcagcccttgcaatgacctgagcatcgtgaacccagcccggaagggcctgtacgagggaaccggcagactgttcttcgagttttacagactgctgcacgacgcccggcctaaggaaggcgacgaccggcccttcttttggctgttcgagaatgtggtggccatgggagtcagcgacaagcgggatattagccggttcctggagagcaaccccgtgatgatcgatgccaaggaagtgagcgccgcccaccgggccagatacttctggggcaatctgcctggcatgaacagacccctggccagcaccgtgaacgacaagctggagctgcaggagtgcctggagcacggccggatcgccaagttcagcaaggtgagaaccatcaccacccgaagcaacagcatcaaacaaggcaaggaccagcactttcctgtgttcatgaacgagaaggaggacatcctgtggtgtaccgagatggagagagtgttcgggttcccagtccactacacagatgtcagcaacatgtctagactggccagacagagactgctgggaagaagctggtccgtccctgtgatcagacacctgttcgcccctctgaaggagtacttcgcctgcgtgagcagcggcaacagcaacgccaacagccggggccccagcttctctagcggcctggtgccactgtccctgagagggagccacatgggccccatggagatctacaaaaccgtgagcgcctggaagcggcagcctgtgcgcgtgctgagcctgtttcggaatatcgataaagtcctgaaaagcctgggattcctggagagcggctctggctccggcggtggcaccctgaagtacgtggaggatgtgacaaacgtggtcagacgggatgtggagaagtggggccccttcgatctggtgtacggcagcacccaacccctgggcagctcttgtgaccggtgccctggctggtacatgtttcagttccaccggatcctgcagtacgccctgccgagacaggagtcccagcggccattcttttggattttcatggacaacttgctgctgaccgaggatgaccaggaaactaccactcggttcctgcagaccgaagccgtgaccctgcaggacgtgagaggccgggactaccagaacgccatgcgggtgtggtccaacatccctggactgaaaagcaagcacgcacctctgacccctaaagaagaggagtacctgcaggcccaggtgcggagcagaagcaagctggacgcccctaaggtggatctgctggtgaagaattgcctcctgcccctgagagagtacttcaagtatttcagccagaatagtctgcccctgggcggcccaagcagcggcgcccctcctcccagcggcggcagcccagccggctccccaacctctaccgaggagggcacctctgagtccgccacccccgagagcggccctggcacctccaccgagcccagcgagggcagcgcacccggcagccctgccggcagccccacctccacagaggagggaaccagcaccgagcccagcgaaggcagcgccccaggcaccagcaccgagcctagtgagggcggctctggcggcggcagcgcccaggagattaaacggatcaacaagatcagaagaagacttgtgaaagacagcaacaccaagaaggccggcaagacaggccccatgaaaaccctgctggttagagtgatgacacccgatctgagagagcggctggaaaacctgagaaagaagcctgaaaatatcccccagcccatcagcaatacatctagagccaacctgaataagctgctgaccgattacaccgaaatgaagaaggcgatcctgcatgtgtactgggaagagttccagaaggaccctgtgggcctgatgagccgggtggcccagcctgccagcaagaagatcgatcagaacaagctgaaacctgagatggacgagaagggcaacctgaccaccgccggctttgcctgctctcagtgtggccagcccctgttcgtgtacaagctggagcaggtgtctgagaagggcaaggcttacaccaactacttcggacggtgcaatgtggccgagcacgaaaagctgatcctgctggcccagctgaagcccgagaaggatagcgacgaagccgtgacatatagcctgggaaagtttgggcagagggccctggatttctacagcattcatgtgaccaaggagtccacccaccccgtgaagcccctggcccagatcgccggaaacagatacgcctccggacctgtgggaaaggccctgagcgacgcatgtatgggcacaatcgcctccttcctgtctaagtaccaggacatcatcatcgaacaccagaaggtggtgaagggcaaccagaagagactggagagcctgcgggagctggccggcaaggaaaacctggaataccctagcgtgaccctgccacctcagcctcacaccaaggagggcgttgatgcctacaacgaagtgatcgcccgggtgcgaatgtgggtgaacctgaacctgtggcagaagctgaagctaagcagagatgatgccaagcctctgctgagactgaagggattcccttcctttcctctggtcgagagacaggccaacgaagtggactggtgggacatggtgtgtaacgtgaagaagctgatcaacgagaaaaaggaggatggcaaggtgttttggcagaatctggctggctacaagagacaggaagccctgagaccatacctgagcagcgaggaagatcggaagaagggaaagaaattcgctcggtaccagctgggcgacctgctgctgcacctggaaaagaagcacggcgaggactggggaaaggtgtacgacgaggcctgggagcggattgacaagaaagtggaaggcctgagcaagcacatcaagctggaagaggaacggagaagcgaggacgcccagagcaaggccgccctgaccgactggctgcgggctaaggccagcttcgtgatcgagggcctgaaggaggccgacaaggacgagttctgcagatgcgagctgaagctgcagaagtggtacggggacctgcggggaaagcccttcgccatcgaagccgagaacagcatcctggacatcagcggcttcagcaagcagtacaactgtgccttcatctggcagaaggacggcgtgaagaagctgaacctgtacctgatcatcaactacttcaagggcggcaagctgcggttcaagaagatcaaacctgaagccttcgaagccaacagattctacaccgtgatcaacaaaaagagcggcgagatcgtgcccatggaggtgaacttcaacttcgacgaccccaacctgatcatcctgcctctggcctttggcaagagacagggcagagaattcatctggaacgacctgctgtccctggaaaccggcagcctgaagctggccaacggaagagtgatcgagaagacactgtacaacagaagaacccggcaggatgagcctgccctgttcgtggccctgaccttcgagcggcgggaggtcctggactcctccaatatcaaaccaatgaacctgatcggcgtggcaagaggcgaaaacatccccgccgtgatcgccctgaccgaccccgagggctgcccactgagccggtttaaggatagcctgggaaacccaacccacatcctgagaatcggcgagagctataaggagaagcagcggaccatccaggccaagaaggaggtggagcagcggagagccggcggctacagccggaagtacgccagcaaagccaagaatctggcagacgatatggtgagaaacaccgctagagatctgctgtactacgccgtgacccaggatgccatgctgatcttcgccaacctgagccggggcttcggccggcagggcaagcggaccttcatggccgagagacagtacacacggatggaggactggctgaccgccaagctggcctacgagggcctgagcaagacctacctgtccaagacactggcccagtacacctccaagacatgcagcaactgtgggtttaccatcaccagcgccgactacgacagggtgctggagaagctgaagaagacagcaacaggctggatgaccacaattaacggcaaggagctgaaggtggagggccagattacctactacaacagatacaagagacagaacgtagtcaaggacctgtccgtcgagctggatagactgagcgaagaatctgtgaacaacgacatctcctcctggacaaagggcagaagcggagaagctctgagcctcctgaagaaaagattctcccatagacccgtgcaggagaagttcgtgtgcctgaactgcggcttcgagacacacgcagccgagcaagccgccctgaacatcgccagatcctggctgttcctgcggagccaggagtacaagaaataccagacaaacaagacaaccggcaacaccgataagagagccttcgtcgagacctggcagtccttttaccggaagaagcttaaggaggtgtggaaacctgccgtgcggtctggcggatctggcggaggctccacaagcatggagaccctgaccttcagggacgtggccatcgagttcagcctggaggagtggcagtgcctggacatcgcccagcaggacctgtacaggaaggtgatgctggagaactacaggaacctggccttcctgggcatcgccctgaccaagcccgacctgatcacctgcctggagcagaggaaggtgccctggaacatgaagaggcacgagatggccgacgagccccccgtgctgtgcagcaacttcaccagccccaagaaaaagagaaaagtctaagctgccttctgcggggcttgccttctggccatgcccttcttctctcccttgcacctgtacctcttggtctttgaataaagcctgagtaggaaggctagcaaaaaaaaaaaaaaaaaaaaaaaaaaaaaaaaaaaaaaaaaaaaaaaaaaaaaaaaaaaaaaaaaaaaaaaaaaaaaaaa

SEQ ID NO: 3359 - RNA, 5419 nt, synthetic construct
  source 1..5419: mol_type = other RNA
aggaaataagagagaaaagaagagtaagaagaaatataagagccaccatggcccctaagaagaagcgtaaagtgagccgggtgaacggcagcggcagcggcggcggcatgaaccacgaccaggagttcgacccccctaaggtgtaccctcccgtccccgccgagaagagaaagcccatccgggtcctgagcctgttcgatggcatcgccaccggtctgctggtgctgaaggacctgggcatccaggtggataggtacattgcctccgaggtgtgcgaggactccatcaccgtgggaatggtgcgtcatcagggcaagatcatgtacgtgggcgacgtgcggagcgtgacacagaagcatatccaggagtggggccctttcgacctggtgatcggcggcagcccttgcaatgacctgagcatcgtgaacccagcccggaagggcctgtacgagggaaccggcagactgttcttcgagttttacagactgctgcacgacgcccggcctaaggaaggcgacgaccggcccttcttttggctgttcgagaatgtggtggccatgggagtcagcgacaagcgggatattagccggttcctggagagcaaccccgtgatgatcgatgccaaggaagtgagcgccgcccaccgggccagatacttctggggcaatctgcctggcatgaacagacccctggccagcaccgtgaacgacaagctggagctgcaggagtgcctggagcacggccggatcgccaagttcagcaaggtgagaaccatcaccacccgaagcaacagcatcaaacaaggcaaggaccagcactttcctgtgttcatgaacgagaaggaggacatcctgtggtgtaccgagatggagagagtgttcgggttcccagtccactacacagatgtcagcaacatgtctagactggccagacagagactgctgggaagaagctggtccgtccctgtgatcagacacctgttcgcccctctgaaggagtacttcgcctgcgtgagcagcggcaacagcaacgccaacagccggggccccagcttctctagcggcctggtgccactgtccctgagagggagccacatgggccccatggagatctacaaaaccgtgagcgcctggaagcggcagcctgtgcgcgtgctgagcctgtttcggaatatcgataaagtcctgaaaagcctgggattcctggagagcggctctggctccggcggtggcaccctgaagtacgtggaggatgtgacaaacgtggtcagacgggatgtggagaagtggggccccttcgatctggtgtacggcagcacccaacccctgggcagctcttgtgaccggtgccctggctggtacatgtttcagttccaccggatcctgcagtacgccctgccgagacaggagtcccagcggccattcttttggattttcatggacaacttgctgctgaccgaggatgaccaggaaactaccactcggttcctgcagaccgaagccgtgaccctgcaggacgtgagaggccgggactaccagaacgccatgcgggtgtggtccaacatccctggactgaaaagcaagcacgcacctctgacccctaaagaagaggagtacctgcaggcccaggtgcggagcagaagcaagctggacgcccctaaggtggatctgctggtgaagaattgcctcctgcccctgagagagtacttcaagtatttcagccagaatagtctgcccctgggcggcccaagcagcggcgcccctcctcccagcggcggcagcccagccggctccccaacctctaccgaggagggcacctctgagtccgccacccccgagagcggccctggcacctccaccgagcccagcgagggcagcgcacccggcagccctgccggcagccccacctccacagaggagggaaccagcaccgagcccagcgaaggcagcgccccaggcaccagcaccgagcctagtgagggcggctctggcggcggcagcgcccaggagattaaacggatcaacaagatcagaagaagacttgtgaaagacagcaacaccaagaaggccggcaagacaggccccatgaaaaccctgctggttagagtgatgacacccgatctgagagagcggctggaaaacctgagaaagaagcctgaaaatatcccccagcccatcagcaatacatctagagccaacctgaataagctgctgaccgattacaccgaaatgaagaaggcgatcctgcatgtgtactgggaagagttccagaaggaccctgtgggcctgatgagccgggtggcccagcctgccagcaagaagatcgatcagaacaagctgaaacctgagatggacgagaagggcaacctgaccaccgccggctttgcctgctctcagtgtggccagcccctgttcgtgtacaagctggagcaggtgtctgagaagggcaaggcttacaccaactacttcggacggtgcaatgtggccgagcacgaaaagctgatcctgctggcccagctgaagcccgagaaggatagcgacgaagccgtgacatatagcctgggaaagtttgggcagagggccctggatttctacagcattcatgtgaccaaggagtccacccaccccgtgaagcccctggcccagatcgccggaaacagatacgcctccggacctgtgggaaaggccctgagcgacgcatgtatgggcacaatcgcctccttcctgtctaagtaccaggacatcatcatcgaacaccagaaggtggtgaagggcaaccagaagagactggagagcctgcgggagctggccggcaaggaaaacctggaataccctagcgtgaccctgccacctcagcctcacaccaaggagggcgttgatgcctacaacgaagtgatcgcccgggtgcgaatgtgggtgaacctgaacctgtggcagaagctgaagctaagcagagatgatgccaagcctctgctgagactgaagggattcccttcctttcctctggtcgagagacaggccaacgaagtggactggtgggacatggtgtgtaacgtgaagaagctgatcaacgagaaaaaggaggatggcaaggtgttttggcagaatctggctggctacaagagacaggaagccctgagaccatacctgagcagcgaggaagatcggaagaagggaaagaaattcgctcggtaccagctgggcgacctgctgctgcacctggaaaagaagcacggcgaggactggggaaaggtgtacgacgaggcctgggagcggattgacaagaaagtggaaggcctgagcaagcacatcaagctggaagaggaacggagaagcgaggacgcccagagcaaggccgccctgaccgactggctgcgggctaaggccagcttcgtgatcgagggcctgaaggaggccgacaaggacgagttctgcagatgcgagctgaagctgcagaagtggtacggggacctgcggggaaagcccttcgccatcgaagccgagaacagcatcctggacatcagcggcttcagcaagcagtacaactgtgccttcatctggcagaaggacggcgtgaagaagctgaacctgtacctgatcatcaactacttcaagggcggcaagctgcggttcaagaagatcaaacctgaagccttcgaagccaacagattctacaccgtgatcaacaaaaagagcggcgagatcgtgcccatggaggtgaacttcaacttcgacgaccccaacctgatcatcctgcctctggcctttggcaagagacagggcagagaattcatctggaacgacctgctgtccctggaaaccggcagcctgaagctggccaacggaagagtgatcgagaagacactgtacaacagaagaacccggcaggatgagcctgccctgttcgtggccctgaccttcgagcggcgggaggtcctggactcctccaatatcaaaccaatgaacctgatcggcgtggcaagaggcgaaaacatccccgccgtgatcgccctgaccgaccccgagggctgcccactgagccggtttaaggatagcctgggaaacccaacccacatcctgagaatcggcgagagctataaggagaagcagcggaccatccaggccaagaaggaggtggagcagcggagagccggcggctacagccggaagtacgccagcaaagccaagaatctggcagacgatatggtgagaaacaccgctagagatctgctgtactacgccgtgacccaggatgccatgctgatcttcgccaacctgagccggggcttcggccggcagggcaagcggaccttcatggccgagagacagtacacacggatggaggactggctgaccgccaagctggcctacgagggcctgagcaagacctacctgtccaagacactggcccagtacacctccaagacatgcagcaactgtgggtttaccatcaccagcgccgactacgacagggtgctggagaagctgaagaagacagcaacaggctggatgaccacaattaacggcaaggagctgaaggtggagggccagattacctactacaacagatacaagagacagaacgtagtcaaggacctgtccgtcgagctggatagactgagcgaagaatctgtgaacaacgacatctcctcctggacaaagggcagaagcggagaagctctgagcctcctgaagaaaagattctcccatagacccgtgcaggagaagttcgtgtgcctgaactgcggcttcgagacacacgcagccgagcaagccgccctgaacatcgccagatcctggctgttcctgcggagccaggagtacaagaaataccagacaaacaagacaaccggcaacaccgataagagagccttcgtcgagacctggcagtccttttaccggaagaagcttaaggaggtgtggaaacctgccgtgcggtctggcggatctggcggaggctccacaagcgaggagctgcccgtggtgttcgaggacgtggccgtgtacttcaccagggaggagtggggcgtgctggacaagaggcagaaggagctgtacagggacgtgatgaggatgaactacgagctgctggccagcctgggccccgccgccgccaagcccgacctgatcagcaagctggagaggagggccgccccctggatcaaggaccccaacggccccaagtggggcaagggcagggtgcccgcctgcaccagccccaagaaaaagagaaaagtctaagctgccttctgcggggcttgccttctggccatgcccttcttctctcccttgcacctgtacctcttggtctttgaataaagcctgagtaggaaggctagcaaaaaaaaaaaaaaaaaaaaaaaaaaaaaaaaaaaaaaaaaaaaaaaaaaaaaaaaaaaaaaaaaaaaaaaaaaaaaaaa

SEQ ID NO: 3360 - RNA, 5419 nt, synthetic construct
  source 1..5419: mol_type = other RNA
aggaaataagagagaaaagaagagtaagaagaaatataagagccaccatggcccctaagaagaagcgtaaagtgagccgggtgaacggcagcggcagcggcggcggcatgaaccacgaccaggagttcgacccccctaaggtgtaccctcccgtccccgccgagaagagaaagcccatccgggtcctgagcctgttcgatggcatcgccaccggtctgctggtgctgaaggacctgggcatccaggtggataggtacattgcctccgaggtgtgcgaggactccatcaccgtgggaatggtgcgtcatcagggcaagatcatgtacgtgggcgacgtgcggagcgtgacacagaagcatatccaggagtggggccctttcgacctggtgatcggcggcagcccttgcaatgacctgagcatcgtgaacccagcccggaagggcctgtacgagggaaccggcagactgttcttcgagttttacagactgctgcacgacgcccggcctaaggaaggcgacgaccggcccttcttttggctgttcgagaatgtggtggccatgggagtcagcgacaagcgggatattagccggttcctggagagcaaccccgtgatgatcgatgccaaggaagtgagcgccgcccaccgggccagatacttctggggcaatctgcctggcatgaacagacccctggccagcaccgtgaacgacaagctggagctgcaggagtgcctggagcacggccggatcgccaagttcagcaaggtgagaaccatcaccacccgaagcaacagcatcaaacaaggcaaggaccagcactttcctgtgttcatgaacgagaaggaggacatcctgtggtgtaccgagatggagagagtgttcgggttcccagtccactacacagatgtcagcaacatgtctagactggccagacagagactgctgggaagaagctggtccgtccctgtgatcagacacctgttcgcccctctgaaggagtacttcgcctgcgtgagcagcggcaacagcaacgccaacagccggggccccagcttctctagcggcctggtgccactgtccctgagagggagccacatgggccccatggagatctacaaaaccgtgagcgcctggaagcggcagcctgtgcgcgtgctgagcctgtttcggaatatcgataaagtcctgaaaagcctgggattcctggagagcggctctggctccggcggtggcaccctgaagtacgtggaggatgtgacaaacgtggtcagacgggatgtggagaagtggggccccttcgatctggtgtacggcagcacccaacccctgggcagctcttgtgaccggtgccctggctggtacatgtttcagttccaccggatcctgcagtacgccctgccgagacaggagtcccagcggccattcttttggattttcatggacaacttgctgctgaccgaggatgaccaggaaactaccactcggttcctgcagaccgaagccgtgaccctgcaggacgtgagaggccgggactaccagaacgccatgcgggtgtggtccaacatccctggactgaaaagcaagcacgcacctctgacccctaaagaagaggagtacctgcaggcccaggtgcggagcagaagcaagctggacgcccctaaggtggatctgctggtgaagaattgcctcctgcccctgagagagtacttcaagtatttcagccagaatagtctgcccctgggcggcccaagcagcggcgcccctcctcccagcggcggcagcccagccggctccccaacctctaccgaggagggcacctctgagtccgccacccccgagagcggccctggcacctccaccgagcccagcgagggcagcgcacccggcagccctgccggcagccccacctccacagaggagggaaccagcaccgagcccagcgaaggcagcgccccaggcaccagcaccgagcctagtgagggcggctctggcggcggcagcgcccaggagattaaacggatcaacaagatcagaagaagacttgtgaaagacagcaacaccaagaaggccggcaagacaggccccatgaaaaccctgctggttagagtgatgacacccgatctgagagagcggctggaaaacctgagaaagaagcctgaaaatatcccccagcccatcagcaatacatctagagccaacctgaataagctgctgaccgattacaccgaaatgaagaaggcgatcctgcatgtgtactgggaagagttccagaaggaccctgtgggcctgatgagccgggtggcccagcctgccagcaagaagatcgatcagaacaagctgaaacctgagatggacgagaagggcaacctgaccaccgccggctttgcctgctctcagtgtggccagcccctgttcgtgtacaagctggagcaggtgtctgagaagggcaaggcttacaccaactacttcggacggtgcaatgtggccgagcacgaaaagctgatcctgctggcccagctgaagcccgagaaggatagcgacgaagccgtgacatatagcctgggaaagtttgggcagagggccctggatttctacagcattcatgtgaccaaggagtccacccaccccgtgaagcccctggcccagatcgccggaaacagatacgcctccggacctgtgggaaaggccctgagcgacgcatgtatgggcacaatcgcctccttcctgtctaagtaccaggacatcatcatcgaacaccagaaggtggtgaagggcaaccagaagagactggagagcctgcgggagctggccggcaaggaaaacctggaataccctagcgtgaccctgccacctcagcctcacaccaaggagggcgttgatgcctacaacgaagtgatcgcccgggtgcgaatgtgggtgaacctgaacctgtggcagaagctgaagctaagcagagatgatgccaagcctctgctgagactgaagggattcccttcctttcctctggtcgagagacaggccaacgaagtggactggtgggacatggtgtgtaacgtgaagaagctgatcaacgagaaaaaggaggatggcaaggtgttttggcagaatctggctggctacaagagacaggaagccctgagaccatacctgagcagcgaggaagatcggaagaagggaaagaaattcgctcggtaccagctgggcgacctgctgctgcacctggaaaagaagcacggcgaggactggggaaaggtgtacgacgaggcctgggagcggattgacaagaaagtggaaggcctgagcaagcacatcaagctggaagaggaacggagaagcgaggacgcccagagcaaggccgccctgaccgactggctgcgggctaaggccagcttcgtgatcgagggcctgaaggaggccgacaaggacgagttctgcagatgcgagctgaagctgcagaagtggtacggggacctgcggggaaagcccttcgccatcgaagccgagaacagcatcctggacatcagcggcttcagcaagcagtacaactgtgccttcatctggcagaaggacggcgtgaagaagctgaacctgtacctgatcatcaactacttcaagggcggcaagctgcggttcaagaagatcaaacctgaagccttcgaagccaacagattctacaccgtgatcaacaaaaagagcggcgagatcgtgcccatggaggtgaacttcaacttcgacgaccccaacctgatcatcctgcctctggcctttggcaagagacagggcagagaattcatctggaacgacctgctgtccctggaaaccggcagcctgaagctggccaacggaagagtgatcgagaagacactgtacaacagaagaacccggcaggatgagcctgccctgttcgtggccctgaccttcgagcggcgggaggtcctggactcctccaatatcaaaccaatgaacctgatcggcgtggcaagaggcgaaaacatccccgccgtgatcgccctgaccgaccccgagggctgcccactgagccggtttaaggatagcctgggaaacccaacccacatcctgagaatcggcgagagctataaggagaagcagcggaccatccaggccaagaaggaggtggagcagcggagagccggcggctacagccggaagtacgccagcaaagccaagaatctggcagacgatatggtgagaaacaccgctagagatctgctgtactacgccgtgacccaggatgccatgctgatcttcgccaacctgagccggggcttcggccggcagggcaagcggaccttcatggccgagagacagtacacacggatggaggactggctgaccgccaagctggcctacgagggcctgagcaagacctacctgtccaagacactggcccagtacacctccaagacatgcagcaactgtgggtttaccatcaccagcgccgactacgacagggtgctggagaagctgaagaagacagcaacaggctggatgaccacaattaacggcaaggagctgaaggtggagggccagattacctactacaacagatacaagagacagaacgtagtcaaggacctgtccgtcgagctggatagactgagcgaagaatctgtgaacaacgacatctcctcctggacaaagggcagaagcggagaagctctgagcctcctgaagaaaagattctcccatagacccgtgcaggagaagttcgtgtgcctgaactgcggcttcgagacacacgcagccgagcaagccgccctgaacatcgccagatcctggctgttcctgcggagccaggagtacaagaaataccagacaaacaagacaaccggcaacaccgataagagagccttcgtcgagacctggcagtccttttaccggaagaagcttaaggaggtgtggaaacctgccgtgcggtctggcggatctggcggaggctccacaagcagccaggacctggtgaccttcaaggacgtggccatcgacttcagccaggaggagtggcagtggatgaaccccgcccagaagaggctgtacaggagcatgatgctggagaactaccagagcctggtgagcctgggcctgtgcgtgagcaagccctacgtgatcagcctgctggagcagggcagggagccctgggagatgaccagcgagatgaccaggagccccttcagcgactgggagagcatcaccagccccaagaaaaagagaaaagtctaagctgccttctgcggggcttgccttctggccatgcccttcttctctcccttgcacctgtacctcttggtctttgaataaagcctgagtaggaaggctagcaaaaaaaaaaaaaaaaaaaaaaaaaaaaaaaaaaaaaaaaaaaaaaaaaaaaaaaaaaaaaaaaaaaaaaaaaaaaaaaa

SEQ ID NO: 3361 - RNA, 5419 nt, synthetic construct
  source 1..5419: mol_type = other RNA
aggaaataagagagaaaagaagagtaagaagaaatataagagccaccatggcccctaagaagaagcgtaaagtgagccgggtgaacggcagcggcagcggcggcggcatgaaccacgaccaggagttcgacccccctaaggtgtaccctcccgtccccgccgagaagagaaagcccatccgggtcctgagcctgttcgatggcatcgccaccggtctgctggtgctgaaggacctgggcatccaggtggataggtacattgcctccgaggtgtgcgaggactccatcaccgtgggaatggtgcgtcatcagggcaagatcatgtacgtgggcgacgtgcggagcgtgacacagaagcatatccaggagtggggccctttcgacctggtgatcggcggcagcccttgcaatgacctgagcatcgtgaacccagcccggaagggcctgtacgagggaaccggcagactgttcttcgagttttacagactgctgcacgacgcccggcctaaggaaggcgacgaccggcccttcttttggctgttcgagaatgtggtggccatgggagtcagcgacaagcgggatattagccggttcctggagagcaaccccgtgatgatcgatgccaaggaagtgagcgccgcccaccgggccagatacttctggggcaatctgcctggcatgaacagacccctggccagcaccgtgaacgacaagctggagctgcaggagtgcctggagcacggccggatcgccaagttcagcaaggtgagaaccatcaccacccgaagcaacagcatcaaacaaggcaaggaccagcactttcctgtgttcatgaacgagaaggaggacatcctgtggtgtaccgagatggagagagtgttcgggttcccagtccactacacagatgtcagcaacatgtctagactggccagacagagactgctgggaagaagctggtccgtccctgtgatcagacacctgttcgcccctctgaaggagtacttcgcctgcgtgagcagcggcaacagcaacgccaacagccggggccccagcttctctagcggcctggtgccactgtccctgagagggagccacatgggccccatggagatctacaaaaccgtgagcgcctggaagcggcagcctgtgcgcgtgctgagcctgtttcggaatatcgataaagtcctgaaaagcctgggattcctggagagcggctctggctccggcggtggcaccctgaagtacgtggaggatgtgacaaacgtggtcagacgggatgtggagaagtggggccccttcgatctggtgtacggcagcacccaacccctgggcagctcttgtgaccggtgccctggctggtacatgtttcagttccaccggatcctgcagtacgccctgccgagacaggagtcccagcggccattcttttggattttcatggacaacttgctgctgaccgaggatgaccaggaaactaccactcggttcctgcagaccgaagccgtgaccctgcaggacgtgagaggccgggactaccagaacgccatgcgggtgtggtccaacatccctggactgaaaagcaagcacgcacctctgacccctaaagaagaggagtacctgcaggcccaggtgcggagcagaagcaagctggacgcccctaaggtggatctgctggtgaagaattgcctcctgcccctgagagagtacttcaagtatttcagccagaatagtctgcccctgggcggcccaagcagcggcgcccctcctcccagcggcggcagcccagccggctccccaacctctaccgaggagggcacctctgagtccgccacccccgagagcggccctggcacctccaccgagcccagcgagggcagcgcacccggcagccctgccggcagccccacctccacagaggagggaaccagcaccgagcccagcgaaggcagcgccccaggcaccagcaccgagcctagtgagggcggctctggcggcggcagcgcccaggagattaaacggatcaacaagatcagaagaagacttgtgaaagacagcaacaccaagaaggccggcaagacaggccccatgaaaaccctgctggttagagtgatgacacccgatctgagagagcggctggaaaacctgagaaagaagcctgaaaatatcccccagcccatcagcaatacatctagagccaacctgaataagctgctgaccgattacaccgaaatgaagaaggcgatcctgcatgtgtactgggaagagttccagaaggaccctgtgggcctgatgagccgggtggcccagcctgccagcaagaagatcgatcagaacaagctgaaacctgagatggacgagaagggcaacctgaccaccgccggctttgcctgctctcagtgtggccagcccctgttcgtgtacaagctggagcaggtgtctgagaagggcaaggcttacaccaactacttcggacggtgcaatgtggccgagcacgaaaagctgatcctgctggcccagctgaagcccgagaaggatagcgacgaagccgtgacatatagcctgggaaagtttgggcagagggccctggatttctacagcattcatgtgaccaaggagtccacccaccccgtgaagcccctggcccagatcgccggaaacagatacgcctccggacctgtgggaaaggccctgagcgacgcatgtatgggcacaatcgcctccttcctgtctaagtaccaggacatcatcatcgaacaccagaaggtggtgaagggcaaccagaagagactggagagcctgcgggagctggccggcaaggaaaacctggaataccctagcgtgaccctgccacctcagcctcacaccaaggagggcgttgatgcctacaacgaagtgatcgcccgggtgcgaatgtgggtgaacctgaacctgtggcagaagctgaagctaagcagagatgatgccaagcctctgctgagactgaagggattcccttcctttcctctggtcgagagacaggccaacgaagtggactggtgggacatggtgtgtaacgtgaagaagctgatcaacgagaaaaaggaggatggcaaggtgttttggcagaatctggctggctacaagagacaggaagccctgagaccatacctgagcagcgaggaagatcggaagaagggaaagaaattcgctcggtaccagctgggcgacctgctgctgcacctggaaaagaagcacggcgaggactggggaaaggtgtacgacgaggcctgggagcggattgacaagaaagtggaaggcctgagcaagcacatcaagctggaagaggaacggagaagcgaggacgcccagagcaaggccgccctgaccgactggctgcgggctaaggccagcttcgtgatcgagggcctgaaggaggccgacaaggacgagttctgcagatgcgagctgaagctgcagaagtggtacggggacctgcggggaaagcccttcgccatcgaagccgagaacagcatcctggacatcagcggcttcagcaagcagtacaactgtgccttcatctggcagaaggacggcgtgaagaagctgaacctgtacctgatcatcaactacttcaagggcggcaagctgcggttcaagaagatcaaacctgaagccttcgaagccaacagattctacaccgtgatcaacaaaaagagcggcgagatcgtgcccatggaggtgaacttcaacttcgacgaccccaacctgatcatcctgcctctggcctttggcaagagacagggcagagaattcatctggaacgacctgctgtccctggaaaccggcagcctgaagctggccaacggaagagtgatcgagaagacactgtacaacagaagaacccggcaggatgagcctgccctgttcgtggccctgaccttcgagcggcgggaggtcctggactcctccaatatcaaaccaatgaacctgatcggcgtggcaagaggcgaaaacatccccgccgtgatcgccctgaccgaccccgagggctgcccactgagccggtttaaggatagcctgggaaacccaacccacatcctgagaatcggcgagagctataaggagaagcagcggaccatccaggccaagaaggaggtggagcagcggagagccggcggctacagccggaagtacgccagcaaagccaagaatctggcagacgatatggtgagaaacaccgctagagatctgctgtactacgccgtgacccaggatgccatgctgatcttcgccaacctgagccggggcttcggccggcagggcaagcggaccttcatggccgagagacagtacacacggatggaggactggctgaccgccaagctggcctacgagggcctgagcaagacctacctgtccaagacactggcccagtacacctccaagacatgcagcaactgtgggtttaccatcaccagcgccgactacgacagggtgctggagaagctgaagaagacagcaacaggctggatgaccacaattaacggcaaggagctgaaggtggagggccagattacctactacaacagatacaagagacagaacgtagtcaaggacctgtccgtcgagctggatagactgagcgaagaatctgtgaacaacgacatctcctcctggacaaagggcagaagcggagaagctctgagcctcctgaagaaaagattctcccatagacccgtgcaggagaagttcgtgtgcctgaactgcggcttcgagacacacgcagccgagcaagccgccctgaacatcgccagatcctggctgttcctgcggagccaggagtacaagaaataccagacaaacaagacaaccggcaacaccgataagagagccttcgtcgagacctggcagtccttttaccggaagaagcttaaggaggtgtggaaacctgccgtgcggtctggcggatctggcggaggctccacaagcagcgaggagaccgtgaccttcaaggacgtggccgtggacttcacctgggaggagtggaagcagctgacccccgtgcagagggacctgtacagggacgtgatgctggagaactaccagaacctggtgagcctgggcctgcccgtgttccagagcgacctgatcagccagctggagaggggcgaggtgccctggatccccgagggcgagaccttcaggggcccctgccccggcagcatcaaccagaccagccccaagaaaaagagaaaagtctaagctgccttctgcggggcttgccttctggccatgcccttcttctctcccttgcacctgtacctcttggtctttgaataaagcctgagtaggaaggctagcaaaaaaaaaaaaaaaaaaaaaaaaaaaaaaaaaaaaaaaaaaaaaaaaaaaaaaaaaaaaaaaaaaaaaaaaaaaaaaaa

SEQ ID NO: 3362 - RNA, 5419 nt, synthetic construct
  source 1..5419: mol_type = other RNA
aggaaataagagagaaaagaagagtaagaagaaatataagagccaccatggcccctaagaagaagcgtaaagtgagccgggtgaacggcagcggcagcggcggcggcatgaaccacgaccaggagttcgacccccctaaggtgtaccctcccgtccccgccgagaagagaaagcccatccgggtcctgagcctgttcgatggcatcgccaccggtctgctggtgctgaaggacctgggcatccaggtggataggtacattgcctccgaggtgtgcgaggactccatcaccgtgggaatggtgcgtcatcagggcaagatcatgtacgtgggcgacgtgcggagcgtgacacagaagcatatccaggagtggggccctttcgacctggtgatcggcggcagcccttgcaatgacctgagcatcgtgaacccagcccggaagggcctgtacgagggaaccggcagactgttcttcgagttttacagactgctgcacgacgcccggcctaaggaaggcgacgaccggcccttcttttggctgttcgagaatgtggtggccatgggagtcagcgacaagcgggatattagccggttcctggagagcaaccccgtgatgatcgatgccaaggaagtgagcgccgcccaccgggccagatacttctggggcaatctgcctggcatgaacagacccctggccagcaccgtgaacgacaagctggagctgcaggagtgcctggagcacggccggatcgccaagttcagcaaggtgagaaccatcaccacccgaagcaacagcatcaaacaaggcaaggaccagcactttcctgtgttcatgaacgagaaggaggacatcctgtggtgtaccgagatggagagagtgttcgggttcccagtccactacacagatgtcagcaacatgtctagactggccagacagagactgctgggaagaagctggtccgtccctgtgatcagacacctgttcgcccctctgaaggagtacttcgcctgcgtgagcagcggcaacagcaacgccaacagccggggccccagcttctctagcggcctggtgccactgtccctgagagggagccacatgggccccatggagatctacaaaaccgtgagcgcctggaagcggcagcctgtgcgcgtgctgagcctgtttcggaatatcgataaagtcctgaaaagcctgggattcctggagagcggctctggctccggcggtggcaccctgaagtacgtggaggatgtgacaaacgtggtcagacgggatgtggagaagtggggccccttcgatctggtgtacggcagcacccaacccctgggcagctcttgtgaccggtgccctggctggtacatgtttcagttccaccggatcctgcagtacgccctgccgagacaggagtcccagcggccattcttttggattttcatggacaacttgctgctgaccgaggatgaccaggaaactaccactcggttcctgcagaccgaagccgtgaccctgcaggacgtgagaggccgggactaccagaacgccatgcgggtgtggtccaacatccctggactgaaaagcaagcacgcacctctgacccctaaagaagaggagtacctgcaggcccaggtgcggagcagaagcaagctggacgcccctaaggtggatctgctggtgaagaattgcctcctgcccctgagagagtacttcaagtatttcagccagaatagtctgcccctgggcggcccaagcagcggcgcccctcctcccagcggcggcagcccagccggctccccaacctctaccgaggagggcacctctgagtccgccacccccgagagcggccctggcacctccaccgagcccagcgagggcagcgcacccggcagccctgccggcagccccacctccacagaggagggaaccagcaccgagcccagcgaaggcagcgccccaggcaccagcaccgagcctagtgagggcggctctggcggcggcagcgcccaggagattaaacggatcaacaagatcagaagaagacttgtgaaagacagcaacaccaagaaggccggcaagacaggccccatgaaaaccctgctggttagagtgatgacacccgatctgagagagcggctggaaaacctgagaaagaagcctgaaaatatcccccagcccatcagcaatacatctagagccaacctgaataagctgctgaccgattacaccgaaatgaagaaggcgatcctgcatgtgtactgggaagagttccagaaggaccctgtgggcctgatgagccgggtggcccagcctgccagcaagaagatcgatcagaacaagctgaaacctgagatggacgagaagggcaacctgaccaccgccggctttgcctgctctcagtgtggccagcccctgttcgtgtacaagctggagcaggtgtctgagaagggcaaggcttacaccaactacttcggacggtgcaatgtggccgagcacgaaaagctgatcctgctggcccagctgaagcccgagaaggatagcgacgaagccgtgacatatagcctgggaaagtttgggcagagggccctggatttctacagcattcatgtgaccaaggagtccacccaccccgtgaagcccctggcccagatcgccggaaacagatacgcctccggacctgtgggaaaggccctgagcgacgcatgtatgggcacaatcgcctccttcctgtctaagtaccaggacatcatcatcgaacaccagaaggtggtgaagggcaaccagaagagactggagagcctgcgggagctggccggcaaggaaaacctggaataccctagcgtgaccctgccacctcagcctcacaccaaggagggcgttgatgcctacaacgaagtgatcgcccgggtgcgaatgtgggtgaacctgaacctgtggcagaagctgaagctaagcagagatgatgccaagcctctgctgagactgaagggattcccttcctttcctctggtcgagagacaggccaacgaagtggactggtgggacatggtgtgtaacgtgaagaagctgatcaacgagaaaaaggaggatggcaaggtgttttggcagaatctggctggctacaagagacaggaagccctgagaccatacctgagcagcgaggaagatcggaagaagggaaagaaattcgctcggtaccagctgggcgacctgctgctgcacctggaaaagaagcacggcgaggactggggaaaggtgtacgacgaggcctgggagcggattgacaagaaagtggaaggcctgagcaagcacatcaagctggaagaggaacggagaagcgaggacgcccagagcaaggccgccctgaccgactggctgcgggctaaggccagcttcgtgatcgagggcctgaaggaggccgacaaggacgagttctgcagatgcgagctgaagctgcagaagtggtacggggacctgcggggaaagcccttcgccatcgaagccgagaacagcatcctggacatcagcggcttcagcaagcagtacaactgtgccttcatctggcagaaggacggcgtgaagaagctgaacctgtacctgatcatcaactacttcaagggcggcaagctgcggttcaagaagatcaaacctgaagccttcgaagccaacagattctacaccgtgatcaacaaaaagagcggcgagatcgtgcccatggaggtgaacttcaacttcgacgaccccaacctgatcatcctgcctctggcctttggcaagagacagggcagagaattcatctggaacgacctgctgtccctggaaaccggcagcctgaagctggccaacggaagagtgatcgagaagacactgtacaacagaagaacccggcaggatgagcctgccctgttcgtggccctgaccttcgagcggcgggaggtcctggactcctccaatatcaaaccaatgaacctgatcggcgtggcaagaggcgaaaacatccccgccgtgatcgccctgaccgaccccgagggctgcccactgagccggtttaaggatagcctgggaaacccaacccacatcctgagaatcggcgagagctataaggagaagcagcggaccatccaggccaagaaggaggtggagcagcggagagccggcggctacagccggaagtacgccagcaaagccaagaatctggcagacgatatggtgagaaacaccgctagagatctgctgtactacgccgtgacccaggatgccatgctgatcttcgccaacctgagccggggcttcggccggcagggcaagcggaccttcatggccgagagacagtacacacggatggaggactggctgaccgccaagctggcctacgagggcctgagcaagacctacctgtccaagacactggcccagtacacctccaagacatgcagcaactgtgggtttaccatcaccagcgccgactacgacagggtgctggagaagctgaagaagacagcaacaggctggatgaccacaattaacggcaaggagctgaaggtggagggccagattacctactacaacagatacaagagacagaacgtagtcaaggacctgtccgtcgagctggatagactgagcgaagaatctgtgaacaacgacatctcctcctggacaaagggcagaagcggagaagctctgagcctcctgaagaaaagattctcccatagacccgtgcaggagaagttcgtgtgcctgaactgcggcttcgagacacacgcagccgagcaagccgccctgaacatcgccagatcctggctgttcctgcggagccaggagtacaagaaataccagacaaacaagacaaccggcaacaccgataagagagccttcgtcgagacctggcagtccttttaccggaagaagcttaaggaggtgtggaaacctgccgtgcggtctggcggatctggcggaggctccacaagcttccaggaggccgtgaccttcaaggacgtggccgtggccttcaccgaggaggagctgggcctgctggacagcgcccagaggaagctgtacagggaggtgatgctggagaacttcaggaacctggtgagcgtgggccaccagagcttcaagcccgagatgatcagccagctggagagggaggagaagctgtgggtgaaggagatccagacccagatgggcaggtgcaggggcggcaggaaccagaccagccccaagaaaaagagaaaagtctaagctgccttctgcggggcttgccttctggccatgcccttcttctctcccttgcacctgtacctcttggtctttgaataaagcctgagtaggaaggctagcaaaaaaaaaaaaaaaaaaaaaaaaaaaaaaaaaaaaaaaaaaaaaaaaaaaaaaaaaaaaaaaaaaaaaaaaaaaaaaaa

SEQ ID NO: 3363 - RNA, 5419 nt, synthetic construct
  source 1..5419: mol_type = other RNA
aggaaataagagagaaaagaagagtaagaagaaatataagagccaccatggcccctaagaagaagcgtaaagtgagccgggtgaacggcagcggcagcggcggcggcatgaaccacgaccaggagttcgacccccctaaggtgtaccctcccgtccccgccgagaagagaaagcccatccgggtcctgagcctgttcgatggcatcgccaccggtctgctggtgctgaaggacctgggcatccaggtggataggtacattgcctccgaggtgtgcgaggactccatcaccgtgggaatggtgcgtcatcagggcaagatcatgtacgtgggcgacgtgcggagcgtgacacagaagcatatccaggagtggggccctttcgacctggtgatcggcggcagcccttgcaatgacctgagcatcgtgaacccagcccggaagggcctgtacgagggaaccggcagactgttcttcgagttttacagactgctgcacgacgcccggcctaaggaaggcgacgaccggcccttcttttggctgttcgagaatgtggtggccatgggagtcagcgacaagcgggatattagccggttcctggagagcaaccccgtgatgatcgatgccaaggaagtgagcgccgcccaccgggccagatacttctggggcaatctgcctggcatgaacagacccctggccagcaccgtgaacgacaagctggagctgcaggagtgcctggagcacggccggatcgccaagttcagcaaggtgagaaccatcaccacccgaagcaacagcatcaaacaaggcaaggaccagcactttcctgtgttcatgaacgagaaggaggacatcctgtggtgtaccgagatggagagagtgttcgggttcccagtccactacacagatgtcagcaacatgtctagactggccagacagagactgctgggaagaagctggtccgtccctgtgatcagacacctgttcgcccctctgaaggagtacttcgcctgcgtgagcagcggcaacagcaacgccaacagccggggccccagcttctctagcggcctggtgccactgtccctgagagggagccacatgggccccatggagatctacaaaaccgtgagcgcctggaagcggcagcctgtgcgcgtgctgagcctgtttcggaatatcgataaagtcctgaaaagcctgggattcctggagagcggctctggctccggcggtggcaccctgaagtacgtggaggatgtgacaaacgtggtcagacgggatgtggagaagtggggccccttcgatctggtgtacggcagcacccaacccctgggcagctcttgtgaccggtgccctggctggtacatgtttcagttccaccggatcctgcagtacgccctgccgagacaggagtcccagcggccattcttttggattttcatggacaacttgctgctgaccgaggatgaccaggaaactaccactcggttcctgcagaccgaagccgtgaccctgcaggacgtgagaggccgggactaccagaacgccatgcgggtgtggtccaacatccctggactgaaaagcaagcacgcacctctgacccctaaagaagaggagtacctgcaggcccaggtgcggagcagaagcaagctggacgcccctaaggtggatctgctggtgaagaattgcctcctgcccctgagagagtacttcaagtatttcagccagaatagtctgcccctgggcggcccaagcagcggcgcccctcctcccagcggcggcagcccagccggctccccaacctctaccgaggagggcacctctgagtccgccacccccgagagcggccctggcacctccaccgagcccagcgagggcagcgcacccggcagccctgccggcagccccacctccacagaggagggaaccagcaccgagcccagcgaaggcagcgccccaggcaccagcaccgagcctagtgagggcggctctggcggcggcagcgcccaggagattaaacggatcaacaagatcagaagaagacttgtgaaagacagcaacaccaagaaggccggcaagacaggccccatgaaaaccctgctggttagagtgatgacacccgatctgagagagcggctggaaaacctgagaaagaagcctgaaaatatcccccagcccatcagcaatacatctagagccaacctgaataagctgctgaccgattacaccgaaatgaagaaggcgatcctgcatgtgtactgggaagagttccagaaggaccctgtgggcctgatgagccgggtggcccagcctgccagcaagaagatcgatcagaacaagctgaaacctgagatggacgagaagggcaacctgaccaccgccggctttgcctgctctcagtgtggccagcccctgttcgtgtacaagctggagcaggtgtctgagaagggcaaggcttacaccaactacttcggacggtgcaatgtggccgagcacgaaaagctgatcctgctggcccagctgaagcccgagaaggatagcgacgaagccgtgacatatagcctgggaaagtttgggcagagggccctggatttctacagcattcatgtgaccaaggagtccacccaccccgtgaagcccctggcccagatcgccggaaacagatacgcctccggacctgtgggaaaggccctgagcgacgcatgtatgggcacaatcgcctccttcctgtctaagtaccaggacatcatcatcgaacaccagaaggtggtgaagggcaaccagaagagactggagagcctgcgggagctggccggcaaggaaaacctggaataccctagcgtgaccctgccacctcagcctcacaccaaggagggcgttgatgcctacaacgaagtgatcgcccgggtgcgaatgtgggtgaacctgaacctgtggcagaagctgaagctaagcagagatgatgccaagcctctgctgagactgaagggattcccttcctttcctctggtcgagagacaggccaacgaagtggactggtgggacatggtgtgtaacgtgaagaagctgatcaacgagaaaaaggaggatggcaaggtgttttggcagaatctggctggctacaagagacaggaagccctgagaccatacctgagcagcgaggaagatcggaagaagggaaagaaattcgctcggtaccagctgggcgacctgctgctgcacctggaaaagaagcacggcgaggactggggaaaggtgtacgacgaggcctgggagcggattgacaagaaagtggaaggcctgagcaagcacatcaagctggaagaggaacggagaagcgaggacgcccagagcaaggccgccctgaccgactggctgcgggctaaggccagcttcgtgatcgagggcctgaaggaggccgacaaggacgagttctgcagatgcgagctgaagctgcagaagtggtacggggacctgcggggaaagcccttcgccatcgaagccgagaacagcatcctggacatcagcggcttcagcaagcagtacaactgtgccttcatctggcagaaggacggcgtgaagaagctgaacctgtacctgatcatcaactacttcaagggcggcaagctgcggttcaagaagatcaaacctgaagccttcgaagccaacagattctacaccgtgatcaacaaaaagagcggcgagatcgtgcccatggaggtgaacttcaacttcgacgaccccaacctgatcatcctgcctctggcctttggcaagagacagggcagagaattcatctggaacgacctgctgtccctggaaaccggcagcctgaagctggccaacggaagagtgatcgagaagacactgtacaacagaagaacccggcaggatgagcctgccctgttcgtggccctgaccttcgagcggcgggaggtcctggactcctccaatatcaaaccaatgaacctgatcggcgtggcaagaggcgaaaacatccccgccgtgatcgccctgaccgaccccgagggctgcccactgagccggtttaaggatagcctgggaaacccaacccacatcctgagaatcggcgagagctataaggagaagcagcggaccatccaggccaagaaggaggtggagcagcggagagccggcggctacagccggaagtacgccagcaaagccaagaatctggcagacgatatggtgagaaacaccgctagagatctgctgtactacgccgtgacccaggatgccatgctgatcttcgccaacctgagccggggcttcggccggcagggcaagcggaccttcatggccgagagacagtacacacggatggaggactggctgaccgccaagctggcctacgagggcctgagcaagacctacctgtccaagacactggcccagtacacctccaagacatgcagcaactgtgggtttaccatcaccagcgccgactacgacagggtgctggagaagctgaagaagacagcaacaggctggatgaccacaattaacggcaaggagctgaaggtggagggccagattacctactacaacagatacaagagacagaacgtagtcaaggacctgtccgtcgagctggatagactgagcgaagaatctgtgaacaacgacatctcctcctggacaaagggcagaagcggagaagctctgagcctcctgaagaaaagattctcccatagacccgtgcaggagaagttcgtgtgcctgaactgcggcttcgagacacacgcagccgagcaagccgccctgaacatcgccagatcctggctgttcctgcggagccaggagtacaagaaataccagacaaacaagacaaccggcaacaccgataagagagccttcgtcgagacctggcagtccttttaccggaagaagcttaaggaggtgtggaaacctgccgtgcggtctggcggatctggcggaggctccacaagccaggccagcgtgaccttcgaggacgtggccgtgaggttcacccaggaggagtgggccctgctggaccccagccagaagatcctgtacggcgacgtgatgcaggagacctacaggaacctgaccagcgtgggcatcaactgggagtgctgggacctggaggcctacttcaggagcctggagaggaacctgagggtgcagctggtgaagagggactgcgagctgaagaacaacgacccctgcggcaccagccccaagaaaaagagaaaagtctaagctgccttctgcggggcttgccttctggccatgcccttcttctctcccttgcacctgtacctcttggtctttgaataaagcctgagtaggaaggctagcaaaaaaaaaaaaaaaaaaaaaaaaaaaaaaaaaaaaaaaaaaaaaaaaaaaaaaaaaaaaaaaaaaaaaaaaaaaaaaaa

SEQ ID NO: 3364 - RNA, 5419 nt, synthetic construct
  source 1..5419: mol_type = other RNA
aggaaataagagagaaaagaagagtaagaagaaatataagagccaccatggcccctaagaagaagcgtaaagtgagccgggtgaacggcagcggcagcggcggcggcatgaaccacgaccaggagttcgacccccctaaggtgtaccctcccgtccccgccgagaagagaaagcccatccgggtcctgagcctgttcgatggcatcgccaccggtctgctggtgctgaaggacctgggcatccaggtggataggtacattgcctccgaggtgtgcgaggactccatcaccgtgggaatggtgcgtcatcagggcaagatcatgtacgtgggcgacgtgcggagcgtgacacagaagcatatccaggagtggggccctttcgacctggtgatcggcggcagcccttgcaatgacctgagcatcgtgaacccagcccggaagggcctgtacgagggaaccggcagactgttcttcgagttttacagactgctgcacgacgcccggcctaaggaaggcgacgaccggcccttcttttggctgttcgagaatgtggtggccatgggagtcagcgacaagcgggatattagccggttcctggagagcaaccccgtgatgatcgatgccaaggaagtgagcgccgcccaccgggccagatacttctggggcaatctgcctggcatgaacagacccctggccagcaccgtgaacgacaagctggagctgcaggagtgcctggagcacggccggatcgccaagttcagcaaggtgagaaccatcaccacccgaagcaacagcatcaaacaaggcaaggaccagcactttcctgtgttcatgaacgagaaggaggacatcctgtggtgtaccgagatggagagagtgttcgggttcccagtccactacacagatgtcagcaacatgtctagactggccagacagagactgctgggaagaagctggtccgtccctgtgatcagacacctgttcgcccctctgaaggagtacttcgcctgcgtgagcagcggcaacagcaacgccaacagccggggccccagcttctctagcggcctggtgccactgtccctgagagggagccacatgggccccatggagatctacaaaaccgtgagcgcctggaagcggcagcctgtgcgcgtgctgagcctgtttcggaatatcgataaagtcctgaaaagcctgggattcctggagagcggctctggctccggcggtggcaccctgaagtacgtggaggatgtgacaaacgtggtcagacgggatgtggagaagtggggccccttcgatctggtgtacggcagcacccaacccctgggcagctcttgtgaccggtgccctggctggtacatgtttcagttccaccggatcctgcagtacgccctgccgagacaggagtcccagcggccattcttttggattttcatggacaacttgctgctgaccgaggatgaccaggaaactaccactcggttcctgcagaccgaagccgtgaccctgcaggacgtgagaggccgggactaccagaacgccatgcgggtgtggtccaacatccctggactgaaaagcaagcacgcacctctgacccctaaagaagaggagtacctgcaggcccaggtgcggagcagaagcaagctggacgcccctaaggtggatctgctggtgaagaattgcctcctgcccctgagagagtacttcaagtatttcagccagaatagtctgcccctgggcggcccaagcagcggcgcccctcctcccagcggcggcagcccagccggctccccaacctctaccgaggagggcacctctgagtccgccacccccgagagcggccctggcacctccaccgagcccagcgagggcagcgcacccggcagccctgccggcagccccacctccacagaggagggaaccagcaccgagcccagcgaaggcagcgccccaggcaccagcaccgagcctagtgagggcggctctggcggcggcagcgcccaggagattaaacggatcaacaagatcagaagaagacttgtgaaagacagcaacaccaagaaggccggcaagacaggccccatgaaaaccctgctggttagagtgatgacacccgatctgagagagcggctggaaaacctgagaaagaagcctgaaaatatcccccagcccatcagcaatacatctagagccaacctgaataagctgctgaccgattacaccgaaatgaagaaggcgatcctgcatgtgtactgggaagagttccagaaggaccctgtgggcctgatgagccgggtggcccagcctgccagcaagaagatcgatcagaacaagctgaaacctgagatggacgagaagggcaacctgaccaccgccggctttgcctgctctcagtgtggccagcccctgttcgtgtacaagctggagcaggtgtctgagaagggcaaggcttacaccaactacttcggacggtgcaatgtggccgagcacgaaaagctgatcctgctggcccagctgaagcccgagaaggatagcgacgaagccgtgacatatagcctgggaaagtttgggcagagggccctggatttctacagcattcatgtgaccaaggagtccacccaccccgtgaagcccctggcccagatcgccggaaacagatacgcctccggacctgtgggaaaggccctgagcgacgcatgtatgggcacaatcgcctccttcctgtctaagtaccaggacatcatcatcgaacaccagaaggtggtgaagggcaaccagaagagactggagagcctgcgggagctggccggcaaggaaaacctggaataccctagcgtgaccctgccacctcagcctcacaccaaggagggcgttgatgcctacaacgaagtgatcgcccgggtgcgaatgtgggtgaacctgaacctgtggcagaagctgaagctaagcagagatgatgccaagcctctgctgagactgaagggattcccttcctttcctctggtcgagagacaggccaacgaagtggactggtgggacatggtgtgtaacgtgaagaagctgatcaacgagaaaaaggaggatggcaaggtgttttggcagaatctggctggctacaagagacaggaagccctgagaccatacctgagcagcgaggaagatcggaagaagggaaagaaattcgctcggtaccagctgggcgacctgctgctgcacctggaaaagaagcacggcgaggactggggaaaggtgtacgacgaggcctgggagcggattgacaagaaagtggaaggcctgagcaagcacatcaagctggaagaggaacggagaagcgaggacgcccagagcaaggccgccctgaccgactggctgcgggctaaggccagcttcgtgatcgagggcctgaaggaggccgacaaggacgagttctgcagatgcgagctgaagctgcagaagtggtacggggacctgcggggaaagcccttcgccatcgaagccgagaacagcatcctggacatcagcggcttcagcaagcagtacaactgtgccttcatctggcagaaggacggcgtgaagaagctgaacctgtacctgatcatcaactacttcaagggcggcaagctgcggttcaagaagatcaaacctgaagccttcgaagccaacagattctacaccgtgatcaacaaaaagagcggcgagatcgtgcccatggaggtgaacttcaacttcgacgaccccaacctgatcatcctgcctctggcctttggcaagagacagggcagagaattcatctggaacgacctgctgtccctggaaaccggcagcctgaagctggccaacggaagagtgatcgagaagacactgtacaacagaagaacccggcaggatgagcctgccctgttcgtggccctgaccttcgagcggcgggaggtcctggactcctccaatatcaaaccaatgaacctgatcggcgtggcaagaggcgaaaacatccccgccgtgatcgccctgaccgaccccgagggctgcccactgagccggtttaaggatagcctgggaaacccaacccacatcctgagaatcggcgagagctataaggagaagcagcggaccatccaggccaagaaggaggtggagcagcggagagccggcggctacagccggaagtacgccagcaaagccaagaatctggcagacgatatggtgagaaacaccgctagagatctgctgtactacgccgtgacccaggatgccatgctgatcttcgccaacctgagccggggcttcggccggcagggcaagcggaccttcatggccgagagacagtacacacggatggaggactggctgaccgccaagctggcctacgagggcctgagcaagacctacctgtccaagacactggcccagtacacctccaagacatgcagcaactgtgggtttaccatcaccagcgccgactacgacagggtgctggagaagctgaagaagacagcaacaggctggatgaccacaattaacggcaaggagctgaaggtggagggccagattacctactacaacagatacaagagacagaacgtagtcaaggacctgtccgtcgagctggatagactgagcgaagaatctgtgaacaacgacatctcctcctggacaaagggcagaagcggagaagctctgagcctcctgaagaaaagattctcccatagacccgtgcaggagaagttcgtgtgcctgaactgcggcttcgagacacacgcagccgagcaagccgccctgaacatcgccagatcctggctgttcctgcggagccaggagtacaagaaataccagacaaacaagacaaccggcaacaccgataagagagccttcgtcgagacctggcagtccttttaccggaagaagcttaaggaggtgtggaaacctgccgtgcggtctggcggatctggcggaggctccacaagcatggacagcgtggccttcgaggacgtggccgtgaacttcacccaggaggagtgggccctgctgagccccagccagaagaacctgtacagggacgtgatgctggaggccttcaggaacctggccagcgtgggcatccagtggaaggaccaggacaccgagaacctgtaccagaacctgggcatcaagctgaggcacatgagggcccacgccggccacaccaggagcgagtgcggcggcgagtggaccagccccaagaaaaagagaaaagtctaagctgccttctgcggggcttgccttctggccatgcccttcttctctcccttgcacctgtacctcttggtctttgaataaagcctgagtaggaaggctagcaaaaaaaaaaaaaaaaaaaaaaaaaaaaaaaaaaaaaaaaaaaaaaaaaaaaaaaaaaaaaaaaaaaaaaaaaaaaaaaa

SEQ ID NO: 3365 - RNA, 5419 nt, synthetic construct
  source 1..5419: mol_type = other RNA
aggaaataagagagaaaagaagagtaagaagaaatataagagccaccatggcccctaagaagaagcgtaaagtgagccgggtgaacggcagcggcagcggcggcggcatgaaccacgaccaggagttcgacccccctaaggtgtaccctcccgtccccgccgagaagagaaagcccatccgggtcctgagcctgttcgatggcatcgccaccggtctgctggtgctgaaggacctgggcatccaggtggataggtacattgcctccgaggtgtgcgaggactccatcaccgtgggaatggtgcgtcatcagggcaagatcatgtacgtgggcgacgtgcggagcgtgacacagaagcatatccaggagtggggccctttcgacctggtgatcggcggcagcccttgcaatgacctgagcatcgtgaacccagcccggaagggcctgtacgagggaaccggcagactgttcttcgagttttacagactgctgcacgacgcccggcctaaggaaggcgacgaccggcccttcttttggctgttcgagaatgtggtggccatgggagtcagcgacaagcgggatattagccggttcctggagagcaaccccgtgatgatcgatgccaaggaagtgagcgccgcccaccgggccagatacttctggggcaatctgcctggcatgaacagacccctggccagcaccgtgaacgacaagctggagctgcaggagtgcctggagcacggccggatcgccaagttcagcaaggtgagaaccatcaccacccgaagcaacagcatcaaacaaggcaaggaccagcactttcctgtgttcatgaacgagaaggaggacatcctgtggtgtaccgagatggagagagtgttcgggttcccagtccactacacagatgtcagcaacatgtctagactggccagacagagactgctgggaagaagctggtccgtccctgtgatcagacacctgttcgcccctctgaaggagtacttcgcctgcgtgagcagcggcaacagcaacgccaacagccggggccccagcttctctagcggcctggtgccactgtccctgagagggagccacatgggccccatggagatctacaaaaccgtgagcgcctggaagcggcagcctgtgcgcgtgctgagcctgtttcggaatatcgataaagtcctgaaaagcctgggattcctggagagcggctctggctccggcggtggcaccctgaagtacgtggaggatgtgacaaacgtggtcagacgggatgtggagaagtggggccccttcgatctggtgtacggcagcacccaacccctgggcagctcttgtgaccggtgccctggctggtacatgtttcagttccaccggatcctgcagtacgccctgccgagacaggagtcccagcggccattcttttggattttcatggacaacttgctgctgaccgaggatgaccaggaaactaccactcggttcctgcagaccgaagccgtgaccctgcaggacgtgagaggccgggactaccagaacgccatgcgggtgtggtccaacatccctggactgaaaagcaagcacgcacctctgacccctaaagaagaggagtacctgcaggcccaggtgcggagcagaagcaagctggacgcccctaaggtggatctgctggtgaagaattgcctcctgcccctgagagagtacttcaagtatttcagccagaatagtctgcccctgggcggcccaagcagcggcgcccctcctcccagcggcggcagcccagccggctccccaacctctaccgaggagggcacctctgagtccgccacccccgagagcggccctggcacctccaccgagcccagcgagggcagcgcacccggcagccctgccggcagccccacctccacagaggagggaaccagcaccgagcccagcgaaggcagcgccccaggcaccagcaccgagcctagtgagggcggctctggcggcggcagcgcccaggagattaaacggatcaacaagatcagaagaagacttgtgaaagacagcaacaccaagaaggccggcaagacaggccccatgaaaaccctgctggttagagtgatgacacccgatctgagagagcggctggaaaacctgagaaagaagcctgaaaatatcccccagcccatcagcaatacatctagagccaacctgaataagctgctgaccgattacaccgaaatgaagaaggcgatcctgcatgtgtactgggaagagttccagaaggaccctgtgggcctgatgagccgggtggcccagcctgccagcaagaagatcgatcagaacaagctgaaacctgagatggacgagaagggcaacctgaccaccgccggctttgcctgctctcagtgtggccagcccctgttcgtgtacaagctggagcaggtgtctgagaagggcaaggcttacaccaactacttcggacggtgcaatgtggccgagcacgaaaagctgatcctgctggcccagctgaagcccgagaaggatagcgacgaagccgtgacatatagcctgggaaagtttgggcagagggccctggatttctacagcattcatgtgaccaaggagtccacccaccccgtgaagcccctggcccagatcgccggaaacagatacgcctccggacctgtgggaaaggccctgagcgacgcatgtatgggcacaatcgcctccttcctgtctaagtaccaggacatcatcatcgaacaccagaaggtggtgaagggcaaccagaagagactggagagcctgcgggagctggccggcaaggaaaacctggaataccctagcgtgaccctgccacctcagcctcacaccaaggagggcgttgatgcctacaacgaagtgatcgcccgggtgcgaatgtgggtgaacctgaacctgtggcagaagctgaagctaagcagagatgatgccaagcctctgctgagactgaagggattcccttcctttcctctggtcgagagacaggccaacgaagtggactggtgggacatggtgtgtaacgtgaagaagctgatcaacgagaaaaaggaggatggcaaggtgttttggcagaatctggctggctacaagagacaggaagccctgagaccatacctgagcagcgaggaagatcggaagaagggaaagaaattcgctcggtaccagctgggcgacctgctgctgcacctggaaaagaagcacggcgaggactggggaaaggtgtacgacgaggcctgggagcggattgacaagaaagtggaaggcctgagcaagcacatcaagctggaagaggaacggagaagcgaggacgcccagagcaaggccgccctgaccgactggctgcgggctaaggccagcttcgtgatcgagggcctgaaggaggccgacaaggacgagttctgcagatgcgagctgaagctgcagaagtggtacggggacctgcggggaaagcccttcgccatcgaagccgagaacagcatcctggacatcagcggcttcagcaagcagtacaactgtgccttcatctggcagaaggacggcgtgaagaagctgaacctgtacctgatcatcaactacttcaagggcggcaagctgcggttcaagaagatcaaacctgaagccttcgaagccaacagattctacaccgtgatcaacaaaaagagcggcgagatcgtgcccatggaggtgaacttcaacttcgacgaccccaacctgatcatcctgcctctggcctttggcaagagacagggcagagaattcatctggaacgacctgctgtccctggaaaccggcagcctgaagctggccaacggaagagtgatcgagaagacactgtacaacagaagaacccggcaggatgagcctgccctgttcgtggccctgaccttcgagcggcgggaggtcctggactcctccaatatcaaaccaatgaacctgatcggcgtggcaagaggcgaaaacatccccgccgtgatcgccctgaccgaccccgagggctgcccactgagccggtttaaggatagcctgggaaacccaacccacatcctgagaatcggcgagagctataaggagaagcagcggaccatccaggccaagaaggaggtggagcagcggagagccggcggctacagccggaagtacgccagcaaagccaagaatctggcagacgatatggtgagaaacaccgctagagatctgctgtactacgccgtgacccaggatgccatgctgatcttcgccaacctgagccggggcttcggccggcagggcaagcggaccttcatggccgagagacagtacacacggatggaggactggctgaccgccaagctggcctacgagggcctgagcaagacctacctgtccaagacactggcccagtacacctccaagacatgcagcaactgtgggtttaccatcaccagcgccgactacgacagggtgctggagaagctgaagaagacagcaacaggctggatgaccacaattaacggcaaggagctgaaggtggagggccagattacctactacaacagatacaagagacagaacgtagtcaaggacctgtccgtcgagctggatagactgagcgaagaatctgtgaacaacgacatctcctcctggacaaagggcagaagcggagaagctctgagcctcctgaagaaaagattctcccatagacccgtgcaggagaagttcgtgtgcctgaactgcggcttcgagacacacgcagccgagcaagccgccctgaacatcgccagatcctggctgttcctgcggagccaggagtacaagaaataccagacaaacaagacaaccggcaacaccgataagagagccttcgtcgagacctggcagtccttttaccggaagaagcttaaggaggtgtggaaacctgccgtgcggtctggcggatctggcggaggctccacaagcatggtgcacggcagcgtgaccttcagggacgtggccatcgacttcagccaggaggagtgggagtgcctgcagcccgaccagaggaccctgtacagggacgtgatgctggagaactacagccacctgatcagcctgggcagcagcatcagcaagcccgacgtgatcaccctgctggagcaggagaaggagccctggatggtggtgaggaaggagaccagcaggaggtaccccgacctggagagcaccagccccaagaaaaagagaaaagtctaagctgccttctgcggggcttgccttctggccatgcccttcttctctcccttgcacctgtacctcttggtctttgaataaagcctgagtaggaaggctagcaaaaaaaaaaaaaaaaaaaaaaaaaaaaaaaaaaaaaaaaaaaaaaaaaaaaaaaaaaaaaaaaaaaaaaaaaaaaaaaa

SEQ ID NO: 3366 - RNA, 5419 nt, synthetic construct
  source 1..5419: mol_type = other RNA
aggaaataagagagaaaagaagagtaagaagaaatataagagccaccatggcccctaagaagaagcgtaaagtgagccgggtgaacggcagcggcagcggcggcggcatgaaccacgaccaggagttcgacccccctaaggtgtaccctcccgtccccgccgagaagagaaagcccatccgggtcctgagcctgttcgatggcatcgccaccggtctgctggtgctgaaggacctgggcatccaggtggataggtacattgcctccgaggtgtgcgaggactccatcaccgtgggaatggtgcgtcatcagggcaagatcatgtacgtgggcgacgtgcggagcgtgacacagaagcatatccaggagtggggccctttcgacctggtgatcggcggcagcccttgcaatgacctgagcatcgtgaacccagcccggaagggcctgtacgagggaaccggcagactgttcttcgagttttacagactgctgcacgacgcccggcctaaggaaggcgacgaccggcccttcttttggctgttcgagaatgtggtggccatgggagtcagcgacaagcgggatattagccggttcctggagagcaaccccgtgatgatcgatgccaaggaagtgagcgccgcccaccgggccagatacttctggggcaatctgcctggcatgaacagacccctggccagcaccgtgaacgacaagctggagctgcaggagtgcctggagcacggccggatcgccaagttcagcaaggtgagaaccatcaccacccgaagcaacagcatcaaacaaggcaaggaccagcactttcctgtgttcatgaacgagaaggaggacatcctgtggtgtaccgagatggagagagtgttcgggttcccagtccactacacagatgtcagcaacatgtctagactggccagacagagactgctgggaagaagctggtccgtccctgtgatcagacacctgttcgcccctctgaaggagtacttcgcctgcgtgagcagcggcaacagcaacgccaacagccggggccccagcttctctagcggcctggtgccactgtccctgagagggagccacatgggccccatggagatctacaaaaccgtgagcgcctggaagcggcagcctgtgcgcgtgctgagcctgtttcggaatatcgataaagtcctgaaaagcctgggattcctggagagcggctctggctccggcggtggcaccctgaagtacgtggaggatgtgacaaacgtggtcagacgggatgtggagaagtggggccccttcgatctggtgtacggcagcacccaacccctgggcagctcttgtgaccggtgccctggctggtacatgtttcagttccaccggatcctgcagtacgccctgccgagacaggagtcccagcggccattcttttggattttcatggacaacttgctgctgaccgaggatgaccaggaaactaccactcggttcctgcagaccgaagccgtgaccctgcaggacgtgagaggccgggactaccagaacgccatgcgggtgtggtccaacatccctggactgaaaagcaagcacgcacctctgacccctaaagaagaggagtacctgcaggcccaggtgcggagcagaagcaagctggacgcccctaaggtggatctgctggtgaagaattgcctcctgcccctgagagagtacttcaagtatttcagccagaatagtctgcccctgggcggcccaagcagcggcgcccctcctcccagcggcggcagcccagccggctccccaacctctaccgaggagggcacctctgagtccgccacccccgagagcggccctggcacctccaccgagcccagcgagggcagcgcacccggcagccctgccggcagccccacctccacagaggagggaaccagcaccgagcccagcgaaggcagcgccccaggcaccagcaccgagcctagtgagggcggctctggcggcggcagcgcccaggagattaaacggatcaacaagatcagaagaagacttgtgaaagacagcaacaccaagaaggccggcaagacaggccccatgaaaaccctgctggttagagtgatgacacccgatctgagagagcggctggaaaacctgagaaagaagcctgaaaatatcccccagcccatcagcaatacatctagagccaacctgaataagctgctgaccgattacaccgaaatgaagaaggcgatcctgcatgtgtactgggaagagttccagaaggaccctgtgggcctgatgagccgggtggcccagcctgccagcaagaagatcgatcagaacaagctgaaacctgagatggacgagaagggcaacctgaccaccgccggctttgcctgctctcagtgtggccagcccctgttcgtgtacaagctggagcaggtgtctgagaagggcaaggcttacaccaactacttcggacggtgcaatgtggccgagcacgaaaagctgatcctgctggcccagctgaagcccgagaaggatagcgacgaagccgtgacatatagcctgggaaagtttgggcagagggccctggatttctacagcattcatgtgaccaaggagtccacccaccccgtgaagcccctggcccagatcgccggaaacagatacgcctccggacctgtgggaaaggccctgagcgacgcatgtatgggcacaatcgcctccttcctgtctaagtaccaggacatcatcatcgaacaccagaaggtggtgaagggcaaccagaagagactggagagcctgcgggagctggccggcaaggaaaacctggaataccctagcgtgaccctgccacctcagcctcacaccaaggagggcgttgatgcctacaacgaagtgatcgcccgggtgcgaatgtgggtgaacctgaacctgtggcagaagctgaagctaagcagagatgatgccaagcctctgctgagactgaagggattcccttcctttcctctggtcgagagacaggccaacgaagtggactggtgggacatggtgtgtaacgtgaagaagctgatcaacgagaaaaaggaggatggcaaggtgttttggcagaatctggctggctacaagagacaggaagccctgagaccatacctgagcagcgaggaagatcggaagaagggaaagaaattcgctcggtaccagctgggcgacctgctgctgcacctggaaaagaagcacggcgaggactggggaaaggtgtacgacgaggcctgggagcggattgacaagaaagtggaaggcctgagcaagcacatcaagctggaagaggaacggagaagcgaggacgcccagagcaaggccgccctgaccgactggctgcgggctaaggccagcttcgtgatcgagggcctgaaggaggccgacaaggacgagttctgcagatgcgagctgaagctgcagaagtggtacggggacctgcggggaaagcccttcgccatcgaagccgagaacagcatcctggacatcagcggcttcagcaagcagtacaactgtgccttcatctggcagaaggacggcgtgaagaagctgaacctgtacctgatcatcaactacttcaagggcggcaagctgcggttcaagaagatcaaacctgaagccttcgaagccaacagattctacaccgtgatcaacaaaaagagcggcgagatcgtgcccatggaggtgaacttcaacttcgacgaccccaacctgatcatcctgcctctggcctttggcaagagacagggcagagaattcatctggaacgacctgctgtccctggaaaccggcagcctgaagctggccaacggaagagtgatcgagaagacactgtacaacagaagaacccggcaggatgagcctgccctgttcgtggccctgaccttcgagcggcgggaggtcctggactcctccaatatcaaaccaatgaacctgatcggcgtggcaagaggcgaaaacatccccgccgtgatcgccctgaccgaccccgagggctgcccactgagccggtttaaggatagcctgggaaacccaacccacatcctgagaatcggcgagagctataaggagaagcagcggaccatccaggccaagaaggaggtggagcagcggagagccggcggctacagccggaagtacgccagcaaagccaagaatctggcagacgatatggtgagaaacaccgctagagatctgctgtactacgccgtgacccaggatgccatgctgatcttcgccaacctgagccggggcttcggccggcagggcaagcggaccttcatggccgagagacagtacacacggatggaggactggctgaccgccaagctggcctacgagggcctgagcaagacctacctgtccaagacactggcccagtacacctccaagacatgcagcaactgtgggtttaccatcaccagcgccgactacgacagggtgctggagaagctgaagaagacagcaacaggctggatgaccacaattaacggcaaggagctgaaggtggagggccagattacctactacaacagatacaagagacagaacgtagtcaaggacctgtccgtcgagctggatagactgagcgaagaatctgtgaacaacgacatctcctcctggacaaagggcagaagcggagaagctctgagcctcctgaagaaaagattctcccatagacccgtgcaggagaagttcgtgtgcctgaactgcggcttcgagacacacgcagccgagcaagccgccctgaacatcgccagatcctggctgttcctgcggagccaggagtacaagaaataccagacaaacaagacaaccggcaacaccgataagagagccttcgtcgagacctggcagtccttttaccggaagaagcttaaggaggtgtggaaacctgccgtgcggtctggcggatctggcggaggctccacaagcacccaggtgagcgtgaccttcgacgacgtggccgtgaccttcacccaggaggagtggggccacctggaccccgcccagaggaccctgtacagggaggtgatgctggagacctgcaggctgctgatgagcctgggctgccccgtgcccaggcccgagctgatctaccagcaggagcacggccaggagctgtggaccgtgaagagggacctgagcaggagcacctgcgccggctacagcagcgagaccagccccaagaaaaagagaaaagtctaagctgccttctgcggggcttgccttctggccatgcccttcttctctcccttgcacctgtacctcttggtctttgaataaagcctgagtaggaaggctagcaaaaaaaaaaaaaaaaaaaaaaaaaaaaaaaaaaaaaaaaaaaaaaaaaaaaaaaaaaaaaaaaaaaaaaaaaaaaaaaa

SEQ ID NO: 3367 - RNA, 5419 nt, synthetic construct
  source 1..5419: mol_type = other RNA
aggaaataagagagaaaagaagagtaagaagaaatataagagccaccatggcccctaagaagaagcgtaaagtgagccgggtgaacggcagcggcagcggcggcggcatgaaccacgaccaggagttcgacccccctaaggtgtaccctcccgtccccgccgagaagagaaagcccatccgggtcctgagcctgttcgatggcatcgccaccggtctgctggtgctgaaggacctgggcatccaggtggataggtacattgcctccgaggtgtgcgaggactccatcaccgtgggaatggtgcgtcatcagggcaagatcatgtacgtgggcgacgtgcggagcgtgacacagaagcatatccaggagtggggccctttcgacctggtgatcggcggcagcccttgcaatgacctgagcatcgtgaacccagcccggaagggcctgtacgagggaaccggcagactgttcttcgagttttacagactgctgcacgacgcccggcctaaggaaggcgacgaccggcccttcttttggctgttcgagaatgtggtggccatgggagtcagcgacaagcgggatattagccggttcctggagagcaaccccgtgatgatcgatgccaaggaagtgagcgccgcccaccgggccagatacttctggggcaatctgcctggcatgaacagacccctggccagcaccgtgaacgacaagctggagctgcaggagtgcctggagcacggccggatcgccaagttcagcaaggtgagaaccatcaccacccgaagcaacagcatcaaacaaggcaaggaccagcactttcctgtgttcatgaacgagaaggaggacatcctgtggtgtaccgagatggagagagtgttcgggttcccagtccactacacagatgtcagcaacatgtctagactggccagacagagactgctgggaagaagctggtccgtccctgtgatcagacacctgttcgcccctctgaaggagtacttcgcctgcgtgagcagcggcaacagcaacgccaacagccggggccccagcttctctagcggcctggtgccactgtccctgagagggagccacatgggccccatggagatctacaaaaccgtgagcgcctggaagcggcagcctgtgcgcgtgctgagcctgtttcggaatatcgataaagtcctgaaaagcctgggattcctggagagcggctctggctccggcggtggcaccctgaagtacgtggaggatgtgacaaacgtggtcagacgggatgtggagaagtggggccccttcgatctggtgtacggcagcacccaacccctgggcagctcttgtgaccggtgccctggctggtacatgtttcagttccaccggatcctgcagtacgccctgccgagacaggagtcccagcggccattcttttggattttcatggacaacttgctgctgaccgaggatgaccaggaaactaccactcggttcctgcagaccgaagccgtgaccctgcaggacgtgagaggccgggactaccagaacgccatgcgggtgtggtccaacatccctggactgaaaagcaagcacgcacctctgacccctaaagaagaggagtacctgcaggcccaggtgcggagcagaagcaagctggacgcccctaaggtggatctgctggtgaagaattgcctcctgcccctgagagagtacttcaagtatttcagccagaatagtctgcccctgggcggcccaagcagcggcgcccctcctcccagcggcggcagcccagccggctccccaacctctaccgaggagggcacctctgagtccgccacccccgagagcggccctggcacctccaccgagcccagcgagggcagcgcacccggcagccctgccggcagccccacctccacagaggagggaaccagcaccgagcccagcgaaggcagcgccccaggcaccagcaccgagcctagtgagggcggctctggcggcggcagcgcccaggagattaaacggatcaacaagatcagaagaagacttgtgaaagacagcaacaccaagaaggccggcaagacaggccccatgaaaaccctgctggttagagtgatgacacccgatctgagagagcggctggaaaacctgagaaagaagcctgaaaatatcccccagcccatcagcaatacatctagagccaacctgaataagctgctgaccgattacaccgaaatgaagaaggcgatcctgcatgtgtactgggaagagttccagaaggaccctgtgggcctgatgagccgggtggcccagcctgccagcaagaagatcgatcagaacaagctgaaacctgagatggacgagaagggcaacctgaccaccgccggctttgcctgctctcagtgtggccagcccctgttcgtgtacaagctggagcaggtgtctgagaagggcaaggcttacaccaactacttcggacggtgcaatgtggccgagcacgaaaagctgatcctgctggcccagctgaagcccgagaaggatagcgacgaagccgtgacatatagcctgggaaagtttgggcagagggccctggatttctacagcattcatgtgaccaaggagtccacccaccccgtgaagcccctggcccagatcgccggaaacagatacgcctccggacctgtgggaaaggccctgagcgacgcatgtatgggcacaatcgcctccttcctgtctaagtaccaggacatcatcatcgaacaccagaaggtggtgaagggcaaccagaagagactggagagcctgcgggagctggccggcaaggaaaacctggaataccctagcgtgaccctgccacctcagcctcacaccaaggagggcgttgatgcctacaacgaagtgatcgcccgggtgcgaatgtgggtgaacctgaacctgtggcagaagctgaagctaagcagagatgatgccaagcctctgctgagactgaagggattcccttcctttcctctggtcgagagacaggccaacgaagtggactggtgggacatggtgtgtaacgtgaagaagctgatcaacgagaaaaaggaggatggcaaggtgttttggcagaatctggctggctacaagagacaggaagccctgagaccatacctgagcagcgaggaagatcggaagaagggaaagaaattcgctcggtaccagctgggcgacctgctgctgcacctggaaaagaagcacggcgaggactggggaaaggtgtacgacgaggcctgggagcggattgacaagaaagtggaaggcctgagcaagcacatcaagctggaagaggaacggagaagcgaggacgcccagagcaaggccgccctgaccgactggctgcgggctaaggccagcttcgtgatcgagggcctgaaggaggccgacaaggacgagttctgcagatgcgagctgaagctgcagaagtggtacggggacctgcggggaaagcccttcgccatcgaagccgagaacagcatcctggacatcagcggcttcagcaagcagtacaactgtgccttcatctggcagaaggacggcgtgaagaagctgaacctgtacctgatcatcaactacttcaagggcggcaagctgcggttcaagaagatcaaacctgaagccttcgaagccaacagattctacaccgtgatcaacaaaaagagcggcgagatcgtgcccatggaggtgaacttcaacttcgacgaccccaacctgatcatcctgcctctggcctttggcaagagacagggcagagaattcatctggaacgacctgctgtccctggaaaccggcagcctgaagctggccaacggaagagtgatcgagaagacactgtacaacagaagaacccggcaggatgagcctgccctgttcgtggccctgaccttcgagcggcgggaggtcctggactcctccaatatcaaaccaatgaacctgatcggcgtggcaagaggcgaaaacatccccgccgtgatcgccctgaccgaccccgagggctgcccactgagccggtttaaggatagcctgggaaacccaacccacatcctgagaatcggcgagagctataaggagaagcagcggaccatccaggccaagaaggaggtggagcagcggagagccggcggctacagccggaagtacgccagcaaagccaagaatctggcagacgatatggtgagaaacaccgctagagatctgctgtactacgccgtgacccaggatgccatgctgatcttcgccaacctgagccggggcttcggccggcagggcaagcggaccttcatggccgagagacagtacacacggatggaggactggctgaccgccaagctggcctacgagggcctgagcaagacctacctgtccaagacactggcccagtacacctccaagacatgcagcaactgtgggtttaccatcaccagcgccgactacgacagggtgctggagaagctgaagaagacagcaacaggctggatgaccacaattaacggcaaggagctgaaggtggagggccagattacctactacaacagatacaagagacagaacgtagtcaaggacctgtccgtcgagctggatagactgagcgaagaatctgtgaacaacgacatctcctcctggacaaagggcagaagcggagaagctctgagcctcctgaagaaaagattctcccatagacccgtgcaggagaagttcgtgtgcctgaactgcggcttcgagacacacgcagccgagcaagccgccctgaacatcgccagatcctggctgttcctgcggagccaggagtacaagaaataccagacaaacaagacaaccggcaacaccgataagagagccttcgtcgagacctggcagtccttttaccggaagaagcttaaggaggtgtggaaacctgccgtgcggtctggcggatctggcggaggctccacaagcatggccttcgaggacgtggccgtgtacttcagcgaggaggagtggggcctgctggacaccgcccagagggccctgtacaggcacgtgatgctggagaacttcaccctggtgaccagcctgggcctgagcaccagcaggcccctggtggtgatccagctggagaggggcgaggacccctgggtgcccagcgtgaaggacatgaccctggccaggaacgcctacggcaggaggaccaccggcagcaccagccccaagaaaaagagaaaagtctaagctgccttctgcggggcttgccttctggccatgcccttcttctctcccttgcacctgtacctcttggtctttgaataaagcctgagtaggaaggctagcaaaaaaaaaaaaaaaaaaaaaaaaaaaaaaaaaaaaaaaaaaaaaaaaaaaaaaaaaaaaaaaaaaaaaaaaaaaaaaaa

SEQ ID NO: 3368 - RNA, 5419 nt, synthetic construct
  source 1..5419: mol_type = other RNA
aggaaataagagagaaaagaagagtaagaagaaatataagagccaccatggcccctaagaagaagcgtaaagtgagccgggtgaacggcagcggcagcggcggcggcatgaaccacgaccaggagttcgacccccctaaggtgtaccctcccgtccccgccgagaagagaaagcccatccgggtcctgagcctgttcgatggcatcgccaccggtctgctggtgctgaaggacctgggcatccaggtggataggtacattgcctccgaggtgtgcgaggactccatcaccgtgggaatggtgcgtcatcagggcaagatcatgtacgtgggcgacgtgcggagcgtgacacagaagcatatccaggagtggggccctttcgacctggtgatcggcggcagcccttgcaatgacctgagcatcgtgaacccagcccggaagggcctgtacgagggaaccggcagactgttcttcgagttttacagactgctgcacgacgcccggcctaaggaaggcgacgaccggcccttcttttggctgttcgagaatgtggtggccatgggagtcagcgacaagcgggatattagccggttcctggagagcaaccccgtgatgatcgatgccaaggaagtgagcgccgcccaccgggccagatacttctggggcaatctgcctggcatgaacagacccctggccagcaccgtgaacgacaagctggagctgcaggagtgcctggagcacggccggatcgccaagttcagcaaggtgagaaccatcaccacccgaagcaacagcatcaaacaaggcaaggaccagcactttcctgtgttcatgaacgagaaggaggacatcctgtggtgtaccgagatggagagagtgttcgggttcccagtccactacacagatgtcagcaacatgtctagactggccagacagagactgctgggaagaagctggtccgtccctgtgatcagacacctgttcgcccctctgaaggagtacttcgcctgcgtgagcagcggcaacagcaacgccaacagccggggccccagcttctctagcggcctggtgccactgtccctgagagggagccacatgggccccatggagatctacaaaaccgtgagcgcctggaagcggcagcctgtgcgcgtgctgagcctgtttcggaatatcgataaagtcctgaaaagcctgggattcctggagagcggctctggctccggcggtggcaccctgaagtacgtggaggatgtgacaaacgtggtcagacgggatgtggagaagtggggccccttcgatctggtgtacggcagcacccaacccctgggcagctcttgtgaccggtgccctggctggtacatgtttcagttccaccggatcctgcagtacgccctgccgagacaggagtcccagcggccattcttttggattttcatggacaacttgctgctgaccgaggatgaccaggaaactaccactcggttcctgcagaccgaagccgtgaccctgcaggacgtgagaggccgggactaccagaacgccatgcgggtgtggtccaacatccctggactgaaaagcaagcacgcacctctgacccctaaagaagaggagtacctgcaggcccaggtgcggagcagaagcaagctggacgcccctaaggtggatctgctggtgaagaattgcctcctgcccctgagagagtacttcaagtatttcagccagaatagtctgcccctgggcggcccaagcagcggcgcccctcctcccagcggcggcagcccagccggctccccaacctctaccgaggagggcacctctgagtccgccacccccgagagcggccctggcacctccaccgagcccagcgagggcagcgcacccggcagccctgccggcagccccacctccacagaggagggaaccagcaccgagcccagcgaaggcagcgccccaggcaccagcaccgagcctagtgagggcggctctggcggcggcagcgcccaggagattaaacggatcaacaagatcagaagaagacttgtgaaagacagcaacaccaagaaggccggcaagacaggccccatgaaaaccctgctggttagagtgatgacacccgatctgagagagcggctggaaaacctgagaaagaagcctgaaaatatcccccagcccatcagcaatacatctagagccaacctgaataagctgctgaccgattacaccgaaatgaagaaggcgatcctgcatgtgtactgggaagagttccagaaggaccctgtgggcctgatgagccgggtggcccagcctgccagcaagaagatcgatcagaacaagctgaaacctgagatggacgagaagggcaacctgaccaccgccggctttgcctgctctcagtgtggccagcccctgttcgtgtacaagctggagcaggtgtctgagaagggcaaggcttacaccaactacttcggacggtgcaatgtggccgagcacgaaaagctgatcctgctggcccagctgaagcccgagaaggatagcgacgaagccgtgacatatagcctgggaaagtttgggcagagggccctggatttctacagcattcatgtgaccaaggagtccacccaccccgtgaagcccctggcccagatcgccggaaacagatacgcctccggacctgtgggaaaggccctgagcgacgcatgtatgggcacaatcgcctccttcctgtctaagtaccaggacatcatcatcgaacaccagaaggtggtgaagggcaaccagaagagactggagagcctgcgggagctggccggcaaggaaaacctggaataccctagcgtgaccctgccacctcagcctcacaccaaggagggcgttgatgcctacaacgaagtgatcgcccgggtgcgaatgtgggtgaacctgaacctgtggcagaagctgaagctaagcagagatgatgccaagcctctgctgagactgaagggattcccttcctttcctctggtcgagagacaggccaacgaagtggactggtgggacatggtgtgtaacgtgaagaagctgatcaacgagaaaaaggaggatggcaaggtgttttggcagaatctggctggctacaagagacaggaagccctgagaccatacctgagcagcgaggaagatcggaagaagggaaagaaattcgctcggtaccagctgggcgacctgctgctgcacctggaaaagaagcacggcgaggactggggaaaggtgtacgacgaggcctgggagcggattgacaagaaagtggaaggcctgagcaagcacatcaagctggaagaggaacggagaagcgaggacgcccagagcaaggccgccctgaccgactggctgcgggctaaggccagcttcgtgatcgagggcctgaaggaggccgacaaggacgagttctgcagatgcgagctgaagctgcagaagtggtacggggacctgcggggaaagcccttcgccatcgaagccgagaacagcatcctggacatcagcggcttcagcaagcagtacaactgtgccttcatctggcagaaggacggcgtgaagaagctgaacctgtacctgatcatcaactacttcaagggcggcaagctgcggttcaagaagatcaaacctgaagccttcgaagccaacagattctacaccgtgatcaacaaaaagagcggcgagatcgtgcccatggaggtgaacttcaacttcgacgaccccaacctgatcatcctgcctctggcctttggcaagagacagggcagagaattcatctggaacgacctgctgtccctggaaaccggcagcctgaagctggccaacggaagagtgatcgagaagacactgtacaacagaagaacccggcaggatgagcctgccctgttcgtggccctgaccttcgagcggcgggaggtcctggactcctccaatatcaaaccaatgaacctgatcggcgtggcaagaggcgaaaacatccccgccgtgatcgccctgaccgaccccgagggctgcccactgagccggtttaaggatagcctgggaaacccaacccacatcctgagaatcggcgagagctataaggagaagcagcggaccatccaggccaagaaggaggtggagcagcggagagccggcggctacagccggaagtacgccagcaaagccaagaatctggcagacgatatggtgagaaacaccgctagagatctgctgtactacgccgtgacccaggatgccatgctgatcttcgccaacctgagccggggcttcggccggcagggcaagcggaccttcatggccgagagacagtacacacggatggaggactggctgaccgccaagctggcctacgagggcctgagcaagacctacctgtccaagacactggcccagtacacctccaagacatgcagcaactgtgggtttaccatcaccagcgccgactacgacagggtgctggagaagctgaagaagacagcaacaggctggatgaccacaattaacggcaaggagctgaaggtggagggccagattacctactacaacagatacaagagacagaacgtagtcaaggacctgtccgtcgagctggatagactgagcgaagaatctgtgaacaacgacatctcctcctggacaaagggcagaagcggagaagctctgagcctcctgaagaaaagattctcccatagacccgtgcaggagaagttcgtgtgcctgaactgcggcttcgagacacacgcagccgagcaagccgccctgaacatcgccagatcctggctgttcctgcggagccaggagtacaagaaataccagacaaacaagacaaccggcaacaccgataagagagccttcgtcgagacctggcagtccttttaccggaagaagcttaaggaggtgtggaaacctgccgtgcggtctggcggatctggcggaggctccacaagcatggccgccagccaggagagcctgaccttcaaggacgtgagcgtggacttcagcctggaggagtgggagtgcctggaccccgcccagaggaagctgtacagcgacgtgatgctggagaactacagcaacctggtgagcctgggcctggtggtgagcaagcccggcctggtgaccttcctggagcagatgcaggaggtgtgggacgtgagcaggaagaagagcatcagcaccccccccggcaggaccagccccaagaaaaagagaaaagtctaagctgccttctgcggggcttgccttctggccatgcccttcttctctcccttgcacctgtacctcttggtctttgaataaagcctgagtaggaaggctagcaaaaaaaaaaaaaaaaaaaaaaaaaaaaaaaaaaaaaaaaaaaaaaaaaaaaaaaaaaaaaaaaaaaaaaaaaaaaaaaa

SEQ ID NO: 3369 - RNA, 5419 nt, synthetic construct
  source 1..5419: mol_type = other RNA
aggaaataagagagaaaagaagagtaagaagaaatataagagccaccatggcccctaagaagaagcgtaaagtgagccgggtgaacggcagcggcagcggcggcggcatgaaccacgaccaggagttcgacccccctaaggtgtaccctcccgtccccgccgagaagagaaagcccatccgggtcctgagcctgttcgatggcatcgccaccggtctgctggtgctgaaggacctgggcatccaggtggataggtacattgcctccgaggtgtgcgaggactccatcaccgtgggaatggtgcgtcatcagggcaagatcatgtacgtgggcgacgtgcggagcgtgacacagaagcatatccaggagtggggccctttcgacctggtgatcggcggcagcccttgcaatgacctgagcatcgtgaacccagcccggaagggcctgtacgagggaaccggcagactgttcttcgagttttacagactgctgcacgacgcccggcctaaggaaggcgacgaccggcccttcttttggctgttcgagaatgtggtggccatgggagtcagcgacaagcgggatattagccggttcctggagagcaaccccgtgatgatcgatgccaaggaagtgagcgccgcccaccgggccagatacttctggggcaatctgcctggcatgaacagacccctggccagcaccgtgaacgacaagctggagctgcaggagtgcctggagcacggccggatcgccaagttcagcaaggtgagaaccatcaccacccgaagcaacagcatcaaacaaggcaaggaccagcactttcctgtgttcatgaacgagaaggaggacatcctgtggtgtaccgagatggagagagtgttcgggttcccagtccactacacagatgtcagcaacatgtctagactggccagacagagactgctgggaagaagctggtccgtccctgtgatcagacacctgttcgcccctctgaaggagtacttcgcctgcgtgagcagcggcaacagcaacgccaacagccggggccccagcttctctagcggcctggtgccactgtccctgagagggagccacatgggccccatggagatctacaaaaccgtgagcgcctggaagcggcagcctgtgcgcgtgctgagcctgtttcggaatatcgataaagtcctgaaaagcctgggattcctggagagcggctctggctccggcggtggcaccctgaagtacgtggaggatgtgacaaacgtggtcagacgggatgtggagaagtggggccccttcgatctggtgtacggcagcacccaacccctgggcagctcttgtgaccggtgccctggctggtacatgtttcagttccaccggatcctgcagtacgccctgccgagacaggagtcccagcggccattcttttggattttcatggacaacttgctgctgaccgaggatgaccaggaaactaccactcggttcctgcagaccgaagccgtgaccctgcaggacgtgagaggccgggactaccagaacgccatgcgggtgtggtccaacatccctggactgaaaagcaagcacgcacctctgacccctaaagaagaggagtacctgcaggcccaggtgcggagcagaagcaagctggacgcccctaaggtggatctgctggtgaagaattgcctcctgcccctgagagagtacttcaagtatttcagccagaatagtctgcccctgggcggcccaagcagcggcgcccctcctcccagcggcggcagcccagccggctccccaacctctaccgaggagggcacctctgagtccgccacccccgagagcggccctggcacctccaccgagcccagcgagggcagcgcacccggcagccctgccggcagccccacctccacagaggagggaaccagcaccgagcccagcgaaggcagcgccccaggcaccagcaccgagcctagtgagggcggctctggcggcggcagcgcccaggagattaaacggatcaacaagatcagaagaagacttgtgaaagacagcaacaccaagaaggccggcaagacaggccccatgaaaaccctgctggttagagtgatgacacccgatctgagagagcggctggaaaacctgagaaagaagcctgaaaatatcccccagcccatcagcaatacatctagagccaacctgaataagctgctgaccgattacaccgaaatgaagaaggcgatcctgcatgtgtactgggaagagttccagaaggaccctgtgggcctgatgagccgggtggcccagcctgccagcaagaagatcgatcagaacaagctgaaacctgagatggacgagaagggcaacctgaccaccgccggctttgcctgctctcagtgtggccagcccctgttcgtgtacaagctggagcaggtgtctgagaagggcaaggcttacaccaactacttcggacggtgcaatgtggccgagcacgaaaagctgatcctgctggcccagctgaagcccgagaaggatagcgacgaagccgtgacatatagcctgggaaagtttgggcagagggccctggatttctacagcattcatgtgaccaaggagtccacccaccccgtgaagcccctggcccagatcgccggaaacagatacgcctccggacctgtgggaaaggccctgagcgacgcatgtatgggcacaatcgcctccttcctgtctaagtaccaggacatcatcatcgaacaccagaaggtggtgaagggcaaccagaagagactggagagcctgcgggagctggccggcaaggaaaacctggaataccctagcgtgaccctgccacctcagcctcacaccaaggagggcgttgatgcctacaacgaagtgatcgcccgggtgcgaatgtgggtgaacctgaacctgtggcagaagctgaagctaagcagagatgatgccaagcctctgctgagactgaagggattcccttcctttcctctggtcgagagacaggccaacgaagtggactggtgggacatggtgtgtaacgtgaagaagctgatcaacgagaaaaaggaggatggcaaggtgttttggcagaatctggctggctacaagagacaggaagccctgagaccatacctgagcagcgaggaagatcggaagaagggaaagaaattcgctcggtaccagctgggcgacctgctgctgcacctggaaaagaagcacggcgaggactggggaaaggtgtacgacgaggcctgggagcggattgacaagaaagtggaaggcctgagcaagcacatcaagctggaagaggaacggagaagcgaggacgcccagagcaaggccgccctgaccgactggctgcgggctaaggccagcttcgtgatcgagggcctgaaggaggccgacaaggacgagttctgcagatgcgagctgaagctgcagaagtggtacggggacctgcggggaaagcccttcgccatcgaagccgagaacagcatcctggacatcagcggcttcagcaagcagtacaactgtgccttcatctggcagaaggacggcgtgaagaagctgaacctgtacctgatcatcaactacttcaagggcggcaagctgcggttcaagaagatcaaacctgaagccttcgaagccaacagattctacaccgtgatcaacaaaaagagcggcgagatcgtgcccatggaggtgaacttcaacttcgacgaccccaacctgatcatcctgcctctggcctttggcaagagacagggcagagaattcatctggaacgacctgctgtccctggaaaccggcagcctgaagctggccaacggaagagtgatcgagaagacactgtacaacagaagaacccggcaggatgagcctgccctgttcgtggccctgaccttcgagcggcgggaggtcctggactcctccaatatcaaaccaatgaacctgatcggcgtggcaagaggcgaaaacatccccgccgtgatcgccctgaccgaccccgagggctgcccactgagccggtttaaggatagcctgggaaacccaacccacatcctgagaatcggcgagagctataaggagaagcagcggaccatccaggccaagaaggaggtggagcagcggagagccggcggctacagccggaagtacgccagcaaagccaagaatctggcagacgatatggtgagaaacaccgctagagatctgctgtactacgccgtgacccaggatgccatgctgatcttcgccaacctgagccggggcttcggccggcagggcaagcggaccttcatggccgagagacagtacacacggatggaggactggctgaccgccaagctggcctacgagggcctgagcaagacctacctgtccaagacactggcccagtacacctccaagacatgcagcaactgtgggtttaccatcaccagcgccgactacgacagggtgctggagaagctgaagaagacagcaacaggctggatgaccacaattaacggcaaggagctgaaggtggagggccagattacctactacaacagatacaagagacagaacgtagtcaaggacctgtccgtcgagctggatagactgagcgaagaatctgtgaacaacgacatctcctcctggacaaagggcagaagcggagaagctctgagcctcctgaagaaaagattctcccatagacccgtgcaggagaagttcgtgtgcctgaactgcggcttcgagacacacgcagccgagcaagccgccctgaacatcgccagatcctggctgttcctgcggagccaggagtacaagaaataccagacaaacaagacaaccggcaacaccgataagagagccttcgtcgagacctggcagtccttttaccggaagaagcttaaggaggtgtggaaacctgccgtgcggtctggcggatctggcggaggctccacaagcagccagggcctggtgaccttcggcgacgtggccctggacttcagccaggaggagtgggagtggctgaaccccagccagaaggacctgtacagggacgtgatgctggagaactacaggaacctggtgtggctgggcctgagcatcagcaagcccaacatgatcagcctgctggagcagggcaaggagccctggatggtggagagggagatgagccacggccagtgcgccgactgggagagctggaccagccccaagaaaaagagaaaagtctaagctgccttctgcggggcttgccttctggccatgcccttcttctctcccttgcacctgtacctcttggtctttgaataaagcctgagtaggaaggctagcaaaaaaaaaaaaaaaaaaaaaaaaaaaaaaaaaaaaaaaaaaaaaaaaaaaaaaaaaaaaaaaaaaaaaaaaaaaaaaaa
